United States Patent Application Publication US 2011/0182862 A1 - sequence listing, part 14

SEQ ID NO: 19632 - protein, 190 aa, Muscodor strobelii
  misc_feature: SGI Peptide ID NO. 566608
  misc_feature (69)..(183): Pfam Id: PF01491 Pfam Desc: Frataxin-like domain
  misc_feature (69)..(177): Pfam Id: PF01491 Pfam Desc: Frataxin-like domain
  misc_feature (1)..(183): NCBI GI: 256732991 Blast Desc: NECHADRAFT_78848 [Nectria haematococca mpVI 77-13-4]
  misc_feature (12)..(187): NCBI GI: 261357195 Blast Desc: mitochondrial iron uptake protein [Verticillium albo-atrum VaMs.102]
  misc_feature (38)..(182): NCBI GI: 46123257 Blast Desc: FG06006.1 [Gibberella zeae PH-1]
  misc_feature (66)..(182): NCBI GI: 39968685 Blast Desc: MGG_02435 [Magnaporthe grisea 70-15] gi|145013964|gb|EDJ98605.1| MGG_02435 [Magnaporthe grisea 70-15]
  misc_feature (66)..(182): NCBI GI: 171689802 Blast Desc: protein product [Podospora anserina] gi|170944863|emb|CAP70975.1| protein product [Podospora anserina]
  misc_feature (4)..(182): NCBI GI: 116205297 Blast Desc: CHGG_10532 [Chaetomium globosum CBS 148.51] gi|88176660|gb|EAQ84128.1| CHGG_10532 [Chaetomium globosum CBS 148.51]
  misc_feature (11)..(182): NCBI GI: 189198590 Blast Desc: arabinogalactan endo-1,4-beta-galactosidase [Pyrenophora tritici-repentis Pt-1C-BFP] gi|187982731|gb|EDU48219.1| arabinogalactan [Pyrenophora
  misc_feature (8)..(182): NCBI GI: 115391373 Blast Desc: ATEG_04013 [Aspergillus terreus NIH2624] gi|114194115|gb|EAU35815.1| ATEG_04013 [Aspergillus terreus NIH2624]
  misc_feature (1)..(188): NCBI GI: 85089968 Blast Desc: NCU09754 [Neurospora crassa OR74A] gi|28919530|gb|EAA28958.1| conserved [Neurospora crassa OR74A]
  misc_feature (1)..(184): NCBI GI: 154291646 Blast Desc: BC1G_15091 [Botryotinia fuckeliana B05.10] gi|150846672|gb|EDN21865.1| BC1G_15091 [Botryotinia fuckeliana B05.10]
MHRLNITRMGRLAMRSLATRPATVVGSRSISSARIGASQRQLRSTFSTSSYLAKPLSAADLKTAQPANMTDNEYHELADYYLEQLFSRFERKSEESIAYEVDYSSGVMNITIDKKGTYVINKQPPNKQIWLSSPISGPKRYDWVVISEGQDQKQDTATGDWVYMRDGSTLNDLLREETDVDMDSFPAGTI

SEQ ID NO: 19633 - DNA, 1234 bp, Muscodor strobelii
  misc_feature: SGI EST ID NO. CUFF.45875.0
  misc_feature: Variant of the nucleotide sequence at SEQ ID NO 19631
tgtgatgacatttcagggacctctggcgatagctcttgccctattccgtagctctagaaacatggaaaggacaacctcaacatcatctttgtttactccgactgcgcagccagaactcaacacgatcaacatacagcatccgatgcattagtagcatatcgcagagcattgatagctctttatccttcgccgctacattccccgtgtttatcatcgctcactcacgcaactctcgacacccaccgataccgtctaccttccccacgacaccgttcacgacaacgctcacgatgcatcgcctcaacatcacgagaatgggccgattggccatgcgcagtcttgcgacgcgccccgccaccgttgttgggtcgaggagtatctcatccgcaagaatcggagcttcgcagcgtcaacttcgaagcaccttctcaacaagctcatatctagccaagccgctgtctgccgccgatctgaagacagcccagccggctaatatgaccgacaacgagtatcatgagctagccgactattatctagagcaactcttcagccgtttcgagcgaaaatcggaggagagcattgcttatgaagtcgactacagctccggtgtcatgaatattaccatcgataagaagggcacatacgtcatcaataaacagcccccgaacaagcaaatttggctctcatcaccgatctcaggcccgaagcgctacgactgggtggtcattagtgagggccaggaccagaagcaagacacggctaccggtgactgggtctatatgcgcgatggatcaacactgaatgacttactgagggaggagacggatgtggatatggactcgttcccggccggcacgatctagaaccgacgcggcccgcccaagttacccaagtcgaagccttgagtttgtatgatttgttacggttattgttactgttacggttatggatgtgtacaatatgctggatgtcactatgatatcccacgactgtgtctctactattatgcttataccttagctgattgtttcatgaagggaaaagaagagcaacgggaagagctgtcgagttcgcatgcactaggagggcatggagggaagcgatggactctacgagtgtcacagcaagctgacggtgcgttagcacatgaatttgcgtatgctctgttgcattgtgccgaggaatagtcagatactgaaattgactgacagctgatttcaacagctgattttca

SEQ ID NO: 19634 - DNA, 327 bp, Muscodor strobelii
  misc_feature: SGI cDNA ID NO. 566609
  misc_feature: Encodes the peptide sequence at SEQ ID NO 19635
atggccactcccagatttcgactgatattcaacgtcccaacttctagcgctgcggcctgtaaatctgccatcttcgcagctggggctggacgacaaggcaactatagcgagtgctgctggacagctgtgggcaagggtcaattccgccctacggagggagccaacccagccataggcaaagtcggagctttggaggaagtagaagaagtccgtgtcgaaactctttgcatcggggagggaacaaccaaaaaggctgtggccgctcttaagagtgcacatccttacgaagagccttcgtatagtgtctacaagttggaagacttttga

SEQ ID NO: 19635 - protein, 108 aa, Muscodor strobelii
  misc_feature: SGI Peptide ID NO. 566609
  misc_feature (5)..(108): NCBI GI: 256726708 Blast Desc: NECHADRAFT_34373 [Nectria haematococca mpVI 77-13-4]
  misc_feature (1)..(108): NCBI GI: 238843872 Blast Desc: structural toxin protein RtxA [Microsporum canis CBS 113480]
  misc_feature (3)..(108): NCBI GI: 169764471 Blast Desc: [Aspergillus oryzae RIB40] gi|238504278|ref|XP_002383370.1| conserved [Aspergillus flavus NRRL3357] gi|83764561|dbj|BAE54705.1| protein product oryzae]
  misc_feature (2)..(108): NCBI GI: 259486630 Blast Desc: TPA: conserved [Aspergillus nidulans FGSC A4]
  misc_feature (2)..(108): NCBI GI: 116197048 Blast Desc: CHGG_05122 [Chaetomium globosum CBS 148.51] gi|88181035|gb|EAQ88503.1| CHGG_05122 [Chaetomium globosum CBS 148.51]
  misc_feature (5)..(108): NCBI GI: 256720676 Blast Desc: NECHADRAFT_72217 [Nectria haematococca mpVI 77-13-4]
  misc_feature (5)..(108): NCBI GI: 261360982 Blast Desc: structural toxin protein RtxA [Verticillium albo-atrum VaMs.102]
  misc_feature (5)..(108): NCBI GI: 46137905 Blast Desc: FG10467.1 [Gibberella zeae PH-1]
  misc_feature (5)..(108): NCBI GI: 145607305 Blast Desc: MGG_04152 [Magnaporthe grisea 70-15] gi|145014886|gb|EDJ99454.1| MGG_04152 [Magnaporthe grisea 70-15]
  misc_feature (3)..(107): NCBI GI: 171688184 Blast Desc: protein product [Podospora anserina] gi|170944054|emb|CAP70164.1| protein product [Podospora anserina]
MATPRFRLIFNVPTSSAAACKSAIFAAGAGRQGNYSECCWTAVGKGQFRPTEGANPAIGKVGALEEVEEVRVETLCIGEGTTKKAVAALKSAHPYEEPSYSVYKLEDF

SEQ ID NO: 19636 - DNA, 2385 bp, Muscodor strobelii
  misc_feature: SGI EST ID NO. CUFF.45878.0
  misc_feature: Variant of the nucleotide sequence at SEQ ID NO 19634
caaagatccaaatcttcctcctgaaccactgacacaatatagcataatcatgattttgtcaaagaaagatcaatgtccacatcggcccctctccaccgtagctcaagccccgatataacatacataacgtcggagcccttcgagccaaaacccctcatcgccgacattctacgtacacgcttctgcattcctgactccattttccttgtcgagggcgtcgatacagcatacacttcgaaatcaaagcgatggcgcgcagtatgcctctcacttggggatggcgaactctgtatccgagctttactctctgctgaaatgcacagatttgtggatcaggacgaaatcgtgtttggatcctacgtgaagcttttggacttctcgatcgaatggaaagacacgggcaaccacgcagaagaatctgcgacaaaagaggacagcgatgacgaacaacacggtctatccgcagaaagcgggcgcatggtctacctcatggttgagaatctagttgttgtcggctggcacaacgccttgatcgatcgatctaatattgacatggaagacgaagtggaagagcatagtgatcctatggaggctgaagatgacctgcacacgattattccctctacgccaccacgcagcagcccggaacccgtgcaacacgatatcgagccagcaacgtcgcaaggtgaaacgaagttactcgaagagcttgcagacgccgatgacgattttgaaaccatggccatctcgaagaacaaaaccaccgagaatcgtacggcagtagctgcggacacgaacccaaacgctcgcgcgtggggtttccaaaacccggcacgatctataaagctaacaaaactacgctctatacccaatttaccctataaacaaaactggagcgtcaatctcctctgtgtcgttgcggcaatctcggatgttgagcctgcgggtatgccaccgtggacacagaggcaagcacggcttacggacccatcaacggacaaacaagtacttctgacggtctttctcgatgcacagtcattcaatccagtggttggaagtgtggtcctgttacttggggtcaagaaccatcgatttgatggaggctgtgtcaagaagtatgccagtgatcggccaccggagggtgaaagctggtggttcgtaaaccctacgcagttcccttggtgcaagactgaggcggagtacttgaggcgatggtggtttgagaatttccaagatggttgatgtagactccaaacactcaattgacgatactctacttcttacctaagaatacaagaatattcatgcttgcgaatgaggccttatctcattctacactactgaatgcacgaatattcgtatttagtttgaaaattattatcaaacatccatgattgcctatattgtattccatcggcgaagactatgagcgaggggtctaccccaccttagatcatcccaccacttcgtaataaacttgtattggggatcctttcatctaatttcattctgttaaagtctaataaccctatacaatggccactcccagatttcgactgatattcaacgtcccaacttctagcgctgcggcctgtaaatctgccatcttcgcagctggggctggacgacaaggcaactatagcgagtgctgctggacagctgtgggcaagggtcaattccgccctacggagggagccaacccagccataggcaaagtcggagctttggaggaagtagaagaagtccgtgtcgaaactctttgcatcggggagggaacaaccaaaaaggctgtggccgctcttaagaggtattgtagcaggtgcctaaggtaacagtggagctctgcaacgggcttgctaatgtctctttgcgaagtgcacatccttacgaagagccttcgtatagtgtctacaagttggaagacttttgagaacctcccaatcaaggctgtttttgttattctgagaggaaatgctgagattttagctgcagcgttcatttgcagtagggaggtatccaatactcagcaagtcgtggacaggagaaatgatccttcaggttgctggattgctaggtagcacctacgagttatccctcaagaataacactgaataccatggccatagcctgtcattcatttggaaatgaaccagttcattactccgatcacgattagggagttgtatgctttgtcaatccattgtctactactctctagtagtgggagtggtagtgagttctcggcagcgtcactagtagcagtaagatatacagcgtatcttttcaatatcatcaccaactacgtgtgtatagaaatcaaggaaattactatgtagcctaggaatcatccatagataatttaggttcattactcagagctacgac

SEQ ID NO: 19637 - DNA, 1170 bp, Muscodor strobelii
  misc_feature: SGI cDNA ID NO. 566610
  misc_feature: Encodes the peptide sequence at SEQ ID NO 19638
atgtccacatcggcccctctccaccgtagctcaagccccgatataacatacataacgtcggagcccttcgagccaaaacccctcatcgccgacattctacgtacacgcttctgcattcctgactccattttccttgtcgagggcgtcgatacagcatacacttcgaaatcaaagcgatggcgcgcagtatgcctctcacttggggatggcgaactctgtatccgagctttactctctgctgaaatgcacagatttgtggatcaggacgaaatcgtgtttggatcctacgtgaagcttttggacttctcgatcgaatggaaagacacgggcaaccacgcagaagaatctgcgacaaaagaggacagcgatgacgaacaacacggtctatccgcagaaagcgggcgcatggtctacctcatggttgagaatctagttgttgtcggctggcacaacgccttgatcgatcgatctaatattgacatggaagacgaagtggaagagcatagtgatcctatggaggctgaagatgacctgcacacgattattccctctacgccaccacgcagcagcccggaacccgtgcaacacgatatcgagccagcaacgtcgcaaggtgaaacgaagttactcgaagagcttgcagacgccgatgacgattttgaaaccatggccatctcgaagaacaaaaccaccgagaatcgtacggcagtagctgcggacacgaacccaaacgctcgcgcgtggggtttccaaaacccggcacgatctataaagctaacaaaactacgctctatacccaatttaccctataaacaaaactggagcgtcaatctcctctgtgtcgttgcggcaatctcggatgttgagcctgcgggtatgccaccgtggacacagaggcaagcacggcttacggacccatcaacggacaaacaagtacttctgacggtctttctcgatgcacagtcattcaatccagtggttggaagtgtggtcctgttacttggggtcaagaaccatcgatttgatggaggctgtgtcaagaagtatgccagtgatcggccaccggagggtgaaagctggtggttcgtaaaccctacgcagttcccttggtgcaagactgaggcggagtacttgaggcgatggtggtttgagaatttccaagatggttga

SEQ ID NO: 19638 - protein, 389 aa, Muscodor strobelii
  misc_feature: SGI Peptide ID NO. 566610
  misc_feature (15)..(385): NCBI GI: 261357097 Blast Desc: conserved [Verticillium albo-atrum VaMs.102]
  misc_feature (15)..(370): NCBI GI: 46109654 Blast Desc: FG01709.1 [Gibberella zeae PH-1]
  misc_feature (15)..(371): NCBI GI: 256730692 Blast Desc: NECHADRAFT_89611 [Nectria haematococca mpVI 77-13-4]
  misc_feature (28)..(385): NCBI GI: 39977681 Blast Desc: MGG_06725 [Magnaporthe grisea 70-15] gi|145013758|gb|EDJ98399.1| MGG_06725 [Magnaporthe grisea 70-15]
  misc_feature (12)..(389): NCBI GI: 116199795 Blast Desc: CHGG_08053 [Chaetomium globosum CBS 148.51] gi|88179332|gb|EAQ86800.1| CHGG_08053 [Chaetomium globosum CBS 148.51]
  misc_feature (252)..(382): NCBI GI: 10241489 Blast Desc: [Neurospora crassa]
  misc_feature (252)..(382): NCBI GI: 85076037 Blast Desc: NCU03514 [Neurospora crassa OR74A] gi|28916895|gb|EAA26634.1| [Neurospora crassa OR74A]
  misc_feature (240)..(385): NCBI GI: 171688874 Blast Desc: protein product [Podospora anserina] gi|170944399|emb|CAP70509.1| protein product [Podospora anserina]
  misc_feature (6)..(368): NCBI GI: 240281338 Blast Desc: conserved [Ajellomyces capsulatus H143]
  misc_feature (24)..(104): NCBI GI: 171688872 Blast Desc: protein product [Podospora anserina] gi|170944398|emb|CAP70508.1| protein product [Podospora anserina]
MSTSAPLHRSSSPDITYITSEPFEPKPLIADILRTRFCIPDSIFLVEGVDTAYTSKSKRWRAVCLSLGDGELCIRALLSAEMHRFVDQDEIVFGSYVKLLDFSIEWKDTGNHAEESATKEDSDDEQHGLSAESGRMVYLMVENLVVVGWHNALIDRSNIDMEDEVEEHSDPMEAEDDLHTIIPSTPPRSSPEPVQHDIEPATSQGETKLLEELADADDDFETMAISKNKTTENRTAVAADTNPNARAWGFQNPARSIKLTKLRSIPNLPYKQNWSVNLLCVVAAISDVEPAGMPPWTQRQARLTDPSTDKQVLLTVFLDAQSFNPVVGSVVLLLGVKNHRFDGGCVKKYASDRPPEGESWWFVNPTQFPWCKTEAEYLRRWWFENFQDG

SEQ ID NO: 19639 - DNA, 2385 bp, Muscodor strobelii; identical to SEQ ID NO: 19636
  misc_feature: SGI EST ID NO. CUFF.45878.0
  misc_feature: Variant of the nucleotide sequence at SEQ ID NO 19637

SEQ ID NO: 19640 - DNA, 630 bp, Muscodor strobelii
  misc_feature: SGI cDNA ID NO. 566611
  misc_feature: Elevated expression when VOC is produced
  misc_feature: Encodes the peptide sequence at SEQ ID NO 19641
atggtgtcaatctctctcaaatcctcgcttgtcagaggaggcacacgagagcgccagcgccgtttggcacagtacgtcaaggtgctcgtcgagaatgaccaagccgtaccatggtattacactttcgcaaccaaaatctttagctggacgctattggctgggtatgtcgtactcccttcgaccttcacgtctttgaaacagtcagacgccttcctagataccgtcgagaaacatgcgtctacacttcaaccttttcaaaaccctcctctactcgtcatcgcactgctactttttgtcgtatcgacggtggccttagcctacatctggtggatttggagggcgagctacatttgggtgctcaatcacatcatgctgcctttgctgagcaattcggcgttgggattcgcaacgacattgctcaacatatacactggccagaacggcgcgtggtctgccattgcgatcgctactacgatcgccaccagcctgagcctcttgacttccgttactggatatgtcgtgtatgacttgtggctgcttcgacccattcgacatgagcaggccgagaggtcacaacaagtacaggctgaagagcggagggatcgtaggttgagttctgttgttaactga

SEQ ID NO: 19641 - protein, 209 aa, Muscodor strobelii
  misc_feature: SGI Peptide ID NO. 566611
  misc_feature (24)..(187): NCBI GI: 119487669 Blast Desc: NFIA_031020 [Neosartorya fischeri NRRL 181] gi|119410723|gb|EAW20669.1| conserved [Neosartorya fischeri NRRL 181]
  misc_feature (24)..(164): NCBI GI: 156050913 Blast Desc: SS1G_08044 [Sclerotinia sclerotiorum 1980] gi|154692444|gb|EDN92182.1| SS1G_08044 [Sclerotinia sclerotiorum 1980]
  misc_feature (24)..(206): NCBI GI: 242771762 Blast Desc: conserved [Talaromyces stipitatus ATCC 10500] gi|218721528|gb|EED20946.1| conserved [Talaromyces stipitatus ATCC 10500]
  misc_feature (4)..(190): NCBI GI: 242759970 Blast Desc: conserved [Talaromyces stipitatus ATCC 10500] gi|218723090|gb|EED22507.1| conserved [Talaromyces stipitatus ATCC 10500]
  misc_feature (24)..(207): NCBI GI: 170116718 Blast Desc: [Laccaria bicolor S238N-H82] gi|164635551|gb|EDQ99857.1| [Laccaria bicolor S238N-H82]
  misc_feature (25)..(184): NCBI GI: 261198453 Blast Desc: conserved [Ajellomyces dermatitidis SLH14081] gi|239594780|gb|EEQ77361.1| conserved [Ajellomyces dermatitidis SLH14081]
  misc_feature (25)..(209): NCBI GI: 255951838 Blast Desc: Pc24g00250 [Penicillium chrysogenum Wisconsin 54-1255] gi|211904307|emb|CAP86933.1| Pc24g00250 [Penicillium chrysogenum Wisconsin 54-1255]
  misc_feature (25)..(189): NCBI GI: 255951536 Blast Desc: Pc22g26690 [Penicillium chrysogenum Wisconsin 54-1255] gi|255952604|ref|XP_002567055.1| Pc17g01060 [Penicillium chrysogenum Wisconsin 54-1255] gi|211586558|emb|CAP79393.1|
  misc_feature (25)..(189): NCBI GI: 255930609 Blast Desc: Pc08g00040 [Penicillium chrysogenum Wisconsin 54-1255] gi|255951794|ref|XP_002566663.1| Pc24g00010 [Penicillium chrysogenum Wisconsin 54-1255] gi|211581478|emb|CAP79242.1|
  misc_feature (25)..(201): NCBI GI: 189206958 Blast Desc: conserved [Pyrenophora tritici-repentis Pt-1C-BFP] gi|187975906|gb|EDU42532.1| conserved [Pyrenophora tritici-repentis Pt-1C-BFP]
  misc_feature: Useful for introducing or modulating the production of volatile compounds
MVSISLKSSLVRGGTRERQRRLAQYVKVLVENDQAVPWYYTFATKIFSWTLLAGYVVLPSTFTSLKQSDAFLDTVEKHASTLQPFQNPPLLVIALLLFVVSTVALAYIWWIWRASYIWVLNHIMLPLLSNSALGFATTLLNIYTGQNGAWSAIAIATTIATSLSLLTSVTGYVVYDLWLLRPIRHEQAERSQQVQAEERRDRRLSSVVN

SEQ ID NO: 19642 - DNA, 1357 bp, Muscodor strobelii
  misc_feature: SGI EST ID NO. CUFF.45940.0
  misc_feature: Variant of the nucleotide sequence at SEQ ID NO 19640
cagctgagctcctaacgctgtttcctatttcgtaatcataccaatccactataatggtgtcaatctctctcaaatcctcgcttgtcagaggaggcacacgagagcgccagcgccgtttggcacagtacgtcaaggtgctcgtcgagaatgaccaagccgtaccatggtattacactttcgcaaccaaaatctttagctggacgctattggctgggtatgtcgtactcccttcgaccttcacgtctttgaaacagtcagacgccttcctagataccgtcgagaaacatgcgtctacacttcaaccttttcaaaaccctcctctactcgtcatcgcactgctactttttgtcgtatcgacggtggccttagcctacatctggtggatttggagggcgagctacatttgggtgctcaatcacatcatgctgcctttgctgagcaattcggcgttgggattcgcaacgacattgctcaacatatacactggccagaacggcgcgtggtctgccattgcgatcgctactacgatcgccaccagcctgagcctcttgacttccgttactggatatgtcgtgtatgacttgtggctgcttcgacccattcgacatgagcaggccgagaggtcacaacaagtacaggctgaagagcggagggatcgtaggttgagttctgttgttaactgataaaagcgggtctcgagcttgagattcccagcggagtttggcgaccgatgagtgattaatcattttaagcccgacgaccatgtgtaagtagagataaacaataaggccgaagctagacacccgcgtcaacaataaaaggcaatctgctcttcagacggcaagttgacttctatgacgaaagtactagtccctgcttcagtcccgcaacccgtcttgacacatggaaggacatgttgtcgatactgaggagaaaacgcaatgaaaactatgctgagttggccaagtcgactgcaacgcagccggtgtagtcgcagcttcctgcaatgctatacgttattgcaccattggctctcatgcttcctggacctttgttcgttgttatatgcgggattactatgctctacgctgccacgaacgttttccttggcaggcgatcttgaatgggcgcgcgcaagcttgttattgttcatttggcaattttgattggggtgtttaggggatttcctccatatttgccacttcttccgtcacccgtgtaattatcccgagtacagatctacagtaaaacctctttatagcgaatcacctctatagcgagttcccgatcataacgaaccgaatacgtgtctgaattgttttcaccatacataattctcgaatcctctttaattcgc

SEQ ID NO: 19643 - DNA, 234 bp, Muscodor strobelii
  misc_feature: SGI cDNA ID NO. 566612
  misc_feature: Encodes the peptide sequence at SEQ ID NO 19644
atgaagccagttgtcaattgggacaagcttgctgcccgagccggcttcaaagacggcgccatggccaaggcccactacgaaccactcctcctccctcgcgaccgcgccggcgagacgcccgagacgcgacagagccctcgcggcaatgatgccacctcgatgcgagtcaagaccgagaccgacggccgttgcatgacccgtcacttctccgacttcgaggatggagagatctga

SEQ ID NO: 19644 - protein, 77 aa, Muscodor strobelii
  misc_feature: SGI Peptide ID NO. 566612
MKPVVNWDKLAARAGFKDGAMAKAHYEPLLLPRDRAGETPETRQSPRGNDATSMRVKTETDGRCMTRHFSDFEDGEI

SEQ ID NO: 19645 - DNA, 741 bp, Muscodor strobelii
  misc_feature: SGI EST ID NO. CUFF.46031.1
  misc_feature: Variant of the nucleotide sequence at SEQ ID NO 19643
cttcttttccccagctttgacagcaacaacgaacttctgatccacgaagccgtcgtctagatccatcgcgtagcccactcattctcatccgaataactcttcgcattccaatcatccgtcccttccttcgtcgcagcacaaccacgatggcttccagcccctcgacctctggtcagatcacggccagcgacatggcggctgttgccaaagtctaggaatgctttgagatgaagccagttgtcaattgggacaagcttgctgcccgagccggcttcaaagacggcgccatggccaaggcccactacgaaccactcctcctccctcgcgaccgcgccggcgagacgcccgagacgcgacagagccctcgcggcaatgatgccacctcgatgcgagtcaagaccgagaccgacggccgttgcatgacccgtcacttctccgacttcgaggatggagagatctgagccgcgagttatacatgcaaggactttgagcagtaaagccgcgcgcgggtgctgaggattaagttatggagactgggcatatcaggacgtctcaacgtagtaccttcagacagaggacaaaggaccgaggtcgcatgaataaagctatctttcagcactaatcggagcataatttctccatcagctctaaagtgaaattgccactctcgtgcacaaaatcccaaaatgccttggcgggcggtcagaagtgctgcagatagccccgcctattggaggttcg

SEQ ID NO: 19646 - DNA, 864 bp, Muscodor strobelii
  misc_feature: SGI cDNA ID NO. 566613
  misc_feature: Elevated expression when VOC is produced
  misc_feature: Encodes the peptide sequence at SEQ ID NO 19647
atgccttggcgggcggtcagaagtgctgcagatagccccgcctattggaggttcggaaagaagtttagcacaaacaagccacactcttgtcgtgagaagctgccttgtgtttggaatggattcaagaccagccatctaatcaatctccgcttcctcgaagacgaagtcgccgagctagaccaaaggatttaccaggttggtcttacgctggaccgtgacccatcatccccagatcgattaggactacgatacagtaagaaagaggagaacgcatctctgatcaataagtcagtcacacaagagacgatcatgcggctacgagccgtactcaaagaatatgatgatgcgcttctcgccttcaaccaaatcatgtccatggagacggtctcactcctagacgatgaaaagcagtccagcatgcgtagcgatcttagtctatacgagaaatataacacgcgactagtgaggacggatctcgggatgcggacccgtacagatcctttccaacgccgactgcacaaatacttgcgtacctttcggtattggcgactgtcgaagaagcaagacgacgtagacacatcccggtcggcccaggaacgtacgcggtggtcttaccagaacacgatcgcgatagccgacattatcgggcgcgccacggccgcggccatcatcggtgtctttatcgtgattccactagtagtattaccataccgatctaaaaatacccagactgccatatcttccattctggtcctcgcgtttgtccctctcgtgacggtcctgttcaaggtctcgaacttagagatgatggtagtgacggcggcctatgcggcagtgctcgcgacgtttgtgtcgacgaactga

SEQ ID NO: 19647 - protein, 287 aa, Muscodor strobelii
  misc_feature: SGI Peptide ID NO. 566613
  misc_feature (210)..(287): NCBI GI: 119499267 Blast Desc: NFIA_040700 [Neosartorya fischeri NRRL 181] gi|119414555|gb|EAW24494.1| conserved [Neosartorya fischeri NRRL 181]
  misc_feature (213)..(284): NCBI GI: 169605669 Blast Desc: SNOG_05859 [Phaeosphaeria nodorum SN15] gi|111065803|gb|EAT86923.1| SNOG_05859 [Phaeosphaeria nodorum SN15]
  misc_feature (164)..(287): NCBI GI: 256731928 Blast Desc: NECHADRAFT_41924 [Nectria haematococca mpVI 77-13-4]
  misc_feature (133)..(287): NCBI GI: 116199569 Blast Desc: [Chaetomium globosum CBS 148.51] gi|88179219|gb|EAQ86687.1| [Chaetomium globosum CBS 148.51]
  misc_feature: Useful for introducing or modulating the production of volatile compounds
MPWRAVRSAADSPAYWRFGKKFSTNKPHSCREKLPCVWNGFKTSHLINLRFLEDEVAELDQRIYQVGLTLDRDPSSPDRLGLRYSKKEENASLINKSVTQETIMRLRAVLKEYDDALLAFNQIMSMETVSLLDDEKQSSMRSDLSLYEKYNTRLVRTDLGMRTRTDPFQRRLHKYLRTFRYWRLSKKQDDVDTSRSAQERTRWSYQNTIAIADIIGRATAAAIIGVFIVIPLVVLPYRSKNTQTAISSILVLAFVPLVTVLFKVSNLEMMVVTAAYAAVLATFVSTN

SEQ ID NO: 19648 - DNA, 1336 bp, Muscodor strobelii
  misc_feature: SGI EST ID NO. CUFF.45961.1
  misc_feature: Variant of the nucleotide sequence at SEQ ID NO 19646
tgctgttataggaaaagagcaatccacctactctatgagccatagactttggtgacaaggacaactcggtttgcgctttataatcgccgacgaaataacggattgtgaagtgctgggattcgcagcgacctatcgttagctaacctgaatatacctctccggcatatacattagcaactagcaatccaagctcggtagactatataaatacccatatcctttagactatctatggttcataggcaggcttgtgcataactcctcttgttcgctcttgatcttgttttattatccgcgatatgacagcttcggtatatcatcccgatgctatcggacggaagtttcggacgcactggggaaatgccacggaaagcaacaatcttacgctccatgggtttcgtagattcaagaccagccatctaatcaatctccgcttcctcgaagacgaagtcgccgagctagaccaaaggatttaccaggttggtcttacgctggaccgtgacccatcatccccagatcgattaggactacgatacagtaagaaagaggagaacgcatctctgatcaataagtcagtcacacaagagacgatcatgcggctacgagccgtactcaaagaatatgatgatgcgcttctcgccttcaaccaaatcatgtccatggagacggtctcactcctagacgatgaaaagcagtccagcatgcgtagcgatcttagtctatacgagaaatataacacgcgactagtgaggacggatctcgggatgcggacccgtacagatcctttccaacgccgactgcacaaatacttgcgtacctttcggtattggcgactgtcgaagaagcaagacgacgtagacacatcccggtcggcccaggaacgtacgcggtggtcttaccagaacacgatcgcgatagccgacattatcgggcgcgccacggccgcggccatcatcggtgtctttatcgtgattccactagtagtattaccataccgatctaaaaatacccagactgccatatcttccattctggtcctcgcgtttgtccctctcgtgacggtcctgttcaaggtctcgaacttagagatgatggtagtgacggcggcctatgcggcagtgctcgcgacgtttgtgtcgacgaactgaactaggacagcctagtgttctgccccgcgcggaaactagcaaggccgtgcggtatgggctgacggaggtggtttagcggcgtgcatatcgcgtccgatcctgatgcagactaaatagtgatcctagcagattataccatatatgtacgtcgtgcactttatgcatattcaccactcgaactacccaag

SEQ ID NO: 19649 - DNA, 1125 bp, Muscodor strobelii
  misc_feature: SGI cDNA ID NO. 566614
  misc_feature: Elevated expression when VOC is produced
  misc_feature: Encodes the peptide sequence at SEQ ID NO 19650
atgcaaaacgtggacacgatatcgaacattcggcgatatggagcacgttggcgtctagacgcgttgctcgttacgacttcaatcaagtgccaggctactaaccaaagagacaagatttatggcctactcggtgtggctgtggagaatcaagatcctttgcgcatcccagacgcgctgcggccaaactacgagctaaaggtggccgaaatatatacaaaggtcgctctctttctcatccaggaatacaaatcacttgtcatcctgactcgtgcgagtggagtgtctaactatatctctcgagctcaacgcaaggacttgtccgagccgttaccttcgtgggttcccaactggtgcgactattctgttacggagagggaggttactaaaatgttgacctggctctcttatccaagcactgcagacgcagcaattctgatgttcaaggagcattataacgctgcttgtgggctccccataaagctttcggcatgcccaaacccgtccgtcctcagacttagtggtatcaaggccgacgtcgtcattagcgcgactcagtttgaggacgaacaacagctttttggtggacgcactcgcggctctgtcttgctacagctctggaaagtgacacttccatttctgcgggagcggaggcctatcgccgactgggcaccctcctgggtcaaggccacaacggcggaacaacatcctctctgcgggaagaccacggaacagatgttgaaagacggcctggcttacctacatagtatcttgtctagcgaggagtaccagcggcaatacggcattggcaacgacgagatagggttactacgccagctgtccatggatggtgatcctgaagtctacgccgcgctggccagtaatttctgtcttggcaggaagttcgttgtgactgttgagggacgtatggggattgctccagttgacacgcagccgggagacccagtattcgtgattttcgggggaggagtgccatacattctccgaatgcaggagagcgggtttctttttgttggggagtcttacatccatggactcatgggtggcgaggcagtgcaagcgctgcaacgtggtgagctggtagaggaggtgcttgagttgcgataa

SEQ ID NO: 19650 - protein, 374 aa, Muscodor strobelii
  misc_feature: SGI Peptide ID NO. 566614
  misc_feature (3)..(330): NCBI GI: 46115936 Blast Desc: FG03810.1 [Gibberella zeae PH-1]
  misc_feature (3)..(374): NCBI GI: 46111897 Blast Desc: FG02830.1 [Gibberella zeae PH-1]
  misc_feature (31)..(373): NCBI GI: 169598444 Blast Desc: SNOG_02026 [Phaeosphaeria nodorum SN15] gi|160704398|gb|EAT90238.2| SNOG_02026 [Phaeosphaeria nodorum SN15]
  misc_feature (31)..(364): NCBI GI: 171677698 Blast Desc: protein product [Podospora anserina] gi|170936917|emb|CAP61576.1| protein product [Podospora anserina]
  misc_feature (14)..(362): NCBI GI: 256721874 Blast Desc: NECHADRAFT_88090 [Nectria haematococca mpVI 77-13-4]
  misc_feature (23)..(373): NCBI GI: 145234110 Blast Desc: An02g12950 [Aspergillus niger] gi|134057368|emb|CAK37923.1| protein product [Aspergillus niger]
  misc_feature (30)..(359): NCBI GI: 156043026 Blast Desc: SS1G_11313 [Sclerotinia sclerotiorum 1980] gi|154695697|gb|EDN95435.1| SS1G_11313 [Sclerotinia sclerotiorum 1980]
  misc_feature (22)..(374): NCBI GI: 226283026 Blast Desc: HET domain-containing protein [Paracoccidioides brasiliensis Pb01]
  misc_feature (31)..(363): NCBI GI: 239611429 Blast Desc: HET domain-containing protein [Ajellomyces dermatitidis ER-3]
  misc_feature (31)..(363): NCBI GI: 261205232 Blast Desc: HET domain-containing protein [Ajellomyces dermatitidis SLH14081] gi|239592412|gb|EEQ74993.1| HET domain-containing protein [Ajellomyces dermatitidis SLH14081]
  misc_feature: Useful for introducing or modulating the production of volatile compounds
MQNVDTISNIRRYGARWRLDALLVTTSIKCQATNQRDKIYGLLGVAVENQDPLRIPDALRPNYELKVAEIYTKVALFLIQEYKSLVILTRASGVSNYISRAQRKDLSEPLPSWVPNWCDYSVTEREVTKMLTWLSYPSTADAAILMFKEHYNAACGLPIKLSACPNPSVLRLSGIKADVVISATQFEDEQQLFGGRTRGSVLLQLWKVTLPFLRERRPIADWAPSWVKATTAEQHPLCGKTTEQMLKDGLAYLHSILSSEEYQRQYGIGNDEIGLLRQLSMDGDPEVYAALASNFCLGRKFVVTVEGRMGIAPVDTQPGDPVFVIFGGGVPYILRMQESGFLFVGESYIHGLMGGEAVQALQRGELVEEVLELR

SEQ ID NO: 19651 - DNA, 2350 bp, Muscodor strobelii
  misc_feature: SGI EST ID NO. CUFF.45937.0
  misc_feature: Variant of the nucleotide sequence at SEQ ID NO 19649
gcgaatcaattagaatgaggccttctctacctaacgcttatagtcctctggaagcaagctccatccggctccttggcctcagcgacacgaacagactttccggaacgctcaagacaaccaatctgtaccacgcaccaccatattttgctctcagctacgcgtgggacgtgcagacagagattgtatctgtagaggtaaacgggctgatactttctataagctcaagcctggccgatgccatccggcgactgcagaggttggaaattgatgggtgcgcgccagacagcgttagatgggtgtggattgacaagatatgcatcaatcaagacgacctcttagagcggtctaggcaggtccggatgatgaactcaatatactctcgagcgattaggacgctggtgtggctcgggcctgactccgattcatgctctgcagcgtggcgattgattgatcagatatatgttgtcttccagagagaaaatccggacgcccaattcgtggccgacatccctttccgaatgtattcagatcgaaaccacctatcttcgatgcttccatgttgggacgacccgctatggcaacacctgaggagactgttcgaactgccgtggttcacgaggacatgggtcattcaagaagtggctctttcaccaagagacccgattgttcttcacggagagcacaagtatccatggcatcgtcttggatgggtgtcctcctggctgcgacgtaacggatacttgcgattggtctctattcccaacaggatgcaaaacgtggacacgatatcgaacattcggcgatatggagcacgttggcgtctagacgcgttgctcgttacgacttcaatcaagtgccaggctactaaccaaagagacaagatttatggcctactcggtgtggctgtggagaatcaagatcctttgcgcatcccagacgcgctgcggccaaactacgagctaaaggtggccgaaatatatacaaaggtcgctctctttctcatccaggaatacaaatcacttgtcatcctgactcgtgcgagtggagtgtctaactatatctctcgagctcaacgcaaggacttgtccgagccgttaccttcgtgggttcccaactggtgcgactattctgttacggagagggaggttactaaaatgttgacctggctctcttatccaagcactgcagacgcagcaattctgatgttcaaggagcattataacgctgcttgtgggctccccataaagctttcggcatgcccaaacccgtccgtcctcagacttagtggtatcaaggccgacgtcgtcattagcgcgactcagtttgaggacgaacaacagctttttggtggacgcactcgcggctctgtcttgctacagctctggaaagtgacacttccatttctgcgggagcggaggcctatcgccgactgggcaccctcctgggtcaaggccacaacggcggaacaacatcctctctgcgggaagaccacggaacagatgttgaaagacggcctggcttacctacatagtatcttgtctagcgaggagtaccagcggcaatacggcattggcaacgacgagatagggttactacgccagctgtccatggatggtgatcctgaagtctacgccgcgctggccagtaatttctgtcttggcaggaagttcgttgtgactgttgagggacgtatggggattgctccagttgacacgcagccgggagacccagtattcgtgattttcgggggaggagtgccatacattctccgaatgcaggagagcgggtttctttttgttggggagtcttacatccatggactcatgggtggcgaggcagtgcaagcgctgcaacgtggtgagctggtagaggaggtgcttgagttgcgataagttcatgccaacgagcagatgcagaaccaagcatcgtgcggtccagaacgcggtccagctcaccggccttgtcttcgcctacttgctctctgtcttctgcagccgcttctatgtccggcatactaggacgtatatcatattagcatgcataagaatgccacacccacagaagggggctctctactatgtcacgtaggtgtgctagttctaatgtactgagtaggtcgataagatgggccccagtatataaatcttagatgctggatcttattagtgtcgcagccgtcttgtagggcaacggagcaaatgcattaatcaatggcctgttttctccggatatttcccgtctatagaatatcgactaatttggcgagctctgtacaatatgaaaagaaatgattaaagttgctccatgctactcaaattttctgaagactccgcctgaactgcagtcggag

SEQ ID NO: 19652 - DNA, 2532 bp, Muscodor strobelii
  misc_feature: SGI cDNA ID NO. 566615
  misc_feature: Elevated expression when VOC is produced
  misc_feature: Encodes the peptide sequence at SEQ ID NO 19653
atggagccaaggctgctaacacaaaacacggagccacgaagactcggactgaaccaagtatatcccgatcagagcgatgatcccacaaaaacagagatagacatcgttgccatccacggcttggatacccaatcgccgagaacatgggaggcatggaagggtgaccaccctgatactggagtcgtgcactggctgaaggataaggatatgctaccacgtgttatcccaaatgctcgcatattcacatacgattggaatgcgaacttcgatcaggatccagcggccgacattcttctcggtcacgccgacggattgttggatagactacatattcgacggctcaagtacgatggaacttctccgatcattttcatcgcctcttgctttggtggccttctacttgttaaggcacttcatcgggcgcaagaagtccaagagtatcagagcatcctcaaatcaaccgttggtattgcatttctgggaacacccttccaaggaagtcatgcgtccttctacactgcgacgcagctacgggttgctgttgcaacttgcatgggcagtaaagaactagtcaagtacctgagaagcgacgccgatggacgaggagaactcgatgagctcgtccagcgcttccgtgagatggtcgagcgcgacgagtacaaaattcctatggtctgtttttacgagacccggtcgacagacttcacaaaggtcataaagaacctaccacccgagtttgttaagcggcttgacagtgaccgaaccggggtctatccggggccggacgatgatactttcgtgagagtatcttttcgtgtaaaagagttcgcagatggtgcgcggaaggtattacagacgaagggtgttacaagccttggcgaagcagatgaatggatccgcaaccattgctatactccttccaagctcaagatcgaacgactctcgggcgaggagttgccgatggatcagtgctacattaatctcgccattgtagagcaaccaggccatggtgcagcagaaagagtgggtacatattcctccccattttcacttacagctcgactgaagattgaaacgccaaacgagagcattcaagtggagctagcaaaagtgttcaacccacgcaaggcctccgatggcaagcacataaagccaagacgaatcctgatccgaggccaggcaggaatggggaagactaccttgtgcaaaaagatggtccacgacttcatctattgtgacatatggaatgacctgttcgatcgcatactctgggtgcctttacggaccctaaaaaacaaacctgatcaaggctacaatttgaaaggtctacttcttaaggaatttttctctcaacatcatcatcgtgatatcttttccggtgaattagagagaatattatcgcatgacacacatgataaaactctattcatcctcgatggcctagatgagatttctgaaggctttaataaagacagcgacatgcactcacttctcaatcttctcctcgggcagcgtaataccatcattacgtgtcgaccatccgttaggcttccagacgacctacgtcccgatctcgaattggatacgattggattctattgggaccagattgtagcttatgtggggaaagtcttcaccaatccgacaagggctgaagctgtccaagattttctccaaaaatatcctctagttcggacccttgtgcggatcccgattcaactggacgcgctctgctttacttggaacgaaggcctcgatgataacttcgtaccgcagactatgaccgcaatataccaagccatagaacatcgattgtggaagaaggacgtcgtgcgactcgaaaagaaacaagcaggagttagattgactgcacgcgatctccagacgacaagtccgataaaagtcgaaagctacgtcacggatgaaatcttgttcctagagcttcttgcctttactggactggaggaagagctgacagagtttagatccaagcatcaaaatcatatatgcgaccgctttactgcagatcttctactcgacaagactctgccgtacctctctttcctgcgaacgtcagatccagagcaaagcaaccgaagttaccattttatacatcttacattccaagagtattttgcggcacggtattttgtccggcaattgtcatctggccaacatctcgaatggctcccagttctcaaagacaaatccagcaactttcgtaaagccaccattgaaagctacgttcaagaccataaatataatgcacgctacgatattttttggcgcttcgttgccggtctacttgatgtagagcaggcagagaagtttttcgacatgatccagaaggagccgcgcgacattttgggcccggttcatcaacgggtagtcatgcgttgcctgagcgaggtatcagcagaagtgccgttccgaaaaggaagggatcccttgcaagcgaaatggaatttccagacgaagccctgtgtaacgttttacatcgagctcgtgatgacgccaagtcggccattctaa

SEQ ID NO: 19653 - protein, 843 aa, Muscodor strobelii
  misc_feature: SGI Peptide ID NO. 566615
  misc_feature (386)..(548): Pfam Id: PF05729 Pfam Desc: NACHT domain
  misc_feature (15)..(804): NCBI GI: 171691430 Blast Desc: protein product [Podospora anserina] gi|170945663|emb|CAP71776.1| protein product [Podospora anserina]
  misc_feature (3)..(821): NCBI GI: 115391829 Blast Desc: [Aspergillus terreus NIH2624] gi|114194343|gb|EAU36043.1| [Aspergillus terreus NIH2624]
  misc_feature (2)..(826): NCBI GI: 255944489 Blast Desc: Pc20g04700 [Penicillium chrysogenum Wisconsin 54-1255] gi|211587747|emb|CAP85799.1| Pc20g04700 [Penicillium chrysogenum Wisconsin 54-1255]
  misc_feature (280)..(821): NCBI GI: 46130706 Blast Desc: FG08957.1 [Gibberella zeae PH-1]
  misc_feature (21)..(804): NCBI GI: 46127471 Blast Desc: FG08113.1 [Gibberella zeae PH-1]
  misc_feature (295)..(804): NCBI GI: 212539890 Blast Desc: PMAA_053000 [Penicillium marneffei ATCC 18224] gi|210067399|gb|EEA21491.1| PMAA_053000 [Penicillium marneffei ATCC 18224]
  misc_feature (283)..(804): NCBI GI: 212547167 Blast Desc: conserved [Penicillium marneffei ATCC 18224] gi|210064392|gb|EEA18489.1| conserved [Penicillium marneffei ATCC 18224]
  misc_feature (283)..(804): NCBI GI: 212547165 Blast Desc: conserved [Penicillium marneffei ATCC 18224] gi|210064391|gb|EEA18488.1| conserved [Penicillium marneffei ATCC 18224]
  misc_feature (295)..(835): NCBI GI: 242826640 Blast Desc: TSTA_111040 [Talaromyces stipitatus ATCC 10500] gi|218712501|gb|EED11927.1| TSTA_111040 [Talaromyces stipitatus ATCC 10500]
  misc_feature (307)..(804): NCBI GI: 242825926 Blast Desc: conserved [Talaromyces stipitatus ATCC 10500] gi|218712357|gb|EED11783.1| conserved [Talaromyces stipitatus ATCC 10500]
  misc_feature: Useful for introducing or modulating the production of volatile compounds
MEPRLLTQNTEPRRLGLNQVYPDQSDDPTKTEIDIVAIHGLDTQSPRTWEAWKGDHPDTGVVHWLKDKDMLPRVIPNARIFTYDWNANFDQDPAADILLGHADGLLDRLHIRRLKYDGTSPIIFIASCFGGLLLVKALHRAQEVQEYQSILKSTVGIAFLGTPFQGSHASFYTATQLRVAVATCMGSKELVKYLRSDADGRGELDELVQRFREMVERDEYKIPMVCFYETRSTDFTKVIKNLPPEFVKRLDSDRTGVYPGPDDDTFVRVSFRVKEFADGARKVLQTKGVTSLGEADEWIRNHCYTPSKLKIERLSGEELPMDQCYINLAIVEQPGHGAAERVGTYSSPFSLTARLKIETPNESIQVELAKVFNPRKASDGKHIKPRRILIRGQAGMGKTTLCKKMVHDFIYCDIWNDLFDRILWVPLRTLKNKPDQGYNLKGLLLKEFFSQHHHRDIFSGELERILSHDTHDKTLFILDGLDEISEGFNKDSDMHSLLNLLLGQRNTIITCRPSVRLPDDLRPDLELDTIGFYWDQIVAYVGKVFTNPTRAEAVQDFLQKYPLVRTLVRIPIQLDALCFTWNEGLDDNFVPQTMTAIYQAIEHRLWKKDVVRLEKKQAGVRLTARDLQTTSPIKVESYVTDEILFLELLAFTGLEEELTEFRSKHQNHICDRFTADLLLDKTLPYLSFLRTSDPEQSNRSYHFIHLTFQEYFAARYFVRQLSSGQHLEWLPVLKDKSSNFRKATIESYVQDHKYNARYDIFWRFVAGLLDVEQAEKFFDMIQKEPRDILGPVHQRVVMRCLSEVSAEVPFRKGRDPLQAKWNFQTKPCVTFYIELVMTPSRPF

SEQ ID NO: 19654 - DNA, 3073 bp, Muscodor strobelii
  misc_feature: SGI EST ID NO. CUFF.46514.0
  misc_feature: Variant of the nucleotide sequence at SEQ ID NO 19652
aaacagggctttacctcaactgccttatttctctctctcactgtataaaagattattttagtattcaaacctttatacaaagaactcctttttatagtctttcttattacagtgtctagttttggcctattgagccagcaggctgcagcactgggcggctaatctatctgccaacatggagccaaggctgctaacacaaaacacggagccacgaagactcggactgaaccaagtatatcccgatcagagcgatgatcccacaaaaacagagatagacatcgttgccatccacggcttggatacccaatcgccgagaacatgggaggcatggaagggtgaccaccctgatactggagtcgtgcactggctgaaggataaggatatgctaccacgtgttatcccaaatgctcgcatattcacatacgattggaatgcgaacttcgatcaggatccagcggccgacattcttctcggtcacgccgacggattgttggatagactacatattcgacggctcaagtacgatggaacttctccgatcattttcatcgcctcttgctttggtggccttctacttgttaaggcacttcatcgggcgcaagaagtccaagagtatcagagcatcctcaaatcaaccgttggtattgcatttctgggaacacccttccaaggaagtcatgcgtccttctacactgcgacgcagctacgggttgctgttgcaacttgcatgggcagtaaagaactagtcaagtacctgagaagcgacgccgatggacgaggagaactcgatgagctcgtccagcgcttccgtgagatggtcgagcgcgacgagtacaaaattcctatggtctgtttttacgagacccggtcgacagacttcacaaaggtcataaagaacctaccacccgagtttgttaagcggcttgacagtgaccgaaccggggtccttgttccgcgggactcggcttgccttcaaggtccacgccggttcggcttggacgttagacacgcgatgctctgcaagtatccggggccggacgatgatactttcgtgagagtatcttttcgtgtaaaagagttcgcagatggtgcgcggaaggtattacagacgaagggttagtagttgcatcatcacttataaatcaatgtgttacaagccttggcgaagcagatgaatggatccgcaaccattgctatactccttccaagctcaagatcgaacgactctcgggcgaggagttgccgatggatcagtgctacattaatctcgccattgtagagcaaccaggccatggtgcagcagaaagagtgggtacatattcctccccattttcacttacagctcgactgaagattgaaacgccaaacgagagcattcaagtggagctagcaaaagtgttcaacccacgcaaggcctccgatggcaagcacataaagccaagacgaatcctgatccgaggccaggcaggaatggggaagactaccttgtgcaaaaagatggtccacgacttcatctattgtgacatatggaatgacctgttcgatcgcatactctgggtgcctttacggaccctaaaaaacaaacctgatcaaggctacaatttgaaaggtctacttcttaaggaatttttctctcaacatcatcatcgtgatatcttttccggtgaattagagagaatattatcgcatgacacacatgataaaactctattcatcctcgatggcctagatgagatttctgaaggctttaataaagacagcgacatgcactcacttctcaatcttctcctcgggcagcgtaataccatcattacgtgtcgaccatccgttaggcttccagacgacctacgtcccgatctcgaattggatacgattggattctattgggaccagattgtagcttatgtggggaaagtcttcaccaatccgacaagggctgaagctgtccaagattttctccaaaaatatcctctagttcggacccttgtgcggatcccgattcaactggacgcgctctgctttacttggaacgaaggcctcgatgataacttcgtaccgcagactatgaccgcaatataccaagccatagaacatcgattgtggaagaaggacgtcgtgcgactcgaaaagaaacaagcaggagttagattgactgcacgcgatctccagacgacaagtccgataaaagtcgaaagctacgtcacggatgaaatcttgttcctagagcttcttgcctttactggactggaggaagagctgacagagtttagatccaagcatcaaaatcatatatgcgaccgctttactgcagatcttctactcgacaagactctgccgtacctctctttcctgcgaacgtcagatccagagcaaagcaaccgaagttaccattttatacatcttacattccaagagtattttgcggcacggtattttgtccggcaattgtcatctggccaacatctcgaatggctcccagttctcaaagacaaatccagcaactttcgtaaagccaccattgaaagctacgttcaagaccataaatataatgcacgctacgatattttttggcgcttcgttgccggtctacttgatgtagagcaggcagagaagtttttcgacatgatccagaaggagccgcgcgacattttgggcccggttcatcaacgggtagtcatgcgttgcctgagcgaggtatcagcagaagtgccgttccgaaaagggttagaagaaaagctagaagagtggttactgtttgaatgctacttcacacagaagggatcccttgcaagcgaaatggaatttccagacgaagccctgtgtaacgttttacatcgagctcgtgatgacgccaagtcggccattctaagctcattagcaaaacggcaaacagtcccattcagaattattcatcttacaattagttggctacaaaagggcgaatgtgcacgtgcggtggtaaatgtattacagcatttccgcacgcacctatcagtcgagcacctatcagcaataataacgcggctcgacgattctgactcctatgtccggcgggccgttgttgagatcttgg

SEQ ID NO: 19655 - DNA, 1254 bp, Muscodor strobelii
  misc_feature: SGI cDNA ID NO. 566616
  misc_feature: Encodes the peptide sequence at SEQ ID NO 19656
atgtcgacgaccacaaaagacaacgatggcggtagtatacgcttctgcaaactgtgcaacaagccgataatgagtgaaagcgcttacaaacgtcacgtcaactactgtcgccgcacattgtccaagcccaagaaacgcaaacgctcttgtaagagctgtcacatcgctaaatccaagtgctcctttgaatcaccatgcactcgctgtgtttcgaagagcctactctgcgagtatgagaggccgcaagcatcaacaccgggcaatgaatcgtccaacaaacctcaagatacggccatgtcagaaggctccgaaggtagcgcggacagcagcgcaaatgaatgcatggtcgaagggccattattgtcggagcggtatactcctactatacagccaccgcggacagcaacggaacttcgcgaagacgttacccaacaagctagcatgaagatattacttgaagtcatgcaagggctcccggcaatgatgagtagcatagagatatttccctttttctttcacggaccgagcatggagtacgccataccagagcctgttatcaaatgcatgcaaatatcacagctatttctgcaccgcaacacgagcccacatgaccaagcgatgtatctgtcacttctgaacgacgagatagcacgcctcgttcacatacatccgaacgcatccaaagccgagctcatcgtaggacttcaagtacttcagatctacgccactctgaccgcgatagacagcgatgcgtctcggacgaaccaagcccccgagatacaagatgaatactctttctatatgatggcttacaacgatcagctgttcacgcatgacaactatagtgctttcgatatcgatttcatcggtcatgacaacgagacgtgggaggaattcatatacgcagaaacacgacgaagggcggcattattctggtttctacaaagtcgagtcctaaacatcaaccgggaattcatgtgccctccggtgatggggtatcgcggtctggcacttccctcaccaaaggccctctgggctgcaaggacaaggaaggaatgggaagctgcgcacgcacgaatacgcacacaaggggggcggcacggaccatacgggacgagcatgcacacgctcggagacctcatcgacgcgcaattagcaccgccgcactcgtattactccgaacagaaacggcaatggcttgcgaatgcagggcaagaaggagttctcctcttgatcggagcgagcatgatctga

SEQ ID NO: 19656 - protein, 417 aa, Muscodor strobelii
  misc_feature: SGI Peptide ID NO. 566616
  misc_feature (48)..(85): Pfam Id: PF00172 Pfam Desc: Fungal Zn(2)-Cys(6) binuclear cluster domain
  misc_feature (151)..(417): NCBI GI: 212545625 Blast Desc: conserved [Penicillium marneffei ATCC 18224] gi|210064486|gb|EEA18581.1| conserved [Penicillium marneffei ATCC 18224]
  misc_feature (151)..(417): NCBI GI: 242783875 Blast Desc: conserved [Talaromyces stipitatus ATCC 10500] gi|218720421|gb|EED19840.1| conserved [Talaromyces stipitatus ATCC 10500]
  misc_feature (144)..(416): NCBI GI: 212527562 Blast Desc: C6 finger domain protein, [Penicillium marneffei ATCC 18224] gi|210073336|gb|EEA27423.1| C6 finger domain protein, [Penicillium marneffei ATCC 18224]
  misc_feature (13)..(118): NCBI GI: 242784100 Blast Desc: TSTA_031440 [Talaromyces stipitatus ATCC 10500] gi|218720466|gb|EED19885.1| TSTA_031440 [Talaromyces stipitatus ATCC 10500]
  misc_feature (46)..(359): NCBI GI: 119487381 Blast Desc: C6 finger domain protein, [Neosartorya fischeri NRRL 181] gi|119410640|gb|EAW20586.1| C6 finger domain protein, [Neosartorya fischeri NRRL 181]
  misc_feature (24)..(359): NCBI GI: 70981977 Blast Desc: C6 finger domain protein [Aspergillus fumigatus Af293] gi|66844140|gb|EAL84479.1| C6 finger domain protein, [Aspergillus fumigatus Af293]
  misc_feature (27)..(359): NCBI GI: 159122254 Blast Desc: C6 finger domain protein, [Aspergillus fumigatus A1163]
  misc_feature (16)..(416): NCBI GI: 212541819 Blast Desc: conserved [Penicillium marneffei ATCC 18224] gi|210065971|gb|EEA20064.1| conserved [Penicillium marneffei ATCC 18224]
  misc_feature (145)..(354): NCBI GI: 46115252 Blast Desc: FG03468.1 [Gibberella zeae PH-1]
  misc_feature (37)..(363): NCBI GI: 58267318 Blast Desc: CNE01850 [Cryptococcus neoformans var. neoformans JEC21] gi|134111863|ref|XP_775467.1| CNBE1820 [Cryptococcus neoformans var. neoformans B-3501A] gi|50258126|gb|EAL20820.1|
MSTTTKDNDGGSIRFCKLCNKPIMSESAYKRHVNYCRRTLSKPKKRKRSCKSCHIAKSKCSFESPCTRCVSKSLLCEYERPQASTPGNESSNKPQDTAMSEGSEGSADSSANECMVEGPLLSERYTPTIQPPRTATELREDVTQQASMKILLEVMQGLPAMMSSIEIFPFFFHGPSMEYAIPEPVIKCMQISQLFLHRNTSPHDQAMYLSLLNDEIARLVHIHPNASKAELIVGLQVLQIYATLTAIDSDASRTNQAPEIQDEYSFYMMAYNDQLFTHDNYSAFDIDFIGHDNETWEEFIYAETRRRAALFWFLQSRVLNINREFMCPPVMGYRGLALPSPKALWAARTRKEWEAAHARIRTQGGRHGPYGTSMHTLGDLIDAQLAPPHSYYSEQKRQWLANAGQEGVLLLIGASMI

SEQ ID NO: 19657 - DNA, 1457 bp, Muscodor strobelii
  misc_feature: SGI EST ID NO. CUFF.45953.0
  misc_feature: Variant of the nucleotide sequence at SEQ ID NO 19655
caacaccgggcaatgaatcgtccaacaaacctcaagatacggccatgtcagaaggctccgaaggtagcgcggacagcagcgcaaatgaatgcatggtcgaagggccattattgtcggagcggtatactcctactatacagccaccgcggacagcaacggaacttcgcgaagacgttacccaacaagctagcatgaagatattacttgaagtcatgcaagggctcccggcaatgatgagtagcatagagatatttccctttttctttcacggaccgagcatggagtacgccataccagagcctgttatcaaatgcatgcaaatatcacagctatttctgcaccgcaacacgagcccacatgaccaagcgatgtatctgtcacttctgaacgacgagatagcacgcctcgttcacatacatccgaacgcatccaaagccgagctcatcgtaggacttcaagtacttcagatctacgccactctgaccgcgatagacagcgatgcgtctcggacgaaccaagcccccgagatacaagatgaatactctttctatatgatggcttacaacgatcagctgttcacgcatgacaactatagtgctttcgatatcgatttcatcggtcatgacaacgagacgtgggaggaattcatatacgcagaaacacgacgaagggcggcattattctggtttctacaaagtcgagtcctaaacatcaaccgggaattcatgtgccctccggtgatggggtatcgcggtctggcacttccctcaccaaaggccctctgggctgcaaggacaaggaaggaatgggaagctgcgcacgcacgaatacgcacacaaggggggcggcacggaccatacgggacgagcatgcacacgctcggagacctcatcgacgcgcaattagcaccgccgcactcgtattactccgaacagaaacggcaatggcttgcgaatgcagggcaagaaggagttctcctcttgatcggagcgagcatgatctgacttggcttacatttatcttctaagtcatgtactgccagactgtgctatacccacttagtaggctgagtatacgttgggaacagctcgtttaccatcactacctcattcacaagcaggctatgtatgagtatattcacgcacttcacctgttctgtctgttccagtttttaattactagacacgacgcactggcgttttattgacgccgtatagatctagaaaatttaaagcctgccgaataatttccattgttctaaattgattcaaaatttcgggatgtcatgtttggaaaattagatgcgatggctgaatcaggcatctatcatcacttagatcagatagataaagataccacggactataaaataccatattctggtatgaccgaaatcaccgccagacggacaagaccttgaagcaactctttcttatggttcccttgcaatagttcgt

SEQ ID NO: 19658 - DNA, 843 bp, Muscodor strobelii
  misc_feature: SGI cDNA ID NO. 566617
  misc_feature: Encodes the peptide sequence at SEQ ID NO 19659
atgccagtttctggttcttcgtcttcgcacaaatcgtccaagaacgcacaggtggttcagaagcgcaggaaaagactatcagctgtcgcagctgcaggcgattgcttcacttgcatcaagcagaataaaaaatgcggtagacaaagaccctactgctcccagtgtttggagattggaagcgagtgttctggttacaagacccagctcacctggggcgttggagttgcaagtcgaggcaaacttcgaggtctttccttgcctgttgcagaagcaccatctgttgcgcctatagcgacgaaagcgacagccccggcacgagcagcctcaaccgcgacttcaaaccagtcgagcgacacggaagaggctccacggataaatcaccgccgggacgatgtgcatctcggagttcaccatgcctccgtcccttccgcccgctacggctcctacccagaacatcctggatattcgcatagagagccgacgacaattataccacacacgacaaaggtcagcctaccagcatacgtcgggggcataagtgctcatgaacccgcaaaatcccacacgcccaacatttctatgggtcacttgagcattatgaacgaaccaccatttgcttcagtcaacctactcaacgatgtcgactacacgatgtcacgcgaggctcactctttcccgagagaggaaacgcacttcatgcgcagccaaaccctggtaaatgaacagtatctgattcaaaactcacccataccactgagtcccgagccctccatcacgatcgatcagtggacgccatctcccaacataggcaaattctgccgcgaagaatttcctagcgactaa

SEQ ID NO: 19659 - protein, 280 aa, Muscodor strobelii
  misc_feature: SGI Peptide ID NO. 566617
  misc_feature (35)..(72): Pfam Id: PF00172 Pfam Desc: Fungal Zn(2)-Cys(6) binuclear cluster domain
  misc_feature (19)..(261): NCBI GI: 256731448 Blast Desc: NECHADRAFT_858 [Nectria haematococca mpVI 77-13-4]
  misc_feature (30)..(261): NCBI GI: 116206278 Blast Desc: CHGG_02432 [Chaetomium globosum CBS 148.51] gi|88183029|gb|EAQ90497.1| CHGG_02432 [Chaetomium globosum CBS 148.51]
  misc_feature (30)..(262): NCBI GI: 171693465 Blast Desc: protein product [Podospora anserina] gi|170946681|emb|CAP73484.1| protein product [Podospora anserina]
  misc_feature (30)..(235): NCBI GI: 85089668 Blast Desc: NCU09529 [Neurospora crassa OR74A] gi|28919369|gb|EAA28818.1| conserved [Neurospora crassa OR74A] gi|38566875|emb|CAE76181.1| [Neurospora crassa]
  misc_feature (30)..(262): NCBI GI: 145609253 Blast Desc: MGG_07458 [Magnaporthe grisea 70-15] gi|145016644|gb|EDK01074.1| MGG_07458 [Magnaporthe grisea 70-15]
  misc_feature (1)..(252): NCBI GI: 154320207 Blast Desc: BC1G_02084 [Botryotinia fuckeliana B05.10] gi|150854823|gb|EDN30015.1| BC1G_02084 [Botryotinia fuckeliana B05.10]
  misc_feature (2)..(108): NCBI GI: 169779359 Blast Desc: [Aspergillus oryzae RIB40] gi|83772883|dbj|BAE63011.1| protein product [Aspergillus oryzae]
  misc_feature (2)..(104): NCBI GI: 238500003 Blast Desc: conserved [Aspergillus flavus NRRL3357] gi|220692989|gb|EED49335.1| conserved [Aspergillus flavus NRRL3357]
  misc_feature (1)..(171): NCBI GI: 156065553 Blast Desc: SS1G_00787 [Sclerotinia sclerotiorum 1980] gi|154691646|gb|EDN91384.1| SS1G_00787 [Sclerotinia sclerotiorum 1980]
  misc_feature (20)..(123): NCBI GI: 121713952 Blast Desc: conserved [Aspergillus clavatus NRRL 1] gi|119402740|gb|EAW13161.1| conserved [Aspergillus clavatus NRRL 1]
MPVSGSSSSHKSSKNAQVVQKRRKRLSAVAAAGDCFTCIKQNKKCGRQRPYCSQCLEIGSECSGYKTQLTWGVGVASRGKLRGLSLPVAEAPSVAPIATKATAPARAASTATSNQSSDTEEAPRINHRRDDVHLGVHHASVPSARYGSYPEHPGYSHREPTTIIPHTTKVSLPAYVGGISAHEPAKSHTPNISMGHLSIMNEPPFASVNLLNDVDYTMSREAHSFPREETHFMRSQTLVNEQYLIQNSPIPLSPEPSITIDQWTPSPNIGKFCREEFPSD

SEQ ID NO: 19660 - DNA, 1599 bp, Muscodor strobelii
  misc_feature: SGI EST ID NO. CUFF.45970.0
  misc_feature: Variant of the nucleotide sequence at SEQ ID NO 19658
ctgcaggcgattgcttcacttgcatcaagcagaataaaaaatgcggtagacaaagaccctactgctcccagtgtttggagattggaagcgagtgttctggttacaagacccagctcacctggggcgttggagttgcaagtcgaggcaaacttcgaggtctttccttgcctgttgcagaagcaccatctgttgcgcctatagcgacgaaagcgacagccccggcacgagcagcctcaaccgcgacttcaaaccagtcgagcgacacggaagaggctccacggataaatcaccgccgggacgatgtgcatctcggagttcaccatgcctccgtcccttccgcccgctacggctcctacccagaacatcctggatattcgcatagagagccgacgacaattataccacacacgacaaaggtcagcctaccagcatacgtcgggggcataagtgctcatgaacccgcaaaatcccacacgcccaacatttctatgggtcacttgagcattatgaacgaaccaccatttgcttcagtcaacctactcaacgatgtcgactacacgatgtcacgcgaggctcactctttcccgagagaggaaacgcacttcatgcgcagccaaaccctggtaaatgaacagtatctgattcaaaactcacccataccactgagtcccgagccctccatcacgatcgatcagtggacgccatctcccaacataggcaaattctgccgcgaagaatttcctagcgactaaatagcagaatataatccgaacaattgtcatcttcccgtgtcttgaagtatggaatggccccagtacctagctatatatgttacctacagtggcagggcagctaccgttgctgggtaccgtttctaggtcagatacaagaccgaatagcggaagaacgatagattatagatatgtagttttatgtttagaaacgaagtacgatggtacggaatactgagcataaatacgacacgaaatgatggcgatttctatattcacgtaatgtttcgagcggcaagagatttacggagcgttgcgctcaaaagttcaacgtcatatgtctataatactggcaaataagattaatgttcaaatcctttaagcatgcgatactgtatgtatgtggtgtgactgattggcatagtacatgcctgacccgtgactatataggctctcaataattacatccgaacctcaccacgctgactgtccaaaatgcaaggtctcacagaggaatcctccgacatacgggcttaaggcttctcattatcggcctcttcaagaattgtctccatccgacacagcgtcttagtcggaatttgaaaccaatctgagatgttgtccgtctcgagcggcccagtgggatcatcacaactaggcatgagtggcgctgctacttgttcgtgtccgagacagcagtcttcccgactcaatgttggcgctccggaacggctgatttctttcgccaaccctgtcttagactttgcaggcaggacaggtaatgagtgactgacatgctcggagcttgctgatacagtatccattattatgattatgattcgacgattcctcagatacaaagtttttg

SEQ ID NO: 19661 - DNA, 1367 bp, Muscodor strobelii
  misc_feature: SGI cDNA ID NO. 566618
  misc_feature: Encodes the peptide sequence at SEQ ID NO 19662
atgatctcgaaatcaacatcacggcttctggtggtgagtcgcaatgaccaagagattcggcaaggtctgggcggagacgggaatactaaaatttgggacttggtggagttacgaatccagccaaaagacgtcgaatccgatgctacctcgctctcggaaagcatcgtcgagaaaaaaccgcccaacaaaagcgaagcgcagcgacacagaatagtcgatcggtgtcagtccatgttcttagggatcagattactggaactcgatctcaaggggggcaaaaatcttaagcaactccaacgacttattgatgacgcccccagcagactcgagcatgtttatgatcgcaactggaaaaagaccgacagtctcgaggttgccagcagatgtcgcgcgttcgccatcctgagatgggcgacattcgccgctcatcccatcacgattttagaactgactgacgttctccttctcgcgaatgacggatgcgatacacttgactatacagagctgccagattcgatcgacgaggtttacgttcagacggagatattagaactctgtggatcgcttattgaggtccgacaagcaggacaatcttcagaactgggttcctcgactattcatctaagtcatttctcagtaagagagtatattctgggtcatgtggtaatcctgccgcggaacatggccacaaacgagcacttccaatcagccaacgaggcagtacagaacaacgttcttgcggaaacatgcattcgttacttgaattccgaagaggcgtggggaaagaaacaacagcacagatcgaacgataccatgatccaagcatttcgagaatatgcggcaacctcgtggtataagcacgtccacgataacgtattgaattcagaatatgttttcgacataatcaatgatttttttgatccgtcaaatgaaaaatgggaagaatggagaagacatagcgaaacaacgttccaagatcagttaatacagtatgaaggagaactgaagaaaggaaaccgtctattttatgcgtcacttctcgagttttcgaagacaattacttaccttataagggacgccggattagacataaatcatgtcgacacgtcaaaccgaacagcgttgctaggcgcaagcttcaaaggatcggcgcacgaggtagagctgctgctacaaaatggtgccggagtgaacattgcaagtaatgaagcaagaactcctgtgtatgttgctgcagcgcaaggccacatcgaggtggtcaagcacctgctcgagacaggggccgatctaactatacctaacaaagacaggtggacgccgctcatttcggcttcaagtaatggccacatcgaggtggtcaagcaact

SEQ ID NO: 19662 - protein, 455 aa, Muscodor strobelii
  misc_feature: SGI Peptide ID NO. 566618
  misc_feature (403)..(435): Pfam Id: PF00023 Pfam Desc: Ankyrin repeat
  misc_feature (370)..(402): Pfam Id: PF00023 Pfam Desc: Ankyrin repeat
  misc_feature (2)..(454): NCBI GI: 255950182 Blast Desc: Pc22g19550 [Penicillium chrysogenum Wisconsin 54-1255] gi|211592875|emb|CAP99243.1| Pc22g19550 [Penicillium chrysogenum Wisconsin 54-1255]
  misc_feature (3)..(454): NCBI GI: 238482849 Blast Desc: ankyrin, [Aspergillus flavus NRRL3357] gi|220700713|gb|EED57051.1| ankyrin, [Aspergillus flavus NRRL3357]
  misc_feature (2)..(453): NCBI GI: 46126459 Blast Desc: FG07607.1 [Gibberella zeae PH-1]
  misc_feature (2)..(454): NCBI GI: 261353217 Blast Desc: ankyrin-1 [Verticillium albo-atrum VaMs.102]
  misc_feature (2)..(441): NCBI GI: 46139775 Blast Desc: FG11402.1 [Gibberella zeae PH-1]
  misc_feature (2)..(453): NCBI GI: 46134013 Blast Desc: FG09146.1 [Gibberella zeae PH-1]
  misc_feature (2)..(449): NCBI GI: 238505400 Blast Desc: ankyrin repeat domain protein, [Aspergillus flavus NRRL3357] gi|220690043|gb|EED46393.1| ankyrin repeat domain protein, [Aspergillus flavus NRRL3357]
  misc_feature (2)..(449): NCBI GI: 169780448 Blast Desc: [Aspergillus oryzae RIB40] gi|83773428|dbj|BAE63555.1| protein product [Aspergillus oryzae]
  misc_feature (2)..(316): NCBI GI: 145603741 Blast Desc: MGG_05856 [Magnaporthe grisea 70-15] gi|145011903|gb|EDJ96559.1| MGG_05856 [Magnaporthe grisea 70-15]
  misc_feature (9)..(454): NCBI GI: 67526171 Blast Desc: AN3543.2 [Aspergillus nidulans FGSC A4] gi|40739678|gb|EAA58868.1| AN3543.2 [Aspergillus nidulans FGSC A4] gi|259481936|tpe|CBF75924.1| TPA: conserved [Aspergillus FGSC
MISKSTSRLLVVSRNDQEIRQGLGGDGNTKIWDLVELRIQPKDVESDATSLSESIVEKKPPNKSEAQRHRIVDRCQSMFLGIRLLELDLKGGKNLKQLQRLIDDAPSRLEHVYDRNWKKTDSLEVASRCRAFAILRWATFAAHPITILELTDVLLLANDGCDTLDYTELPDSIDEVYVQTEILELCGSLIEVRQAGQSSELGSSTIHLSHFSVREYILGHVVILPRNMATNEHFQSANEAVQNNVLAETCIRYLNSEEAWGKKQQHRSNDTMIQAFREYAATSWYKHVHDNVLNSEYVFDIINDFFDPSNEKWEEWRRHSETTFQDQLIQYEGELKKGNRLFYASLLEFSKTITYLIRDAGLDINHVDTSNRTALLGASFKGSAHEVELLLQNGAGVNIASNEARTPVYVAAAQGHIEVVKHLLETGADLTIPNKDRWTPLISASSNGHIEVVKQ

SEQ ID NO: 19663 - DNA, 217 bp, Muscodor strobelii
  misc_feature: SGI EST ID NO. CUFF.45973.0
  misc_feature: Variant of the nucleotide sequence at SEQ ID NO 19661
aactgggttcctcgactattcatctaagtcatttctcagtaagagagtatattctgggtcatgtggtaatcctgccgcggaacatggccacaaacgagcacttccaatcagccaacgaggcagtacagaacaacgttcttgcggaaacatgcattcgttacttgaattccgaagaggcgtggggaaagaaacaacagcacagatcgaacgataccat

SEQ ID NO: 19664 - DNA, 2316 bp, Muscodor strobelii
  misc_feature: SGI cDNA ID NO. 566619
  misc_feature: Encodes the peptide sequence at SEQ ID NO 19665
atgcgcttcggctacgaatctgcttggtttagtactgaccgagacaggcctaagaaaaccaaagtctctgatgtagctcaaatgctactcgtagggcttgagaaggaacgagatgtaagccaagtactccgtactcccactcgatgttttactgaagagaattttgagggtatcactcgaccgttgatatttgctgcgcatagctacggcggcctcgtgcttattcaagcccttcgatattccttcgataggcccgacaagtggtctaatccgtttcgttacaccgctggtctgattttcttcggaacgccttttcaaggacgacaaggtctctcactggaggaaattgttgaggccgttgccgaaaacgaaccggaccgtacgatatatccggaaaccatggcgctatctgtcgaggagaatcctcacctgcaagatattgtggatcgatttgcagaaacacgtcgcgaagacaatccgataccactatggtgcttttatgagactcaaccgagcccgataggccgagtgctgaaaaacaagaccgtaaaagatggctatctcgtaccagaaaactcggcatgtttgactatatctaagggtattgaaaagcaccctttagaacgacatcactataacctccagaaattccctagttctgacgatacagggtacatagcagtcaggagggcaatcgtagggctagccaacggtgcaaaggaatatcttagaaaacggcccatcagcgagaaaatatgcgatccacatctcgaagcaggcctcaatcgatgtctcgctgatttgagaatgaccaatccacttgacgataagtcgcgtatcgagtcaacaaagggtgggctgctcaaagacttgtccagttggatccttcaagacaagggcttcctcagatggcgtgagaacgaagacagccgactattgtggatcaaaggccaccctggaaagggtaagactatgctcctctgtagcatcgccaacgagctaggcagtttgcctacgaacgagcatctggtttcctacttcttctgtcaagccacagacgcgaaactgaacaacgcgacggtcgtgcttcgtggtcttctctacatgctcgttaggcaagaccgctcgttactaaagcagctttacgaagaatacaaaactgttggcaaagggcttttcgaggatggcaatgcttgggaagctttatcaaggatcttcgttaccttgctacagaactaccggtctagagagctcgtctttataattgatgcacttgatgagtgctcaaaggatgatttgccaaagctcttgcgatttatcgcccaacagtcccgtgatagccgagcaaagtggctggtagctagtcgtaactggcaatctattgaagaactacttgcgactgccaatagaaaggtaacactcagtctcgaactgaatcagaagtcaatatctgctgctgtcaaaatttacatccagcgtaaagcggaggagttgcaaggcacaaagaagttcgacgataaaaaccgcgaagagattattcgatctctgacctcgaaggcaaatgacactttcttgtgggtagcattggtttgcgaacggcttgcagaccccgacgttcggcctcgacacatcttgaaggaactagccagtttcccagctggtttgaacaaattgtaccagcgaatgatggagtccatagaacattatcgggatgctgaaatatgccaaaaaattcttgcgaccatatccgtggtatatcgaccgattagtctccaggagctgattataatcctcgatgggccaaacgaccttgatatcgaggacctaagggttattgtgcatgattgcggatcttttctgactatccaagaggatattgtttattttgtccatcagtcagcgaaggactttttacataaagccggggcgaagaagacttttcctggtggtgtcgagttaaggcactcatgcatccttttgagatccattaaggcactgtccaaggaccttcaacgtgatatatacgacttgggcgagccgggtatctctgcccacagtattcaggctcccagtcccaacccactggtccagctgcggtattcctgtgtatattggatcgaacatttcaacgattccataatgtcgggggaaggattccaagaatggagaatcatacaagacttcctggagcggaaatatatatactggcttgagtctcttagcctccttaaagaaataccaaaagggagtctgtctatgtccaaattattacgactacttaagccctcatcaaagcatgataaggaagatctttga

SEQ ID NO: 19665 - protein, 771 aa, Muscodor strobelii
  misc_feature: SGI Peptide ID NO. 566619
  misc_feature (311)..(494): Pfam Id: PF05729 Pfam Desc: NACHT domain
  misc_feature (311)..(432): Pfam Id: PF05729 Pfam Desc: NACHT domain
  misc_feature (256)..(764): NCBI GI: 171677167 Blast Desc: protein product [Podospora anserina] gi|170936651|emb|CAP61310.1| protein product [Podospora anserina]
  misc_feature (256)..(761): NCBI GI: 154936830 Blast Desc: NWD1 [Podospora anserina]
  misc_feature (256)..(761): NCBI GI: 256720369 Blast Desc: NECHADRAFT_89121 [Nectria haematococca mpVI 77-13-4]
  misc_feature (262)..(760): NCBI GI: 17225208 Blast Desc: AF323584_1 beta transducin-like protein HET-E2C*40 [Podospora anserina]
  misc_feature (264)..(760): NCBI GI: 171677728 Blast Desc: protein product [Podospora anserina] gi|154936838|emb|CAL30215.1| HET-E [Podospora anserina] gi|170936932|emb|CAP61591.1| protein product [Podospora anserina]
  misc_feature (264)..(760): NCBI GI: 17225202 Blast Desc: AF323581_1 beta transducin-like protein HET-E4s [Podospora anserina]
  misc_feature (262)..(760): NCBI GI: 17225204 Blast Desc: AF323582_1 beta transducin-like protein HET-E2C [Podospora anserina]
  misc_feature (264)..(760): NCBI GI: 3023956 Blast Desc: HETE1_PODAN RecName: Full=Vegetative incompatibility protein HET-E-1 gi|607003|gb|AAA85775.1| beta transducin-like protein [Podospora anserina]
  misc_feature (264)..(760): NCBI GI: 17225206 Blast Desc: AF323583_1 beta transducin-like protein HET-E2C*4 [Podospora anserina]
  misc_feature (262)..(764): NCBI GI: 171677548 Blast Desc: protein product [Podospora anserina] gi|170936842|emb|CAP61500.1| protein product [Podospora anserina]
MRFGYESAWFSTDRDRPKKTKVSDVAQMLLVGLEKERDVSQVLRTPTRCFTEENFEGITRPLIFAAHSYGGLVLIQALRYSFDRPDKWSNPFRYTAGLIFFGTPFQGRQGLSLEEIVEAVAENEPDRTIYPETMALSVEENPHLQDIVDRFAETRREDNPIPLWCFYETQPSPIGRVLKNKTVKDGYLVPENSACLTISKGIEKHPLERHHYNLQKFPSSDDTGYIAVRRAIVGLANGAKEYLRKRPISEKICDPHLEAGLNRCLADLRMTNPLDDKSRIESTKGGLLKDLSSWILQDKGFLRWRENEDSRLLWIKGHPGKGKTMLLCSIANELGSLPTNEHLVSYFFCQATDAKLNNATVVLRGLLYMLVRQDRSLLKQLYEEYKTVGKGLFEDGNAWEALSRIFVTLLQNYRSRELVFIIDALDECSKDDLPKLLRFIAQQSRDSRAKWLVASRNWQSIEELLATANRKVTLSLELNQKSISAAVKIYIQRKAEELQGTKKFDDKNREEIIRSLTSKANDTFLWVALVCERLADPDVRPRHILKELASFPAGLNKLYQRMMESIEHYRDAEICQKILATISVVYRPISLQELIIILDGPNDLDIEDLRVIVHDCGSFLTIQEDIVYFVHQSAKDFLHKAGAKKTFPGGVELRHSCILLRSIKALSKDLQRDIYDLGEPGISAHSIQAPSPNPLVQLRYSCVYWIEHFNDSIMSGEGFQEWRIIQDFLERKYIYWLESLSLLKEIPKGSLSMSKLLRLLKPSSKHDKEDL

SEQ ID NO: 19666 - DNA, 1461 bp, Muscodor strobelii
  misc_feature: SGI EST ID NO. CUFF.45989.0
  misc_feature: Variant of the nucleotide sequence at SEQ ID NO 19664
gtggagcaatatgcatgtctggaacgcccggcgggaaacctaatcttagtgaatctcgccaacctgcaacggctctgtcctgccagagaatcgtataacgcctaacaaagccctgcgcgcggatccaccccgcctaagaaaaccaaagtctctgatgtagctcaaatgctactcgtagggcttgagaaggaacgagatggtatcactcgaccgttgatatttgctgcgcatagctacggcggcctcgtgcttattcaagcccttcgatattccttcgataggcccgacaagtggtctaatccgtttcgttacaccgctggtctgattttcttcggaacgccttttcaaggacgacaaggtctctcactggaggaaattgttgaggccgttgccgaaaacgaaccggaccgtacgatatatccggaaaccatggcgctatctgtcgaggagaatcctcacctgcaagatattgtggatcgatttgcagaaacacgtcgcgaagacaatccgataccactatggtgcttttatgagactcaaccgagcccgataggccgagtgctgaaaaacaagaccgtaaaagatggctatctcgtaccagaaaactcggcatgtttgactatatctaagggtattgaaaagcaccctttagaacgacatcactataacctccagaaattccctagttctgacgatacagggtacatagcagtcaggagggcaatcgtagggctagccaacggtgcaaaggaatatcttagaaaacggcccatcagtaagatgatattacttttaacgccattttttcaataaggactgtgcaggtggcactaacgatctttaaccttgaaggcgagaaaatatgcgatccacatctcgaagcaggcctcaatcgatgtctcgctgatttgagaatgaccaatccacttgacgataagtcgcgtatcgagtcaacaaagggtgggctgctcaaagacttgtccagttggatccttcaagacaagggcttcctcagatggcgtgagaacgaagacagccgactattgtggatcaaaggccaccctggaaagggtaagactatgctcctctgtagcatcgccaacgagctaggcagtttgcctacgaacgagcatctggtttcctacttcttctgtcaagccacagacgcgaaactgaacaacgcgacggtcgtgcttcgtggtcttctctacatgctcgttaggcaagaccgctcgttactaaagcagctttacgaagaatacaaaactgttggcaaagggcttttcgaggatggcaatgcttgggaagctttatcaaggatcttcgttaccttgctacagaactaccggtctagagagctcgtctttataattgatgcacttgatgagtgctcaaaggatgatttgccaaagctcttgcgatttatcgcccaacagtcccgtgatagccgagcaaagtggc

SEQ ID NO: 19667 - DNA, 228 bp, Muscodor strobelii
  misc_feature: SGI cDNA ID NO. 566620
  misc_feature: Encodes the peptide sequence at SEQ ID NO 19668
atgtgggatgtcttcttgaccgcccataagggtattcaaggaacttctcgcccggcgcattacaccgtcttgctcgatgaggtgttccgagagaaactgacctttgacatgtgccatctcttcggccgggccacgaaggccgtcagtatctgtcctcctgcgtattatgcggatatcgcctgtactcgcagctacgtatacttgtcagacttctttaatggcaactag

SEQ ID NO: 19668 - protein, 75 aa, Muscodor strobelii
  misc_feature: SGI Peptide ID NO. 566620
  misc_feature (3)..(58): Pfam Id: PF02171 Pfam Desc: Piwi domain
  misc_feature (2)..(72): NCBI GI: 46128749 Blast Desc: FG08752.1 [Gibberella zeae PH-1]
  misc_feature (2)..(73): NCBI GI: 116202223 Blast Desc: CHGG_08996 [Chaetomium globosum CBS 148.51] gi|88177514|gb|EAQ84982.1| CHGG_08996 [Chaetomium globosum CBS 148.51]
  misc_feature (2)..(74): NCBI GI: 164425994 Blast Desc: NCU04730 [Neurospora crassa OR74A] gi|157071157|gb|EAA31129.2| NCU04730 [Neurospora crassa OR74A]
  misc_feature (2)..(74): NCBI GI: 7248733 Blast Desc: AF217760_1 QDE2 [Neurospora crassa] gi|39979180|emb|CAE85552.1| post-transcriptional gene silencing protein QDE-2 [Neurospora crassa]
  misc_feature (2)..(73): NCBI GI: 261359496 Blast Desc: eukaryotic translation initiation factor 2C 3 [Verticillium albo-atrum VaMs.102]
  misc_feature (2)..(75): NCBI GI: 119178995 Blast Desc: CIMG_08295 [Coccidioides immitis RS]
  misc_feature (2)..(75): NCBI GI: 258577557 Blast Desc: [Uncinocarpus reesii 1704] gi|237903226|gb|EEP77627.1| [Uncinocarpus reesii 1704]
  misc_feature (2)..(75): NCBI GI: 240104743 Blast Desc: Piwi domain containing protein [Coccidioides posadasii C735 delta SOWgp]
  misc_feature (2)..(73): NCBI GI: 256733522 Blast Desc: NECHADRAFT_35861 [Nectria haematococca mpVI 77-13-4]
  misc_feature (2)..(73): NCBI GI: 171682042 Blast Desc: protein product [Podospora anserina] gi|170940980|emb|CAP66630.1| protein product [Podospora anserina]
MWDVFLTAHKGIQGTSRPAHYTVLLDEVFREKLTFDMCHLFGRATKAVSICPPAYYADIACTRSYVYLSDFFNGN

SEQ ID NO: 19669 - DNA, 639 bp, Muscodor strobelii
  misc_feature: SGI cDNA ID NO. 566621
  misc_feature: Reduced expression when VOC is produced
  misc_feature: Encodes the peptide sequence at SEQ ID NO 19670
atgtcttcatcacctctgaaactagcgacgcctgacgagatcatcacattcgcgcccgatgatggcacaggcttcgaaagggtaaatcgccgagcgggtggaccagttgctctagaaattgaagagtacaacccagactggcctgtgaagtacgcgcttgttgaagaacggatccgaaaggcgcttggtgatcgggcattgatcgtgcaacatacaggctcaacctctgtaccggggttaccagcaaaggctgttcttgatgttgacctcatcgtggaggataacgaagcagaagaagcctatcgagccgatctcgaagccgcgggttttattttattacatcgggaggattggtacaagcaccgcttcctctacctccctgagcctttgacaaatctacacgtatttggtcctggtcctctgagtgcagaggcagagcgccaccgtttgttccgtgactggctacgggagcacccggaggatcgcgacaattatgccgaaattaaaaggaccgccacaaaagccagccgtgaaggaggtgaagatgtaaatgcctacacccgccgtaagggccctgtcattagcgacatcctacggcgaatttttgaaaccgaaggattcatcccaaagtcttcgtga

SEQ ID NO: 19670 - protein, 212 aa, Muscodor strobelii
  misc_feature: SGI Peptide ID NO. 566621
  misc_feature (20)..(201): Pfam Id: PF04229 Pfam Desc: Uncharacterised protein family (UPF0157)
  misc_feature (42)..(201): Pfam Id: PF04229 Pfam Desc: Uncharacterised protein family (UPF0157)
  misc_feature (38)..(208): NCBI GI: 238493071 Blast Desc: GrpB domain protein [Aspergillus flavus NRRL3357] gi|220696266|gb|EED52608.1| GrpB domain protein [Aspergillus flavus NRRL3357]
  misc_feature (25)..(200): NCBI GI: 70990108 Blast Desc: GrpB domain protein [Aspergillus fumigatus Af293] gi|66847535|gb|EAL87865.1| GrpB domain protein [Aspergillus fumigatus Af293]
  misc_feature (15)..(200): NCBI GI: 119497481 Blast Desc: GrpB domain protein [Neosartorya fischeri NRRL 181] gi|119413661|gb|EAW23602.1| GrpB domain protein [Neosartorya fischeri NRRL 181]
  misc_feature (25)..(200): NCBI GI: 159124776 Blast Desc: GrpB domain protein [Aspergillus fumigatus A1163]
  misc_feature (25)..(201): NCBI GI: 212531307 Blast Desc: GrpB domain protein [Penicillium marneffei ATCC 18224] gi|212531309|ref|XP_002145811.1| GrpB domain protein [Penicillium marneffei ATCC 18224] gi|210071174|gb|EEA25263.1| GrpB domain
  misc_feature (38)..(209): NCBI GI: 46139919 Blast Desc: FG11474.1 [Gibberella zeae PH-1]
  misc_feature (21)..(207): NCBI GI: 256731544 Blast Desc: NECHADRAFT_102845 [Nectria haematococca mpVI 77-13-4]
  misc_feature (34)..(208): NCBI GI: 108758453 Blast Desc: MXAN_5238 [Myxococcus xanthus DK 1622] gi|108462333|gb|ABF87518.1| conserved [Myxococcus xanthus DK 1622]
  misc_feature (35)..(208): NCBI GI: 229822013 Blast Desc: protein of function UPF0157 [Beutenbergia cavernae DSM 12333] gi|229567926|gb|ACQ81777.1| protein of function UPF0157 [Beutenbergia cavernae DSM 12333]
  misc_feature (30)..(208): NCBI GI: 256376204 Blast Desc: protein of function UPF0157 [Actinosynnema mirum DSM 43827] gi|255920507|gb|ACU36018.1| protein of function UPF0157 [Actinosynnema mirum DSM 43827]
  misc_feature (44)..(203): SWISSPROT Homolog: EC 2.7.1.24 Dephospho-CoA kinase
  misc_feature: Useful for introducing or modulating the production of volatile compounds
MSSSPLKLATPDEIITFAPDDGTGFERVNRRAGGPVALEIEEYNPDWPVKYALVEERIRKALGDRALIVQHTGSTSVPGLPAKAVLDVDLIVEDNEAEEAYRADLEAAGFILLHREDWYKHRFLYLPEPLTNLHVFGPGPLSAEAERHRLFRDWLREHPEDRDNYAEIKRTATKASREGGEDVNAYTRRKGPVISDILRRIFETEGFIPKSS

SEQ ID NO: 19671 - DNA, 1346 bp, Muscodor strobelii
  misc_feature: SGI EST ID NO. CUFF.46000.0
  misc_feature: Variant of the nucleotide sequence at SEQ ID NO 19669
tgatgtggagatcacttagcctactgtatgccatcggcttcggcttcgtattcgaaactgctgcatgtatctccgcatcagtcataccggtgtccgccttcgacccaataagaaaatagtgccggcaattggcctcgcatcgctgacttcaagccttaaatttcatcgacaccacatcatacttcacaacagtgtgactgcctgagccaactgagcggcctctgccattagccaacacaacgccagaaaatgtcttcatcacctctgaaactagcgacgcctgacgagatcatcacattcgcgcccgatgatggcacaggcttcgaaagggtaaatcgccgagcgggtggaccagttgctctagaaattgaagagtacaacccagactggcctgtgaagtacgcgcttgttgaagaacggatccgaaaggcgcttggtgatcgggcattgatcgtgcaacatacaggctcaacctctgtaccggggttaccagcaaaggctgttcttgatgttgacctcatcgtggaggataacgaagcagaagaagcctatcgagccgatctcgaagccgcgggttttattttattacatcgggaggattggtacaagcaccgcttcctctacctccctgagcctttgacaaatctacacgtatttggtcctggtcctctgagtgcagaggcagagcgccaccgtttgttccgtgactggctacgggagcacccggaggatcgcgacaattatgccgaaattaaaaggaccgccacaaaagccagccgtgaaggaggtgaagatgtaaatgcctacacccgccgtaagggccctgtcattagcgacatcctacggcgaatttttgaaaccgaaggattcatcccaaagtcttcgtgatgaagaacaagtagacattttcatcggcactgagttacagttctgcgaattcacctggtggggttgcacaatagaaaaggaactatgatcaaaaaggtacaaggtatttcggcttgatatcatcggcatcgtagacatcgacaaaatctcaaagaacgccaatctccctcgtctctattataatcttcacccgtgctgatgctggcattcgattcaatataaggggcactcaacaactctatgtcgatttaagcattatcattctgcttgctgaatgggacagtgggctgatcatcataatccacatcagaatatgacgcgcgtgtttgctcgacgtactgtagtttgatcaacattgaaatgagtcagaccactcatgatcatggtcacttttatctgttatttaatcccaaattctctatttagtagatttttcttgcttggtatagaacacttcc

SEQ ID NO: 19672 - DNA, 984 bp, Muscodor strobelii
  misc_feature: SGI cDNA ID NO. 566622
  misc_feature: Encodes the peptide sequence at SEQ ID NO 19673
atggaggtctcttgcgacacggcggctctggcggccgagcttaatacacgatcgcccatttcctcgtccgaattcccagtatgccgtctcgtcatcggaagaggaacatgcggcactatcttcacagccgacaaagtatcacccgttgttgtcaaagttggccgtgagaagcactcgattatccaggactggagcctactctgccaagcgaacgagactctagctgaatgttctgtgcttttgaaacacactccgcacttcaatcacatgcctagtcttcctgctcatccgcgtttgcttggctctgaggagatcaaacaactgctcccaatagagtatcattggcggtatcatgcataccgcatggaacggattcagtccttctcaactacagcccgtcaagctcttctcagaatgtttcctagcgtcgaattggccgtggaagacacacatgactgtctcattcgtccatatttgggacaatcgagttcttccgaaacaccgagcaccctacggaatctacctctttgtcttgacgaaatgaaagctttaggcttggactgcgagctcatagcaaaagagatggccgtcggtgtcgcattcttgcattggggcgtatggatcgatgcaatggacgttgagttcgtactaggcgcctctcgcgaaggggatagaagtgtctctatgtggatattagactttgataaagcaaaggatgaactccatgagcctttcgatgatggactcgcagagagactcgcaggcaggatgcaagggaatgacaattacttccctaagccccagctggacaaggaaatttgggatatcttttcagacacatacttagatgccagcaagactcttctggagggggaagaggaacgcattaagggcttgccactggcagtgttgcgccatcttgagaaactttataaggagtgggatgagtacacgaagtctacagatatatttgaacgagtttaa

SEQ ID NO: 19673 - protein, 327 aa, Muscodor strobelii
  misc_feature: SGI Peptide ID NO. 566622
  misc_feature (2)..(314): NCBI GI: 255935613 Blast Desc: Pc13g03970 [Penicillium chrysogenum Wisconsin 54-1255] gi|211583453|emb|CAP91466.1| Pc13g03970 [Penicillium chrysogenum Wisconsin 54-1255]
  misc_feature (32)..(309): NCBI GI: 258576863 Blast Desc: [Uncinocarpus reesii 1704] gi|237902879|gb|EEP77280.1| [Uncinocarpus reesii 1704]
  misc_feature (32)..(286): NCBI GI: 255933580 Blast Desc: Pc12g13620 [Penicillium chrysogenum Wisconsin 54-1255] gi|211582788|emb|CAP80989.1| Pc12g13620 [Penicillium chrysogenum Wisconsin 54-1255]
  misc_feature (32)..(290): NCBI GI: 85115824 Blast Desc: NCU00787 [Neurospora crassa OR74A] gi|28926741|gb|EAA35707.1| [Neurospora crassa OR74A] gi|38636394|emb|CAE81931.1| conserved [Neurospora crassa]
  misc_feature (146)..(316): NCBI GI: 85081916 Blast Desc: NCU03534 [Neurospora crassa OR74A] gi|16944538|emb|CAD11333.1| [Neurospora crassa] gi|28917891|gb|EAA27577.1| [Neurospora crassa OR74A]
  misc_feature (123)..(307): NCBI GI: 256729454 Blast Desc: NECHADRAFT_84043 [Nectria haematococca mpVI 77-13-4]
  misc_feature (32)..(300): NCBI GI: 256721808 Blast Desc: NECHADRAFT_53311 [Nectria haematococca mpVI 77-13-4]
  misc_feature (103)..(319): NCBI GI: 255947676 Blast Desc: Pc22g05730 [Penicillium chrysogenum Wisconsin 54-1255] gi|211591622|emb|CAP97861.1| Pc22g05730 [Penicillium chrysogenum Wisconsin 54-1255]
  misc_feature (32)..(304): NCBI GI: 255945641 Blast Desc: Pc20g10990 [Penicillium chrysogenum Wisconsin 54-1255] gi|211588323|emb|CAP86428.1| Pc20g10990 [Penicillium chrysogenum Wisconsin 54-1255]
  misc_feature (32)..(289): NCBI GI: 169609865 Blast Desc: SNOG_08024 [Phaeosphaeria nodorum SN15] gi|160701933|gb|EAT84300.2| SNOG_08024 [Phaeosphaeria nodorum SN15]
MEVSCDTAALAAELNTRSPISSSEFPVCRLVIGRGTCGTIFTADKVSPVVVKVGREKHSIIQDWSLLCQANETLAECSVLLKHTPHFNHMPSLPAHPRLLGSEEIKQLLPIEYHWRYHAYRMERIQSFSTTARQALLRMFPSVELAVEDTHDCLIRPYLGQSSSSETPSTLRNLPLCLDEMKALGLDCELIAKEMAVGVAFLHWGVWIDAMDVEFVLGASREGDRSVSMWILDFDKAKDELHEPFDDGLAERLAGRMQGNDNYFPKPQLDKEIWDIFSDTYLDASKTLLEGEEERIKGLPLAVLRHLEKLYKEWDEYTKSTDIFERV

SEQ ID NO: 19674 - DNA, 1428 bp, Muscodor strobelii
  misc_feature: SGI cDNA ID NO. 566623
  misc_feature: Reduced expression when VOC is produced
  misc_feature: Encodes the peptide sequence at SEQ ID NO 19675
atggccgaccgcaacaccgcttcgggcagcggcagccagaacgacgactacggggaggaatgggcccgagatctcagagtccaattcgaacagttgctgcgatccaagcggatgcatgatttcgaacagtcacgccgatctcgattacagacaccgtcgacgccgagagaaagggcttcgtcggccaatttacgggcgtctgcttcacctgggcccggcagaccgactacttcacatggccacagccagcctccatcagcaacaccaccgtcgtactcgtcattgcgcaatctgccaataataccgactcctcccgcgccacacgatcagcaatctcacaaactccgcaacttgctcctttcactagcacaaacgccaacgaaatacgagaatcccggcttactcgacgaagccctgcagaaaataccactggaaaggatatatagcgaggccgaggaggaatctcaagtattgcaagcccaggccgagagtatgggcgacggccgcaagcccgagtggggataccaagattgcgtgattcgggcgctcttaagatggttcaaaagatccttcttcacatgggtcaataacccagcatgccccgtctgcatgtcgccgacgatcgctcagggcatgacccagccaacgccagaggagagtgcatgtggcgcaatgagagtagagctatatcaatgctcaaataactcttgccgagcctacgagcgatttgcgcgatacagcgacgtttggcagttattacaaacgagacgaggtcggtgcggcgaatgggctaactgcttcagcatgttgtgccgcgccgttggtggccgtgtccgctgggtatggaacgcagaggaccatgtatggaccgaggtctactcagaacataagcagcgctggatccacgttgatgcctgtgaagaggcttgggataatccgcgactctactgcgaaggctggggcaagcagatgtcatactgcattgccttcagcattgatggagccaccgatgtcacgcgccgatacgtgcgcaagagcgagcatgcacgcgagagaaacagatgccccgaagaggttatgctatacatcatgcaggagatcaagaaccttcgacgtgccaacatgaacaaagacgaccgatttcgattagagaaggaagactcgagagaagatcgcgagctcaggggctacgttgtagcgtctatagcacaagcagttacgagaatggttcctggcccttcgtcatcatcggggagctcaaggccacccgcctcttcttccagcagatcgagcgaagaccagaaagtaccagccgaacagccgagccggcagagcggcaacgctgagtgggttgcggttcgtggagaggacggccgacgaaatcagcaattccaagatcccaacgcccgccgacaagaccgaccatga

SEQ ID NO: 19675 - protein, 475 aa, Muscodor strobelii
  misc_feature: SGI Peptide ID NO. 566623
  misc_feature (255)..(306): Pfam Id: PF01841 Pfam Desc: Transglutaminase-like superfamily
  misc_feature (16)..(471): NCBI GI: 46105286 Blast Desc: FG00271.1 [Gibberella zeae PH-1] gi|114152121|sp|Q4IR87.1|PNG1_GIBZE RecName: Full=Protein PNG1
  misc_feature (16)..(475): NCBI GI: 261358801 Blast Desc: PNG1 [Verticillium albo-atrum VaMs.102]
  misc_feature (1)..(471): NCBI GI: 74620672 Blast Desc: PNG1_GIBMO RecName: Full=Protein PNG1 gi|25294131|gb|AAN74810.1| Png1p [Gibberella moniliformis]
  misc_feature (8)..(461): NCBI GI: 39943036 Blast Desc: MGG_03598 [Magnaporthe grisea 70-15] gi|145009831|gb|EDJ94487.1| MGG_03598 [Magnaporthe grisea 70-15]
  misc_feature (1)..(468): NCBI GI: 154312437 Blast Desc: BC1G_05821 [Botryotinia fuckeliana B05.10] gi|150849922|gb|EDN25115.1| BC1G_05821 [Botryotinia fuckeliana B05.10]
  misc_feature (2)..(458): NCBI GI: 171695010 Blast Desc: protein product [Podospora anserina] gi|170947747|emb|CAP59910.1| protein product [Podospora anserina]
  misc_feature (128)..(467): NCBI GI: 116182114 Blast Desc: CHGG_01685 [Chaetomium globosum CBS 148.51] gi|88185982|gb|EAQ93450.1| CHGG_01685 [Chaetomium globosum CBS 148.51]
  misc_feature (1)..(458): NCBI GI: 189202868 Blast Desc: PTRG_07438 [Pyrenophora tritici-repentis Pt-1C-BFP] gi|187984869|gb|EDU50357.1| PTRG_07438 [Pyrenophora tritici-repentis Pt-1C-BFP]
  misc_feature (1)..(456): NCBI GI: 119178452 Blast Desc: CIMG_08062 [Coccidioides immitis RS]
  misc_feature (1)..(456): NCBI GI: 240104869 Blast Desc: transglutaminase-like superfamily protein [Coccidioides posadasii C735 delta SOWgp]
  misc_feature (122)..(459): SWISSPROT Homolog: EC 3.5.1.52 Peptide-N(4)-(N-acetyl-beta-glucosaminyl)asparagine amidase
  misc_feature: Useful for introducing or modulating the production of volatile compounds
MADRNTASGSGSQNDDYGEEWARDLRVQFEQLLRSKRMHDFEQSRRSRLQTPSTPRERASSANLRASASPGPGRPTTSHGHSQPPSATPPSYSSLRNLPIIPTPPAPHDQQSHKLRNLLLSLAQTPTKYENPGLLDEALQKIPLERIYSEAEEESQVLQAQAESMGDGRKPEWGYQDCVIRALLRWFKRSFFTWVNNPACPVCMSPTIAQGMTQPTPEESACGAMRVELYQCSNNSCRAYERFARYSDVWQLLQTRRGRCGEWANCFSMLCRAVGGRVRWVWNAEDHVWTEVYSEHKQRWIHVDACEEAWDNPRLYCEGWGKQMSYCIAFSIDGATDVTRRYVRKSEHARERNRCPEEVMLYIMQEIKNLRRANMNKDDRFRLEKEDSREDRELRGYVVASIAQAVTRMVPGPSSSSGSSRPPASSSSRSSEDQKVPAEQPSRQSGNAEWVAVRGEDGRRNQQFQDPNARRQDRP

SEQ ID NO: 19676 - DNA, 4376 bp, Muscodor strobelii
  misc_feature: SGI EST ID NO. CUFF.46063.0
  misc_feature: Variant of the nucleotide sequence at SEQ ID NO 19674
gttacttatcttttgttcaagctcggcttcttcgaaaactctttccttggcacaggaaccatcattcgaggataaatggtatttttatcaggttcccgagatacacttggaatggtcgtcgaaattagagtccttcctgcctcttctgcgggcgcttatcgaaaggcagtaaagcagaagcttggctgctgggcttggccatctggccaaggcggagacgatgaagaagggacggtgggacggaaactatcgactctttcgtcacctcagctcacatggcacttggcagcatattgcatgtattgatgaagtaccctcaagatgatccaggggctgtgacgacgaggagcggcctcaggcctgcagaaaccagctgccgaagtgtctaagcctctcaagagatgttcattgcctcaacatcactatatgccatctatgtctgctctacagtgatatttcgaacatttatgttcatggaattatctacaatccgaaatatttgcatctaagggcccgcgtgcattgcgtagcagacgacttgtggccagacgtttgaggcagtgacaaatgccttgtgatacttgcaaatgacttacagctttggaataaatatccgacagaccatacagatatactgtcctgcaggcagttgatagtcccgtcaaatggagcgctgtctgatattgaagatttgaattaccataattcgtacatgtacgcgatgtctgaccacgacgagattcatatgatatgaagtcaaaaaaaggagagaaactggatggacagtgacagggcggcaggttgaaaggtcgacgcacggccgttgcgtgtcgtccgtccagagggagggcagaagtgggtgtgggttcccgctgattggcctgagcggccatgggagacgcgcgtcacctagagattctgaagggcaaagggggatccgtatggggatcgtggtcttggcggcacggggtcctgacgaggtccttttttaccagctctttcagtggacagcgaggcgggcagaggcgagacaagcggatgcctgggcaggcacaggctgcaggcgcactcgcaggcggacgacggcggtagaatgcggcatggaaaagcgagacagcgacttctagagagaggcctacgacagcaaaaagcttggcatccgtaactgacctgacgccagcagcgcctgccccacgcacttacacgtacacctacgccccttcccactgactatcacttgccctctatcgcttctctgtgcgtgtgtgtctctggcgtgtgtctgtgtctttgacttttggcaacgtgctcgagtcttccaaacggtggttacgagtacaggaccaaggtcaaagtaagagagcatctcaatgtgcctgtgcctcagtctgtgccctcgattgcgcactgcgactagttgacaagtctgcgagtgctagtgaattccatcgtcacctgcagcagaaggggccaccgtcctcgtcgccatctcacagatgtactcagtactgcacctgtctctctcgctgccactctactctacacattgcacattgcaccacctaatcaggacacccctgtccgccattgccccgtctttcgcctctttactcgtcccctacgtcgcccgctactcgtacaggctaccgcactacctctctacctctctacctccgctaccctgacccttacaccccgttacgactgctctctcttgcgctcgctcgtgctcattgccgtctgcctgctgcgcactctcctctgctccaactcgacataccttatctcgcctatccctctccgttaatctcaatccctccccaacactcgaccgactcgtccaccgggcatccgagcatcgtgggaatttggaacagaagcacgtcgcccatccactcgcttcccgacattcacacctgcgagcgaccatcgaatgtcggcgctcgtcccactggagccgtaggggagactgcccatatccagtggcaatcagttactgcgcatgctattagagcacacgcaccggcacgactcaactggctgacgacttcgctcactcccgcgtaacctagagccacaatagcctttggcttgtgcgcccgtgtcccaaagacacccagtattttaacctatccaagcatcaacaacatcaaccaacagcactgcatcttgtatcgttatcgatccttcgccatggccgaccgcaacaccgcttcgggcagcggcagccagaacgacgactacggggaggaatgggcccgagatctcagagtccaattcgaacagttgctgcgatccaagcggatgcatgatttcgaacagtcacgccgatctcgattacagacaccgtcgacgccgagagaaagggcttcgtcggccaatttacgggcgtctgcttcacctgggcccggcagaccgactacttcacatggccacagccagcctccatcagcaacaccaccgtcgtactcgtcattgcgcaatctgccaataataccgactcctcccgcgccacacgatcagcaatctcacaaactccgcaacttgctcctttcactagcacaaacgccaacgaaatacgagaatcccggcttactcgacgaagccctgcagaaaataccactggaaaggatatatagcgaggccgaggaggaatctcaagtattgcaagcccaggccgagagtatgggcgacggccgcaagcccgagtggggataccaagattgcgtgattcgggcgctcttaagatggttcaaaagatccttcttcacatgggtcaataacccagcatgccccgtctgcatgtcgccgacgatcgctcagggcatgacccagccaacgccagaggagagtgcatgtggcgcaatgagagtagagctatatcaatgctcaaataactcttgccgagcctacgagcgatttgcgcgatacagcgacgtttggcagttattacaaacgagacgaggtcggtgcggcgaatgggctaactgcttcagcatgttgtgccgcgccgttggtggccgtgtccgctgggtatggaacgcagaggaccatgtatggaccgaggtctactcagaacataagcagcgctggatccacgttgatgcctgtgaagaggcttgggataatccgcgactctactgcgaaggctggggcaagcagatgtcatactgcattgccttcagcattgatggagccaccgatgtcacgcgccgatacgtgcgcaagagcgagcatgcacgcgagagaaacagatgccccgaagaggttatgctatacatcatgcaggagatcaagaaccttcgacgtgccaacatgaacaaagacgaccgatttcgattagagaaggaagactcgagagaagatcgcgagctcaggggctacgttgtagcgtctatagcacaagcagttacgagaatggttcctggcccttcgtcatcatcggggagctcaaggccacccgcctcttcttccagcagatcgagcgaagaccagaaagtaccagccgaacagccgagccggcagagcggcaacgctgagtgggttgcggttcgtggagaggacggccgacgaaatcagcaattccaagatcccaacgcccgccgacaagaccgaccatgaattacacagagaagattcctgaagcgcatgacttagagaaagattattacatcgactacgcctatcgaccttttatacgtctttactattaaactattactgtcccacacctgggcacaattccttacttctttcgctacgaggaccgaggcatagctgcgaggctacccccaactatagcgccggaccaagctttcatttgttaaataaaactgtttatcgaatcgaccatacacctcggttacgacccttcactgtacctatacaacacccaccgacggctcgtcttattcaattcacgtcacacttttctctgtcccagagcggaactcgggacactatcatcgaccgtcagtcatatgcagcgcggagaaatttttatcggcgtccaggtcgggaggtagcatcatacataccgtttccatttcaagggagggaacggataagactcgcagagacatgggttctctgccgattcttggcgtttgggggtcattagtcctttttacacagcatgatgggataagacatgggctgacgagtcacggcttcgggtggacttacccatgggatcgcttgcatgtgtgctgtacactactaaaatgggaagggggtgttgattcatgggtgcattgttttctccgagttatgagacttggatatgggaagcatttttgtcttgcgccgagacgagaggaatggggagagaaagataccatgaatagaaacctaattgattggtctatgttcgcact

SEQ ID NO: 19677 - DNA, 339 bp, Muscodor strobelii
  misc_feature: SGI cDNA ID NO. 566624
  misc_feature: Elevated expression when VOC is produced
  misc_feature: Encodes the peptide sequence at SEQ ID NO 19678
atgcaggagatcaagaaccttcgacgtgccaacatgaacaaagacgaccgatttcgattagagaaggaagactcgagagaagatcgcgagctcaggggctacgttgtagcgtctatagcacaagcagttacgagaatggttcctggcccttcgtcatcatcggggagctcaaggccacccgcctcttcttccagcagatcgagcgaagaccagaaagtaccagccgaacagccgagccggcagagcggcaacgctgagtgggttgcggttcgtggagaggacggccgacgaaatcagcaattccaagatcccaacgcccgccgacaagaccgaccatga

SEQ ID NO: 19678 - protein, 112 aa, Muscodor strobelii
  misc_feature: SGI Peptide ID NO. 566624
  misc_feature (1)..(98): NCBI GI: 39943036 Blast Desc: MGG_03598 [Magnaporthe grisea 70-15] gi|145009831|gb|EDJ94487.1| MGG_03598 [Magnaporthe grisea 70-15]
  misc_feature (1)..(108): NCBI GI: 46105286 Blast Desc: FG00271.1 [Gibberella zeae PH-1] gi|114152121|sp|Q4IR87.1|PNG1_GIBZE RecName: Full=Protein PNG1
  misc_feature (1)..(104): NCBI GI: 116182114 Blast Desc: CHGG_01685 [Chaetomium globosum CBS 148.51] gi|88185982|gb|EAQ93450.1| CHGG_01685 [Chaetomium globosum CBS 148.51]
  misc_feature (1)..(108): NCBI GI: 256735539 Blast Desc: [Nectria haematococca mpVI 77-13-4]
  misc_feature (1)..(108): NCBI GI: 74620672 Blast Desc: PNG1_GIBMO RecName: Full=Protein PNG1 gi|25294131|gb|AAN74810.1| Png1p [Gibberella moniliformis]
  misc_feature (1)..(95): NCBI GI: 171695010 Blast Desc: protein product [Podospora anserina] gi|170947747|emb|CAP59910.1| protein product [Podospora anserina]
  misc_feature (3)..(104): NCBI GI: 156035577 Blast Desc: SS1G_12992 [Sclerotinia sclerotiorum 1980] gi|154698397|gb|EDN98135.1| SS1G_12992 [Sclerotinia sclerotiorum 1980]
  misc_feature (3)..(104): NCBI GI: 154312437 Blast Desc: BC1G_05821 [Botryotinia fuckeliana B05.10] gi|150849922|gb|EDN25115.1| BC1G_05821 [Botryotinia fuckeliana B05.10]
  misc_feature (2)..(112): NCBI GI: 261358801 Blast Desc: PNG1 [Verticillium albo-atrum VaMs.102]
  misc_feature (1)..(108): NCBI GI: 169596370 Blast Desc: SNOG_00943 [Phaeosphaeria nodorum SN15] gi|160701292|gb|EAT92438.2| SNOG_00943 [Phaeosphaeria nodorum SN15]
  misc_feature: Useful for introducing or modulating the production of volatile compounds
MQEIKNLRRANMNKDDRFRLEKEDSREDRELRGYVVASIAQAVTRMVPGPSSSSGSSRPPASSSSRSSEDQKVPAEQPSRQSGNAEWVAVRGEDGRRNQQFQDPNARRQDRP

SEQ ID NO: 19679 - DNA, 4376 bp, Muscodor strobelii; identical to SEQ ID NO: 19676
  misc_feature: SGI EST ID NO. CUFF.46063.0
  misc_feature: Variant of the nucleotide sequence at SEQ ID NO 19677

SEQ ID NO: 19680 - DNA, 2709 bp, Muscodor strobelii
  misc_feature: SGI cDNA ID NO. 566625
  misc_feature: Reduced expression when VOC is produced
  misc_feature: Encodes the peptide sequence at SEQ ID NO 19681
atggatattcatcgcataagatatgttccatacaatccgagtccgattaactgtgtagcattctctcagtccacatctccgagcaagaagcagcaagcatcgcctgttcgcctggccattggtcgtgcatctggtgacattgaaatttggaaccctcttggtggatcatggcatcaagagaccataatacgtggaggaaaggaccgaacagtggatggcttggtttgggtgactgaacctgaccagatactggagctggccaatcaagaacctctcagagttcctggccgcttgaggctgttcagttttggttactcgagcacaatcacggagtgggatctcgaaaaaggctgcccaaaacatcaatctggcggcacacatggcgacatctggtgtctcggagtccagcccttcactgctccggcaaaaaagggtgataagaatacggccaaagtctatacaacaggcaagaagcttgttgctggcacaattgatggaagcctagtgctttacgatatagacgatggtgggcttcgatacgaccgcgttcttgtcagagcctcatccaaaaagactaagatggtcagcatcgccttccaaagccgtaacgtggttgtggtaggtacctctcagagctgcatcctcgtttacgacatgcgcaacggcacgacgcttgccaagatgacgttaggatcggacttagctggtggggctaaagaaattatagcctggtgtgtcaaatgtcttcctggaggagatatcgtctcgggtgactctaccggagagcttcgtatctgggatggcaaaacatacacacaagctcaaagattgaaagcgcacagctcagatgtcttgtctttggtgactagcgctgatggctcgacaatcgttacgggaggtatggaccgcaagactgctgtttttcggaagaccacaatctctagcacaagatgggccaagatcttccatagcagacttcatcaccacgacgtcaagacaatggcctcatttgaaggtcatggtatgagtgttgttgtctcaggaggccccgatgcaacgccaatcgtaatgcccctggagagagtaggcatagagaatcatcgtcttctgtcatcattgccccaggagcccccattacaaagcgccttggggagtcgactgatcattagttggtgggagcgccaagtatcgatttggaggcttgagaagtctttgagtgatctagagggaaacctagacgaggagcagggcatagccaagaatcgaaaacttgtggcacgagttttaatcaaaggcgaggccaacatcacatctgcctccatcagcaccgatggctccttgctgattgtcggcacaacccttgacgtcaaggcattccatttgaagcctcggcatagcactcgctgggatgagctcaaagttacgaagattaacatggacgagaaactcgcaagtctcggcgccacacgaaccctgatatctccaaatggcgaatgggtatgtttgatacaagctggtggcattgtgtcagtcctagagtactatgtggcttcttccgagtcagaaaagcctagatttgatccccctatccgattgcacagacttcagcgaagaataccaaaacaagccagtcttggcggcctgggcagatatgaccgaacgatcacacaggtagcattctcttctgatagcgacatgctagcggttgcagatttggctggtttcattgatacatgggtatacggcggcccacgcgcgccaggaataatgggtggtcttgatgatgaagatgcttcagatacagacggtgattcttcagacagcgacgacgacgacaggaaagaagagttccgatggaggcgaagtccaaatgcttcattgatacccaggcttcaagctgcacccacagtcttgtctttccaacctctacctaccactcgggaactcaccctagaccaggaaggcgaacagatgacagattacactttacttgctgtcacagccaagccacaaattctgctcatacatcccttccttggcgagcttactgagtggactcgacgaaatccgatacagaaatttcccacgcagttccgaaatatccgggacctcgtaaagggcgcactgtgggtgggtgataggatatggctctatggaaacacttatttgttcatgttcgatttatcccaggacctggcggaaccgaagaccggcaacgagttggtcaagcaagggaccaagagaaagagaggtcctgacagcggcgctgggaataaggtcacaacaggtgcttcagggcccacaaagatcgtacatcatcttgaagaaggcaaaattgaagaggagccgcttgataggccactctttgatccaatggatgaggacgagactagcggagctgctggagacagcgatagtgaagaatcggaagatgatgtcgaaggcgatctggcgcttcttcgcgataaccagaacaaatcaagcacggattcagacgccaagcgagggcctgcgtcctggaatacattcaagtacaggccgattctaggcattgtacctttacatgactggagagaagcaaaagaagcatcggaagaagcgaacggcgcttcagctgctcctcctagtgtagaggtagctcttgtagagcgaccgctgtgggatgttgacataccagatagatatttcggagaaggcgagtttgagtaa

SEQ ID NO: 19681 - protein, 902 aa, Muscodor strobelii
  misc_feature: SGI Peptide ID NO. 566625
  misc_feature (271)..(309): Pfam Id: PF00400 Pfam Desc: WD domain, G-beta repeat
  misc_feature (1)..(902): NCBI GI: 261358800 Blast Desc: U3 small nucleolar RNA-associated protein [Verticillium albo-atrum VaMs.102]
  misc_feature (1)..(896): NCBI GI: 256735540 Blast Desc: [Nectria haematococca mpVI 77-13-4]
  misc_feature (1)..(902): NCBI GI: 116182118 Blast Desc: CHGG_01687 [Chaetomium globosum CBS 148.51] gi|88185984|gb|EAQ93452.1| CHGG_01687 [Chaetomium globosum CBS 148.51]
  misc_feature (1)..(902): NCBI GI: 164428496 Blast Desc: NCU00650 [Neurospora crassa OR74A] gi|157072169|gb|EAA36554.2| NCU00650 [Neurospora crassa OR74A]
  misc_feature (1)..(896): NCBI GI: 25294130 Blast Desc: Wdr1p [Gibberella moniliformis]
  misc_feature (1)..(897): NCBI GI: 46105284 Blast Desc: FG00270.1 [Gibberella zeae PH-1]
  misc_feature (1)..(902): NCBI GI: 171695008 Blast Desc: protein product [Podospora anserina] gi|170947746|emb|CAP59909.1| protein product [Podospora anserina]
  misc_feature (40)..(895): NCBI GI: 145616070 Blast Desc: MGG_03597 [Magnaporthe grisea 70-15] gi|145009834|gb|EDJ94490.1| MGG_03597 [Magnaporthe grisea 70-15]
  misc_feature (1)..(902): NCBI GI: 154312427 Blast Desc: BC1G_05816 [Botryotinia fuckeliana B05.10] gi|150849917|gb|EDN25110.1| BC1G_05816 [Botryotinia fuckeliana B05.10]
  misc_feature (1)..(902): NCBI GI: 156035581 Blast Desc: SS1G_12994 [Sclerotinia sclerotiorum 1980] gi|154698399|gb|EDN98137.1| SS1G_12994 [Sclerotinia sclerotiorum 1980]
  misc_feature: Useful for introducing or modulating the production of volatile compounds
MDIHRIRYVPYNPSPINCVAFSQSTSPSKKQQASPVRLAIGRASGDIEIWNPLGGSWHQETIIRGGKDRTVDGLVWVTEPDQILELANQEPLRVPGRLRLFSFGYSSTITEWDLEKGCPKHQSGGTHGDIWCLGVQPFTAPAKKGDKNTAKVYTTGKKLVAGTIDGSLVLYDIDDGGLRYDRVLVRASSKKTKMVSIAFQSRNVVVVGTSQSCILVYDMRNGTTLAKMTLGSDLAGGAKEIIAWCVKCLPGGDIVSGDSTGELRIWDGKTYTQAQRLKAHSSDVLSLVTSADGSTIVTGGMDRKTAVFRKTTISSTRWAKIFHSRLHHHDVKTMASFEGHGMSVVVSGGPDATPIVMPLERVGIENHRLLSSLPQEPPLQSALGSRLIISWWERQVSIWRLEKSLSDLEGNLDEEQGIAKNRKLVARVLIKGEANITSASISTDGSLLIVGTTLDVKAFHLKPRHSTRWDELKVTKINMDEKLASLGATRTLISPNGEWVCLIQAGGIVSVLEYYVASSESEKPRFDPPIRLHRLQRRIPKQASLGGLGRYDRTITQVAFSSDSDMLAVADLAGFIDTWVYGGPRAPGIMGGLDDEDASDTDGDSSDSDDDDRKEEFRWRRSPNASLIPRLQAAPTVLSFQPLPTTRELTLDQEGEQMTDYTLLAVTAKPQILLIHPFLGELTEWTRRNPIQKFPTQFRNIRDLVKGALWVGDRIWLYGNTYLFMFDLSQDLAEPKTGNELVKQGTKRKRGPDSGAGNKVTTGASGPTKIVHHLEEGKIEEEPLDRPLFDPMDEDETSGAAGDSDSEESEDDVEGDLALLRDNQNKSSTDSDAKRGPASWNTFKYRPILGIVPLHDWREAKEASEEANGASAAPPSVEVALVERPLWDVDIPDRYFGEGEFE

SEQ ID NO: 19682 - DNA, 3209 bp, Muscodor strobelii
  misc_feature: SGI EST ID NO. CUFF.46020.0
  misc_feature: Variant of the nucleotide sequence at SEQ ID NO 19680
ctctaatcgaagtggcagaatcaaaaaagttcatgcgcaagcctcttggtcaatcaacatacttaatttgaaggcggcggcacaaaacaccaggcacaatcaggaggcatgagacactcgggtcggcatacaacgaataaccatcgaattaacacggtcttggatctacaagtctgcgctgccgctacaggttgaaacgtctcgcctttgagctggctgttgcgctcagctcatcacaatcatggatattcatcgcataagatatgttccatacaatccgagtccgattaactgtgtagcattctctcagtccacatctccgagcaagaagcagcaagcatcgcctgttcgcctggccattggtcgtgcatctggtgacattgaaatttggaaccctcttggtggatcatggcatcaagagaccataatacgtggaggaaaggaccgaacagtggatggcttggtttgggtgactgaacctgaccagatactggagctggccaatcaagaacctctcagagttcctggccgcttgaggctgttcagttttggttactcgagcacaatcacggagtgggatctcgaaaaaggctgcccaaaacatcaatctggcggcacacatggcgacatctggtgtctcggagtccagcccttcactgctccggcaaaaaagggtgataagaatacggccaaagtctatacaacaggcaagaagcttgttgctggcacaattgatggaagcctagtgctttacgatatagacgatggtgggcttcgatacgaccgcgttcttgtcagagcctcatccaaaaagactaagatggtcagcatcgccttccaaagccgtaacgtggttgtggtaggtacctctcagagctgcatcctcgtttacgacatgcgcaacggcacgacgcttgccaagatgacgttaggatcggacttagctggtggggctaaagaaattatagcctggtgtgtcaaatgtcttcctggaggagatatcgtctcgggtgactctaccggagagcttcgtatctgggatggcaaaacatacacacaagctcaaagattgaaagcgcacagctcagatgtcttgtctttggtgactagcgctgatggctcgacaatcgttacgggaggtatggaccgcaagactgctgtttttcggaagaccacaatctctagcacaagatgggccaagatcttccatagcagacttcatcaccacgacgtcaagacaatggcctcatttgaaggtcatggtatgagtgttgttgtctcaggaggccccgatgcaacgccaatcgtaatgcccctggagagagtaggcatagagaatcatcgtcttctgtcatcattgccccaggagcccccattacaaagcgccttggggagtcgactgatcattagttggtgggagcgccaagtatcgatttggaggcttgagaagtctttgagtgatctagagggaaacctagacgaggagcagggcatagccaagaatcgaaaacttgtggcacgagttttaatcaaaggcgaggccaacatcacatctgcctccatcagcaccgatggctccttgctgattgtcggcacaacccttgacgtcaaggcattccatttgaagcctcggcatagcactcgctgggatgagctcaaagttacgaagattaacatggacgagaaactcgcaagtctcggcgccacacgaaccctgatatctccaaatggcgaatgggtatgtttgatacaagctggtggcattgtgtcagtcctagagtactatgtggcttcttccgagtcagaaaagcctagatttgatccccctatccgattgcacagacttcagcgaagaataccaaaacaagccagtcttggcggcctgggcagatatgaccgaacgatcacacaggtagcattctcttctgatagcgacatgctagcggttgcagatttggctggtttcattgatacatgggtatacggcggcccacgcgcgccaggaataatgggtggtcttgatgatgaagatgcttcagatacagacggtgattcttcagacagcgacgacgacgacaggaaagaagagttccgatggaggcgaagtccaaatgcttcattgatacccaggcttcaagctgcacccacagtcttgtctttccaacctctacctaccactcgggaactcaccctagaccaggaaggcgaacagatgacagattacactttacttgctgtcacagccaagccacaaattctgctcatacatcccttccttggcgagcttactgagtggactcgacgaaatccgatacagaaatttcccacgcagttccgaaatatccgggacctcgtaaagggcgcactgtgggtgggtgataggatatggctctatggaaacacttatttgttcatgttcgatttatcccaggacctggcggaaccgaagaccggcaacgagttggtcaagcaagggaccaagagaaagagaggtcctgacagcggcgctgggaataaggtcacaacaggtgcttcagggcccacaaagatcgtacatcatcttgaagaaggcaaaattgaagaggagccgcttgataggccactctttgatccaatggatgaggacgagactagcggagctgctggagacagcgatagtgaagaatcggaagatgatgtcgaaggcgatctggcgcttcttcgcgataaccagaacaaatcaagcacggattcagacgccaagcgagggcctgcgtcctggaatacattcaagtacaggccgattctaggcattgtacctttacatgactggagagaagcaaaagaagcatcggaagaagcgaacggcgcttcagctgctcctcctagtgtagaggtagctcttgtagagcgaccgctgtgggatgttgacataccagatagatatttcggagaaggcgagtttgagtaagatggcatgcagcatgaacaggcgggtagagtgtatatagctctgtacaatcagtcaaaattgagacttcatggcaagcggtctgatgatgcatttccccttgtcactgcatatgtgtttcttcccccctgcccacaatagtaaagccaactagatttgattcaaaaagaaaaaaagttttaggtcaaggaatcagtcagacgccaacggtatgatccccgtacttccattgcggctagatttacacaggtgatcatcc

SEQ ID NO: 19683 - DNA, 2478 bp, Muscodor strobelii
  misc_feature: SGI cDNA ID NO. 566626
  misc_feature: Encodes the peptide sequence at SEQ ID NO 19684
atggccacacaagttgtacctgaacaagctgccgctttctttggtctccttacacaattcgcaacagacccatcgactcaatggataacgcaaatcctcgaggagaatgggaaagcaaaggcagaccatgagcagagggagcaggatcacggtgctcatgtacggacaatcacgaaactccaacttaatttagatgccgaagaagagaaagcaaacgatgcccttgcgaaatctgaagcagcactcgaaaaggcacgacagctgaccgaggaaatcgaggatgctcggaaagcactgtctgattatgaagagaaggcaacgcagcaagcagccgatatctgcgagatgcaggccgaattaggagcctaccaatctaaactcacagaaagagagcaagcgtatgagcagctcaaagaacaacaggcggaaattgagacctcaatcaagaagctcgagtcagagcttgagactgccaattccgagctccaagatcaaaaggcacaagtcgcagactctatcaacaagtttgagagcgccaataccgagtacaaagcacagcgagcaatcgatgaggctgcgatcctacaactaaaggatgaactcgaaagcacaaagagcgaacatgaatcacaacaagcagctcaagcatcttccatccagagactcgaggaggacctagagagtgcgaagaaacaaaacgaagaacagcaggcaacagacactgcctctatcaaacgcttagaagaggatctggagacagccaagactgagcaccaagaaagacatgcggaagacgaggcctccatcaagaaacttgaggaagaactcgaaaccgccaaggcagaatataatgagaagcaggcaaccgatgcagcttctatcaagaagctcgaagaagatcttgagtcggccaagactgctcacgaggaacaacaagcaacagatgcagcatccatagcggcaatcactacagagcttgaggccaccaaggccgaatcggcatcccggcgggaagcggatgctgccacaatcaaaacgcttgaggaggaccttgagtcagccaagagcagctatgaggagcaaaaggctgctgatgccacaaccatcaccgagctccaagccgagcttgagacagccaaaatcgaccttgcctcgcagatagctgagaaggaggctttggttgaacaactccaaaacaacatcgagagtgctaaagcagacttcgaaaagcaaaaagccgaagacgatgcttccatcaagcaactgcaagacgaggttaacgctgcgaggactgaatttgaggatcaaaaagctatagacgaagggacaataagcttgctccaggatgagcttgaacagctaactaaacaacacaaggagcaacaagcagaagacgaggcttcgattaagaaactcgagactgaactcgaagatgcgagcaagcagctcaagatcaagagcaccaagctcgagacactacaaaaattcactttccccatgacgacagcaagcaagcaaaacataatcgaccaactagacaacctctataatgcagccaaagatctcgccatgaaattcttctctgacgacttaccagaggccgttcgaatgaacagcaggcagttccaagagattcaggataacttcaagccgatccctctcccggcctccgacacagcagctgcaaagaaagcccgtattgcagcgtgtctagtgacactcggttcgcgtctcgtcgaacggatttttgtgccatattacactctaccagacgagagcgcagacatggatcttcccaatgagatcgacgacatcgccatgatgctatccagtctgtccaggatggacgcaaagaaggaattgtatctacgaagctgtatcctagctatcgagccagaacagcagaggcaggtagcttatgagagaggagccgttatcgctgaagaagtacacctccacctctcacccctcatctctccaagccgccacgccgacttcaaaaccgaagtccaaactttctgcaccttcgcagtagacacctggctctccctgcgcacgctcaagcagaaaatcgagccctttacgatcgcggacgacaccggccaatactgggttcccgtagaatttgacctgagcacacgttcatcctccccctctccctcccaacattcccaagtctcccaagcctccactcaatcaacggcacaccccgaaggcggagcactcgtccacaagacctccgcgcattccctccgttcttctaaaaccgtgggcttcatctggcccggcttttcgctaggtaaccacccgttgaagagaggctacatgctcctagaatcccaagtccgcgtcgcaggcgaagagatgtacgcgaagcgccaacagcgcgccatgcaacgcgcctgcaaagggcaaaaccaccagcagcgtcggcccgggagcgtcgaactcaagttgtttccctggagtacggcgtga

SEQ ID NO: 19684 - protein, 825 aa, Muscodor strobelii
  misc_feature: SGI Peptide ID NO. 566626
  misc_feature (221)..(694): NCBI GI: 164425771 Blast Desc: NCU10836 [Neurospora crassa OR74A] gi|157071058|gb|EDO65176.1| [Neurospora crassa OR74A]
  misc_feature (137)..(694): NCBI GI: 116196998 Blast Desc: CHGG_05097 [Chaetomium globosum CBS 148.51] gi|88181010|gb|EAQ88478.1| CHGG_05097 [Chaetomium globosum CBS 148.51]
  misc_feature (472)..(694): NCBI GI: 171688270 Blast Desc: protein product [Podospora anserina] gi|170944097|emb|CAP70207.1| protein product [Podospora anserina]
  misc_feature (131)..(430): NCBI GI: 145240293 Blast Desc: An08g06780 [Aspergillus niger] gi|134077308|emb|CAK45648.1| protein product [Aspergillus niger]
  misc_feature (38)..(380): NCBI GI: 145240293 Blast Desc: An08g06780 [Aspergillus niger] gi|134077308|emb|CAK45648.1| protein product [Aspergillus niger]
  misc_feature (88)..(483): NCBI GI: 145351776 Blast Desc: [Ostreococcus lucimarinus CCE9901] gi|144580473|gb|ABO98532.1| [Ostreococcus lucimarinus CCE9901]
  misc_feature (75)..(484): NCBI GI: 50554989 Blast Desc: YALI0F02387p [Yarrowia lipolytica] gi|49650773|emb|CAG77705.1| YALI0F02387p [Yarrowia lipolytica]
  misc_feature (133)..(455): NCBI GI: 29436380 Blast Desc: MYH9 protein [Homo sapiens]
  misc_feature (133)..(455): NCBI GI: 553596 Blast Desc: cellular myosin heavy chain [Homo sapiens]
  misc_feature (131)..(449): NCBI GI: 255714080 Blast Desc: KLTH0D14102p [Lachancea thermotolerans] gi|238934702|emb|CAR22884.1| KLTH0D14102p [Lachancea thermotolerans]
MATQVVPEQAAAFFGLLTQFATDPSTQWITQILEENGKAKADHEQREQDHGAHVRTITKLQLNLDAEEEKANDALAKSEAALEKARQLTEEIEDARKALSDYEEKATQQAADICEMQAELGAYQSKLTEREQAYEQLKEQQAEIETSIKKLESELETANSELQDQKAQVADSINKFESANTEYKAQRAIDEAAILQLKDELESTKSEHESQQAAQASSIQRLEEDLESAKKQNEEQQATDTASIKRLEEDLETAKTEHQERHAEDEASIKKLEEELETAKAEYNEKQATDAASIKKLEEDLESAKTAHEEQQATDAASIAAITTELEATKAESASRREADAATIKTLEEDLESAKSSYEEQKAADATTITELQAELETAKIDLASQIAEKEALVEQLQNNIESAKADFEKQKAEDDASIKQLQDEVNAARTEFEDQKAIDEGTISLLQDELEQLTKQHKEQQAEDEASIKKLETELEDASKQLKIKSTKLETLQKFTFPMTTASKQNIIDQLDNLYNAAKDLAMKFFSDDLPEAVRMNSRQFQEIQDNFKPIPLPASDTAAAKKARIAACLVTLGSRLVERIFVPYYTLPDESADMDLPNEIDDIAMMLSSLSRMDAKKELYLRSCILAIEPEQQRQVAYERGAVIAEEVHLHLSPLISPSRHADFKTEVQTFCTFAVDTWLSLRTLKQKIEPFTIADDTGQYWVPVEFDLSTRSSSPSPSQHSQVSQASTQSTAHPEGGALVHKTSAHSLRSSKTVGFIWPGFSLGNHPLKRGYMLLESQVRVAGEEMYAKRQQRAMQRACKGQNHQQRRPGSVELKLFPWSTA

SEQ ID NO: 19685 - DNA, 4267 bp, Muscodor strobelii
  misc_feature: SGI EST ID NO. CUFF.46168.0
  misc_feature: Variant of the nucleotide sequence at SEQ ID NO 19683
gccgttatcgctgaagaagtacacctccacctctcacccctcatctctccaagccgccacgccgacttcaaaaccgaagtccaaactttctgcaccttcgcagtagacacctggctctccctgcgcacgctcaagcagaaaatcgagccctttacgatcgcggacgacaccggccaatactgggttcccgtagaatttgacctgagcacacgttcatcctccccctctccctcccaacattcccaagtctcccaagcctccactcaatcaacggcacaccccgaaggcggagcactcgtccacaagacctccgcgcattccctccgttcttctaaaaccgtgggcttcatctggcccggcttttcgctaggtaaccacccgttgaagagaggctacatgctcctagaatcccaagtccgcgtcgcaggcgaagagatgtacgcgaagcgccaacagcgcgccatgcaacgcgcctgcaaagggcaaaaccaccagcagcgtcggcccgggagcgtcgaactcaagttgtttccctggagtacggcgtgactagttgtacgacctcggcggatcgtcgtgcaaggacgagcgagagttagagcggatggcaggataaggattaaagaaggggaaggaagactggggatgagggtcgtgggtttgggtatgaggaagaaggttgcgctgtttgtaagttgggtactctggttggtttgggagatttggtgtccgggacgcatcgcttgggtttgactatatggactttttgatttattgggattggtattgactttgcttggagtgcctggactgttcgaattgagtgtaggaatgcttgggtttggccctggaaatgggaaaggacatggttgaccacttggacggtctatccaatatgtttgggtcattttgattggaaatgtctgattatcatctgtagctctttcttttgtcataatacatctaatttctctcttcttcatgatatctttcttcaatcacgatatcattcaatcacgaactgaaaagaggaagcgaggtactgtttaactccaatgtattaccactccaccatctctccgcggatttttgtttccaattttccttttccagagagatgactcagtagccaagtagctaagttgggcagccaatagatccagataatgctagatagagagcgatagatagtgaacgagcggatgaagaatgcaaagccggtggtgcccgtgtcgttgtgtgctattttccaagccgtcaaatagatgaatgatgattccagaaacaccgaaaaagagccaacacaactccaaaaatgatgtttcagcttagacaccaaacccgcccaacaaatgaccggagccgcctgcccaccgacccaaatgagaatcaaacattatatagtattacatcttcgttcatacaaacgtacaaggacttagaacagcccacttcctcccatagtcgctgtcggcgccccgccaccgaggttctcgctttcacattcctcaacgggcgagcggtgagcagaagcaggatggtgtgcgagttttcggatggaagcgacgggatatccttcgcaactttcttcatcctcgatgtcaagtccgacgctctcggttcgcgatcttttacgaccagcgagagatggcgagggagggtttgtgtttgagaacccatgaggcattgtcaaagggagtggaatagggagaggaaggttgggagtctgagattgagactgcagggcattgcggagaggtgtgaggccagttccgcccagtgtgaatgttggctctccgtcacttgttccatcgtcccagattgagggtcgacgactataagagttgttggagagattggatgtctgcgaagcgtgggtggagtttgatggaatgcgggttaattctgttgcggaccagggtgtccaagcttcttgtgtttcgtcgtgcggtgacagaagatccgggttggtgtgccccactgctgctgccgctgcggcggcgatagccgcccattgactttctgatgtgcaagaagttgtcatagttgttgtgtcggcccagcttacgccgcttgtgtcgctgagttgagcgcttgtgtccatgtatcgtgtagtgaggtcgagatcctgcgttggtgacgtagcgtaatcgttcatgtagtcggatacgtcaagggaagtaaggaatgtgtctgttgagtcgggtccgctgcttgtaaggagattacttgatgtgttatctgttgtattcgagacgctagttccgtctgacatgaaacttagatgatggtgtagcgtgtggccgttgtctatggtcgtggtgttgccatcaaaactatgggcgtatccgcttgaaagggtggcagtcggtggaggcgtcaccaggccgttagagaacccgtcaaggacgttgttgagtccggcaagatgctgctgcgcctgcaattgttgcaaatgaggcagactctgagtgtggctgggaagagtaaatgttgtcgtagaggcgttctcataggtagagctgaagttctggtgcatggctgcattaacgtggtgtgagaacccaggatcagggctcataagactgtctctggagacagcggttggcgaaccgccagaaacgtaggctttttgctggtgatatgacgatgtgggatcaactttggttaagaagcgccagttgcagcccgccgggactatcgtcgttttgcccttctcgtcggtgttctcgtgtacaggcacaaacgtccacattattactgctcgacgttgccagttgatgcgaggcttcttggacgatgaggactcatccgagctatttcttgctgccacctcactagaaggtgccgaccatatctcttggtacatggcaacttgagagaggagctctttagggctaggaacatctttgggtttatagtgcgacgatgcttcctcgttctccttcttaatacgggcggcatcacgctcggcacggccatgtagggagccggcttcacgcattgctcgggcacgatccttcgcttcgcgctctattgtcacatatttcgcgagtttgatgaaggtgtttgcccagctgctagcaggaaatggtatcgagatggtgtcccggctgccacggcttgtgcaatcgcaccgtccgggtattgtgttgacgcagcctacacgatgagactgaatgacatcgatggagcttgatctccccacaaaatctgattcggattctgtcaggtacaactcgtcaggcttgctaacggatgttatcgaacgccagctatgattatggagatcgggtctgctgatctggaactcgacgagtccattcagatcagaaccgcctgggaacttagaggtagcatgcagatcaagcacgacctcaaagtgaaatgtgtcgcaaggcccgacgacgcacctcgaattattttcgtccgagggtcgagtatcgtcgagagcaatagtgagcttgtctttgaactcaggaaagcgatctgcccactttccagctagttccttcacggaagatgattctttctgcgagagatttctcgtgtattcatgcaatagcacagttgattgctttccttggcgtggtaaatctttgtagtctttgccctcgttcaatttgagatggggataatctgcctccgacaagcatagaccatcgcgatggaatcctgtgatgtgttttctaagggtaccatcctccgcttggacgtgtttctccttcagggtaatctgtgatgacgatacgaagatccagcattgcttgggtcgaatgaagacatcattttcggcatttagtagccgcgagaagtattcgtaattcggacgctcatccggcagatgtccatcggctatcgagataagaacccgattgttcttgaaagattcagtgtcttcttcctctttcagaagtctcttatcatcgtccaggccgtccttctgtcttgggaagataaagtgaactgtgatgggcgattagcatcaggagtgagtcaccacaagatgaacagggcttgcttacaggtcgagagtgtcggaaaaaaacccttcaatacctgtatgtgactagatacttgttttctcgacctgaacatggggtgacccggattgtctttcgatttttccctttgcttcccggtagggattctttctcctttctgaggagggtggaggttccaatgataaatccagagatattccgtaattagcatatttcggccgtatagtacagctttagaactgaacttcttgcgccccaattgt

SEQ ID NO: 19686 - DNA, 2601 bp, Muscodor strobelii
  misc_feature: SGI cDNA ID NO. 566627
  misc_feature: Encodes the peptide sequence at SEQ ID NO 19687
atgttcaggtcgagaaaacaagtatctagtcacatacaggtattgaagggtttttttccgacactctcgacctttcactttatcttcccaagacagaaggacggcctggacgatgataagagacttctgaaagaggaagaagacactgaatctttcaagaacaatcgggttcttatctcgatagccgatggacatctgccggatgagcgtccgaattacgaatacttctcgcggctactaaatgccgaaaatgatgtcttcattcgacccaagcaatgctggatcttcgtatcgtcatcacagattaccctgaaggagaaacacgtccaagcggaggatggtacccttagaaaacacatcacaggattccatcgcgatggtctatgcttgtcggaggcagattatccccatctcaaattgaacgagggcaaagactacaaagatttaccacgccaaggaaagcaatcaactgtgctattgcatgaatacacgagaaatctctcgcagaaagaatcatcttccgtgaaggaactagctggaaagtgggcagatcgctttcctgagttcaaagacaagctcactattgctctcgacgatactcgaccctcggacgaaaataattcgaggtgcgtcgtcgggccttgcgacacatttcactttgaggtcgtgcttgatctgcatgctacctctaagttcccaggcggttctgatctgaatggactcgtcgagttccagatcagcagacccgatctccataatcatagctggcgttcgataacatccgttagcaagcctgacgagttgtacctgacagaatccgaatcagattttgtggggagatcaagctccatcgatgtcattcagtctcatcgtgtaggctgcgtcaacacaatacccggacggtgcgattgcacaagccgtggcagccgggacaccatctcgataccatttcctgctagcagctgggcaaacaccttcatcaaactcgcgaaatatgtgacaatagagcgcgaagcgaaggatcgtgcccgagcaatgcgtgaagccggctccctacatggccgtgccgagcgtgatgccgcccgtattaagaaggagaacgaggaagcatcgtcgcactataaacccaaagatgttcctagccctaaagagctcctctctcaagttgccatgtaccaagagatatggtcggcaccttctagtgaggtggcagcaagaaatagctcggatgagtcctcatcgtccaagaagcctcgcatcaactggcaacgtcgagcagtaataatgtggacgtttgtgcctgtacacgagaacaccgacgagaagggcaaaacgacgatagtcccggcgggctgcaactggcgcttcttaaccaaagttgatcccacatcgtcatatcaccagcaaaaagcctacgtttctggcggttcgccaaccgctgtctccagagacagtcttatgagccctgatcctgggttctcacaccacgttaatgcagccatgcaccagaacttcagctctacctatgagaacgcctctacgacaacatttactcttcccagccacactcagagtctgcctcatttgcaacaattgcaggcgcagcagcatcttgccggactcaacaacgtccttgacgggttctctaacggcctggtgacgcctccaccgactgccaccctttcaagcggatacgcccatagttttgatggcaacaccacgaccatagacaacggccacacgctacaccatcatctaagtttcatgtcagacggaactagcgtctcgaatacaacagataacacatcaagtaatctccttacaagcagcggacccgactcaacagacacattccttacttcccttgacgtatccgactacatgaacgattacgctacgtcaccaacgcaggatctcgacctcactacacgatacatggacacaagcgctcaactcagcgacacaagcggcgtaagctgggccgacacaacaactatgacaacttcttgcacatcagaaagtcaatgggcggctatcgccgccgcagcggcagcagcagtggggcacaccaacccggatcttctgtcaccgcacgacgaaacacaagaagcttggacaccctggtccgcaacagaattaacccgcattccatcaaactccacccacgcttcgcagacatccaatctctccaacaactcttatagtcgtcgaccctcaatctgggacgatggaacaagtgacggagagccaacattcacactgggcggaactggcctcacacctctccgcaatgccctgcagtctcaatctcagactcccaaccttcctctccctattccactccctttgacaatgcctcatgggttctcaaacacaaaccctccctcgccatctctcgctggtcgtaaaagatcgcgaaccgagagcgtcggacttgacatcgaggatgaagaaagttgcgaaggatatcccgtcgcttccatccgaaaactcgcacaccatcctgcttctgctcaccgctcgcccgttgaggaatgtgaaagcgagaacctcggtggcggggcgccgacagcgactatgggaggaagtgggctgttctaa

SEQ ID NO: 19687 - protein, 866 aa, Muscodor strobelii
  misc_feature: SGI Peptide ID NO. 566627
  misc_feature (1)..(621): NCBI GI: 171695434 Blast Desc: protein product [Podospora anserina] gi|170947959|emb|CAP60123.1| protein product [Podospora anserina]
  misc_feature (5)..(570): NCBI GI: 256734717 Blast Desc: NECHADRAFT_98929 [Nectria haematococca mpVI 77-13-4]
  misc_feature (31)..(510): NCBI GI: 261355233 Blast Desc: conserved [Verticillium albo-atrum VaMs.102]
  misc_feature (5)..(625): NCBI GI: 116182074 Blast Desc: CHGG_01665 [Chaetomium globosum CBS 148.51] gi|88185962|gb|EAQ93430.1| CHGG_01665 [Chaetomium globosum CBS 148.51]
  misc_feature (1)..(499): NCBI GI: 38567158 Blast Desc: [Neurospora crassa]
  misc_feature (1)..(499): NCBI GI: 85116210 Blast Desc: NCU02612 [Neurospora crassa OR74A] gi|28926815|gb|EAA35779.1| [Neurospora crassa OR74A]
  misc_feature (10)..(681): NCBI GI: 284449171 Blast Desc: FoabaA [Fusarium oxysporum f. sp. lycopersici]
  misc_feature (1)..(475): NCBI GI: 145613986 Blast Desc: MGG_01218 [Magnaporthe grisea 70-15] gi|145020981|gb|EDK05110.1| MGG_01218 [Magnaporthe grisea 70-15]
  misc_feature (1)..(665): NCBI GI: 156054688 Blast Desc: SS1G_06192 [Sclerotinia sclerotiorum 1980] gi|154703972|gb|EDO03711.1| SS1G_06192 [Sclerotinia sclerotiorum 1980]
  misc_feature (33)..(603): NCBI GI: 154296404 Blast Desc: BC1G_13028 [Botryotinia fuckeliana B05.10] gi|150843389|gb|EDN18582.1| BC1G_13028 [Botryotinia fuckeliana B05.10]
MFRSRKQVSSHIQVLKGFFPTLSTFHFIFPRQKDGLDDDKRLLKEEEDTESFKNNRVLISIADGHLPDERPNYEYFSRLLNAENDVFIRPKQCWIFVSSSQITLKEKHVQAEDGTLRKHITGFHRDGLCLSEADYPHLKLNEGKDYKDLPRQGKQSTVLLHEYTRNLSQKESSSVKELAGKWADRFPEFKDKLTIALDDTRPSDENNSRCVVGPCDTFHFEVVLDLHATSKFPGGSDLNGLVEFQISRPDLHNHSWRSITSVSKPDELYLTESESDFVGRSSSIDVIQSHRVGCVNTIPGRCDCTSRGSRDTISIPFPASSWANTFIKLAKYVTIEREAKDRARAMREAGSLHGRAERDAARIKKENEEASSHYKPKDVPSPKELLSQVAMYQEIWSAPSSEVAARNSSDESSSSKKPRINWQRRAVIMWTFVPVHENTDEKGKTTIVPAGCNWRFLTKVDPTSSYHQQKAYVSGGSPTAVSRDSLMSPDPGFSHHVNAAMHQNFSSTYENASTTTFTLPSHTQSLPHLQQLQAQQHLAGLNNVLDGFSNGLVTPPPTATLSSGYAHSFDGNTTTIDNGHTLHHHLSFMSDGTSVSNTTDNTSSNLLTSSGPDSTDTFLTSLDVSDYMNDYATSPTQDLDLTTRYMDTSAQLSDTSGVSWADTTTMTTSCTSESQWAAIAAAAAAAVGHTNPDLLSPHDETQEAWTPWSATELTRIPSNSTHASQTSNLSNNSYSRRPSIWDDGTSDGEPTFTLGGTGLTPLRNALQSQSQTPNLPLPIPLPLTMPHGFSNTNPPSPSLAGRKRSRTESVGLDIEDEESCEGYPVASIRKLAHHPASAHRSPVEECESENLGGGAPTATMGGSGLF

SEQ ID NO: 19688 - DNA, 555 bp, Muscodor strobelii
  misc_feature: SGI cDNA ID NO. 566628
  misc_feature: Reduced expression when VOC is produced
  misc_feature: Encodes the peptide sequence at SEQ ID NO 19689
atgctgtctatgggctttgggtttgtctcgttcacaaacagcgactccgccgccgccgctactaaagtgatggatggtcatgtactacggggccataagctacaagtgagagcctcgcaccgcggtctagatgcggctgaggagaggaagaaaggtgatgcggccaacaaggccgccaagtccactcttctcattaagaatctagcattccaagcgaccaagaaggacgtgaaagcgctactaggctcatacggccaagtcagggccgtaagaatgcccaagaaattcaatcactcaggcagaggtttcgcattcgcagacttctcgtctccgaaggaagccgaaaatgccttgcgcgcactgggggatactcacttactgggaagaagacttataatacagtatgccgaagccgatgctgtcgacccggaagaggaaatcgccaagatgcagaagaaggtgggaggacaggtcaacaaggttgccctgcaggaactaacaggccgtggccggaagaagttcaacgtgggaggagacagggaagagggagagtga

SEQ ID NO: 19689 - protein, 184 aa, Muscodor strobelii
  misc_feature: SGI Peptide ID NO. 566628
  misc_feature (63)..(133): Pfam Id: PF00076 Pfam Desc: RNA recognition motif. (a.k.a. RRM, RBD, or RNP domain)
  misc_feature (3)..(36): Pfam Id: PF00076 Pfam Desc: RNA recognition motif. (a.k.a. RRM, RBD, or RNP domain)
  misc_feature (1)..(179): NCBI GI: 154296406 Blast Desc: BC1G_13029 [Botryotinia fuckeliana B05.10] gi|150843390|gb|EDN18583.1| BC1G_13029 [Botryotinia fuckeliana B05.10]
  misc_feature (1)..(179): NCBI GI: 156054690 Blast Desc: SS1G_06193 [Sclerotinia sclerotiorum 1980] gi|154703973|gb|EDO03712.1| SS1G_06193 [Sclerotinia sclerotiorum 1980]
  misc_feature (1)..(178): NCBI GI: 169616726 Blast Desc: SNOG_11538 [Phaeosphaeria nodorum SN15] gi|111060126|gb|EAT81246.1| SNOG_11538 [Phaeosphaeria nodorum SN15]
  misc_feature (1)..(178): NCBI GI: 189197515 Blast Desc: multiple RNA-binding domain containing protein 1 [Pyrenophora tritici-repentis Pt-1C-BFP] gi|187981043|gb|EDU47669.1| multiple RNA-binding domain protein 1
  misc_feature (1)..(173): NCBI GI: 116182074 Blast Desc: CHGG_01665 [Chaetomium globosum CBS 148.51] gi|88185962|gb|EAQ93430.1| CHGG_01665 [Chaetomium globosum CBS 148.51]
  misc_feature (1)..(182): NCBI GI: 85116206 Blast Desc: NCU02611 [Neurospora crassa OR74A] gi|74696746|sp|Q7SG09.1|MRD1_NEUCR RecName: Full=Multiple RNA-binding domain-containing protein 1 conserved [Neurospora
  misc_feature (1)..(182): NCBI GI: 38567159 Blast Desc: related to MRD1 [Neurospora crassa]
  misc_feature (2)..(184): NCBI GI: 256734716 Blast Desc: NECHADRAFT_30669 [Nectria haematococca mpVI 77-13-4]
  misc_feature (2)..(183): NCBI GI: 242802831 Blast Desc: pre-rRNA processing protein Mrd1, [Talaromyces stipitatus ATCC 10500] gi|218717398|gb|EED16819.1| pre-rRNA processing protein Mrd1, [Talaromyces stipitatus ATCC 10500]
  misc_feature (2)..(183): NCBI GI: 212540104 Blast Desc: pre-rRNA processing protein Mrd1, [Penicillium marneffei ATCC 18224] gi|210067506|gb|EEA21598.1| pre-rRNA processing protein Mrd1, [Penicillium marneffei ATCC 18224]
  misc_feature: Useful for introducing or modulating the production of volatile compounds
MLSMGFGFVSFTNSDSAAAATKVMDGHVLRGHKLQVRASHRGLDAAEERKKGDAANKAAKSTLLIKNLAFQATKKDVKALLGSYGQVRAVRMPKKFNHSGRGFAFADFSSPKEAENALRALGDTHLLGRRLIIQYAEADAVDPEEEIAKMQKKVGGQVNKVALQELTGRGRKKFNVGGDREEGE

SEQ ID NO: 19690 - DNA, 3355 bp, Muscodor strobelii
  misc_feature: SGI EST ID NO. CUFF.46211.1
  misc_feature: Variant of the nucleotide sequence at SEQ ID NO 19688
tgcaaacaagaccttcgaaagaacttgaagcgcattgcatggagactgccagcatgccgggatggattctgggacacgaatattcataaggggtcttcccccaaacatcacagaaagtgaacttcagaaacactttagcgccaaaggtcaagtcaacgatgtcaaatgtatcccacacaggagaattggctatgttggctacaagactcctgaagatgcagccaatgctgtcaggtatttcaatcgcaccttcatccgcatgtccaagatacatgtcgagtttgccaagctgattggagatccttcactcgccaaaaatcaatctaataaacatggctccaatgatcatacctctgttgcttccaactccagatcctcagggctggctgcacaccagcaggagaagccagagtcacccagcaagaagcgcaaactggatgacctgaaagagtcggatcccaaactgcaagagttcttgagtgtcatgcagccatccaagaacactgccaaccagatacatggccatgcggctgaagccgttgaggaacaccccgccaagatcgctgccgttgctgctcatcccgatgactcgggcgacgatgactatcagtccatgcccgcaaggatacggaagaatgtttcaccacaatctagtacgagagcaccccaacgagatgctagccatcaatctgcttctgccatacacgatcaggagatgcaacccgtttctacagatgacgagggagaagaagtgcaggaagcggaagctataacccgttcagttgatgacaatgactggctccgtagtagaacaaatcgtctgctagatttggttgatgaagatgaacctgctcctccaatattagagacagaaatggtgcagtcaagcgttccgaaaccaaatcccgaacccgaggagatcaagaatgtggaggtacacgtgagccccacacccgaggacaggccagacccgacccaagataatctggacgcggttcgtaagagctcaagaatattcattcgcaatatgccctattcggcgactgcggaagatctcaggtcacattttgagcagtacggagaaatcgaagaggtacatgttccatcggacgcgtcaaaaagcaaccgcggaatggggtttgtgctattcaaagagcccgaggccgccgtccaagcattccagtcagatcgtacatcatttcagggtcgaatcatgcacattttgcccgcaactaagcgcaatcagcttgacgagttcgcactggctaagcttcctctgaagcagcagaatctcatcaagaagagaaatcaagctgcaacctctacttggtcttggaattcactctacatggcacaagacgctataaatacatcagttgccgatcgtctcgggatatccaagagcgaactgctggaccctacgagtactgatgctgccatcaaacaggcgatcgcggagacacaaaccatccatgacacgaaagcctacttcctggccaatggcgtcagtttggaggctttcaactcaaaacagcgtggtgacactgtgattcttgtaaaaaatcttgcctacacgaacaaggctgaagaaatcaggcgtctatttgaagaacatggtcgtgtgttaagagttttgctgcctcccacagggaccattgcgattgtgcaattctccaactcctccgatgcgaagcgtgcttttgccaagttagcttaccgtcggttgggttcccaacaactatttctagaaatggctccaaaaaatatctttcttgattcacaatccagtgaggctccgcccacagatgcagaaccagctgcggtcgcgaaggtatccacatctgatctgctcgatggtaacgatgcacaaacatctgctggagcggctaatctgttcattaaaaatctgtcgtgggatactgacacagcagagcttgcggctgccttccagcatcttgaagggttccgaggcgcattagtcaaaacgaagaaggaccccaaaaacactggccaaatgctgtctatgggctttgggtttgtctcgttcacaaacagcgactccgccgccgccgctactaaagtgatggatggtcatgtactacggggccataagctacaagtgagagcctcgcaccgcggtctagatgcggctgaggagaggaagaaaggtgatgcggccaacaaggccgccaagtccactcttctcattaagaatctagcattccaagcgaccaagaaggacgtgaaagcgctactaggctcatacggccaagtcagggccgtaagaatgcccaagaaattcaatcactcaggcagaggtttcgcattcgcagacttctcgtctccgaaggaagccgaaaatgccttgcgcgcactgggggatactcacttactgggaagaagacttataatacagtatgccgaagccgatgctgtcgacccggaagaggaaatcgccaagatgcagaagaaggtgggaggacaggtcaacaaggttgccctgcaggaactaacaggccgtggccggaagaagttcaacgtgggaggagacagggaagagggagagtgaatagcagacaattgaacatgtctatattctgccctctgtgtgtctaattatgtcactaaagagtccctggagtgtgagtattagcctttcgcggcggctcggtctggttcattggtcgcaagcctcccttggcaaggtctaccacccaaaatcccaacacgttggaaacccgcccacccactgccaaagaaccctgtcagggagacccatcttagcgtgacttacccctgccaaactgaggtacatctcggtcaccctcttagactcgacgatctgtattgggtacttagccaaagtcacattccgcgactcatgtcgacgacggcccgagataacctgctagttgaggagccattatggcttcgcaaattgagcattcccaagtaggtctgttttgtttcgttactactgatgcccctctccttgcgtgccagtaacaccagctattcaacggcggtacatcccctccacgatggccctgtttgcgctattcgagtgcctcttcgcgagcgccccttgacggcaccaactccttagtatgtatgtagtggggtaggtagttcataattcaagggcgtgtttgtccgcaagaaacttggtacactgtcagtaagatagtacatggtggtttagagtaacgacaagccagtgtaaaggcccatccatataagatatgagatcatctacctccatgccagtagatctggcccggagaccaccctcgaccatatctaaatgggcatttcttgccactgccattcctttctcaatatcttaatctgcttc

SEQ ID NO: 19691 - DNA, 2562 bp, Muscodor strobelii
  misc_feature: SGI cDNA ID NO. 566629
  misc_feature: Encodes the peptide sequence at SEQ ID NO 19692
atgcccaattcgcccgaggcgctgagcctcattgggcagcacagacatgccgggatggattctgggacacgaatattcataaggggtcttcccccaaacatcacagaaagtgaacttcagaaacactttagcgccaaaggtcaagtcaacgatgtcaaatgtatcccacacaggagaattggctatgttggctacaagactcctgaagatgcagccaatgctgtcaggtatttcaatcgcaccttcatccgcatgtccaagatacatgtcgagtttgccaagctgattggagatccttcactcgccaaaaatcaatctaataaacatggctccaatgatcatacctctgttgcttccaactccagatcctcagggctggctgcacaccagcaggagaagccagagtcacccagcaagaagcgcaaactggatgacctgaaagagtcggatcccaaactgcaagagttcttgagtgtcatgcagccatccaagaacactgccaaccagatacatggccatgcggctgaagccgttgaggaacaccccgccaagatcgctgccgttgctgctcatcccgatgactcgggcgacgatgactatcagtccatgcccgcaaggatacggaagaatgtttcaccacaatctagtacgagagcaccccaacgagatgctagccatcaatctgcttctgccatacacgatcaggagatgcaacccgtttctacagatgacgagggagaagaagtgcaggaagcggaagctataacccgttcagttgatgacaatgactggctccgtagtagaacaaatcgtctgctagatttggttgatgaagatgaacctgctcctccaatattagagacagaaatggtgcagtcaagcgttccgaaaccaaatcccgaacccgaggagatcaagaatgtggaggtacacgtgagccccacacccgaggacaggccagacccgacccaagataatctggacgcggttcgtaagagctcaagaatattcattcgcaatatgccctattcggcgactgcggaagatctcaggtcacattttgagcagtacggagaaatcgaagaggtacatgttccatcggacgcgtcaaaaagcaaccgcggaatggggtttgtgctattcaaagagcccgaggccgccgtccaagcattccagtcagatcgtacatcatttcagggtcgaatcatgcacattttgcccgcaactaagcgcaatcagcttgacgagttcgcactggctaagcttcctctgaagcagcagaatctcatcaagaagagaaatcaagctgcaacctctacttggtcttggaattcactctacatggcacaagacgctataaatacatcagttgccgatcgtctcgggatatccaagagcgaactgctggaccctacgagtactgatgctgccatcaaacaggcgatcgcggagacacaaaccatccatgacacgaaagcctacttcctggccaatggcgtcagtttggaggctttcaactcaaaacagcgtggtgacactgtgattcttgtaaaaaatcttgcctacacgaacaaggctgaagaaatcaggcgtctatttgaagaacatggtcgtgtgttaagagttttgctgcctcccacagggaccattgcgattgtgcaattctccaactcctccgatgcgaagcgtgcttttgccaagttagcttaccgtcggttgggttcccaacaactatttctagaaatggctccaaaaaatatctttcttgattcacaatccagtgaggctccgcccacagatgcagaaccagctgcggtcgcgaaggtatccacatctgatctgctcgatggtaacgatgcacaaacatctgctggagcggctaatctgttcattaaaaatctgtcgtgggatactgacacagcagagcttgcggctgccttccagcatcttgaagggttccgaggcgcattagtcaaaacgaagaaggaccccaaaaacactggccaaatgctgtctatgggctttgggtttgtctcgttcacaaacagcgactccgccgccgccgctactaaagtgatggatggtcatgtactacggggccataagctacaagtgagagcctcgcaccgcggtctagatgcggctgaggagaggaagaaaggtgatgcggccaacaaggccgccaagtccactcttctcattaagaatctagcattccaagcgaccaagaaggacgtgaaagcgctactaggctcatacggccaagtcagggccgtaagaatgcccaagaaattcaatcactcaggcagaggtttcgcattcgcagacttctcgtctccgaaggaagccgaaaatgccttgcgcgcactgggggatactcacttactgggaagaagacttataatacagtatgccgaagccgatgctgtcgacccggaagaggaaatcgccaagatgcagaagaaggtgggaggacaggtcaacaaggttgccctgcaggaactaacaggccgtggccggaagaagttcaacgtgggaggagacagggaagagggagagtga

SEQ ID NO: 19692 - protein, 853 aa, Muscodor strobelii
  misc_feature: SGI Peptide ID NO. 566629
  misc_feature (336)..(405): Pfam Id: PF00076 Pfam Desc: RNA recognition motif. (a.k.a. RRM, RBD, or RNP domain)
  misc_feature (629)..(705): Pfam Id: PF00076 Pfam Desc: RNA recognition motif. (a.k.a. RRM, RBD, or RNP domain)
  misc_feature (732)..(802): Pfam Id: PF00076 Pfam Desc: RNA recognition motif. (a.k.a. RRM, RBD, or RNP domain)
  misc_feature (25)..(90): Pfam Id: PF00076 Pfam Desc: RNA recognition motif. (a.k.a. RRM, RBD, or RNP domain)
  misc_feature (515)..(580): Pfam Id: PF00076 Pfam Desc: RNA recognition motif. (a.k.a. RRM, RBD, or RNP domain)
  misc_feature (21)..(853): NCBI GI: 256734716 Blast Desc: NECHADRAFT_30669 [Nectria haematococca mpVI 77-13-4]
  misc_feature (19)..(851): NCBI GI: 85116206 Blast Desc: NCU02611 [Neurospora crassa OR74A] gi|74696746|sp|Q7SG09.1|MRD1_NEUCR RecName: Full=Multiple RNA-binding domain-containing protein 1 conserved [Neurospora
  misc_feature (21)..(848): NCBI GI: 154296406 Blast Desc: BC1G_13029 [Botryotinia fuckeliana B05.10] gi|150843390|gb|EDN18583.1| BC1G_13029 [Botryotinia fuckeliana B05.10]
  misc_feature (21)..(848): NCBI GI: 156054690 Blast Desc: SS1G_06193 [Sclerotinia sclerotiorum 1980] gi|154703973|gb|EDO03712.1| SS1G_06193 [Sclerotinia sclerotiorum 1980]
  misc_feature (19)..(853): NCBI GI: 39950476 Blast Desc: MGG_01217 [Magnaporthe grisea 70-15] gi|145020982|gb|EDK05111.1| MGG_01217 [Magnaporthe grisea 70-15]
  misc_feature (23)..(842): NCBI GI: 116182074 Blast Desc: CHGG_01665 [Chaetomium globosum CBS 148.51] gi|88185962|gb|EAQ93430.1| CHGG_01665 [Chaetomium globosum CBS 148.51]
  misc_feature (23)..(847): NCBI GI: 169616726 Blast Desc: SNOG_11538 [Phaeosphaeria nodorum SN15] gi|111060126|gb|EAT81246.1| SNOG_11538 [Phaeosphaeria nodorum SN15]
  misc_feature (19)..(851): NCBI GI: 38567159 Blast Desc: related to MRD1 [Neurospora crassa]
  misc_feature (23)..(851): NCBI GI: 119496815 Blast Desc: pre-rRNA processing protein Mrd1, [Neosartorya fischeri NRRL 181] gi|119413343|gb|EAW23284.1| pre-rRNA processing protein Mrd1, [Neosartorya fischeri NRRL 181]
  misc_feature (23)..(847): NCBI GI: 189197515 Blast Desc: multiple RNA-binding domain containing protein 1 [Pyrenophora tritici-repentis Pt-1C-BFP] gi|187981043|gb|EDU47669.1| multiple RNA-binding domain protein 1
MPNSPEALSLIGQHRHAGMDSGTRIFIRGLPPNITESELQKHFSAKGQVNDVKCIPHRRIGYVGYKTPEDAANAVRYFNRTFIRMSKIHVEFAKLIGDPSLAKNQSNKHGSNDHTSVASNSRSSGLAAHQQEKPESPSKKRKLDDLKESDPKLQEFLSVMQPSKNTANQIHGHAAEAVEEHPAKIAAVAAHPDDSGDDDYQSMPARIRKNVSPQSSTRAPQRDASHQSASAIHDQEMQPVSTDDEGEEVQEAEAITRSVDDNDWLRSRTNRLLDLVDEDEPAPPILETEMVQSSVPKPNPEPEEIKNVEVHVSPTPEDRPDPTQDNLDAVRKSSRIFIRNMPYSATAEDLRSHFEQYGEIEEVHVPSDASKSNRGMGFVLFKEPEAAVQAFQSDRTSFQGRIMHILPATKRNQLDEFALAKLPLKQQNLIKKRNQAATSTWSWNSLYMAQDAINTSVADRLGISKSELLDPTSTDAAIKQAIAETQTIHDTKAYFLANGVSLEAFNSKQRGDTVILVKNLAYTNKAEEIRRLFEEHGRVLRVLLPPTGTIAIVQFSNSSDAKRAFAKLAYRRLGSQQLFLEMAPKNIFLDSQSSEAPPTDAEPAAVAKVSTSDLLDGNDAQTSAGAANLFIKNLSWDTDTAELAAAFQHLEGFRGALVKTKKDPKNTGQMLSMGFGFVSFTNSDSAAAATKVMDGHVLRGHKLQVRASHRGLDAAEERKKGDAANKAAKSTLLIKNLAFQATKKDVKALLGSYGQVRAVRMPKKFNHSGRGFAFADFSSPKEAENALRALGDTHLLGRRLIIQYAEADAVDPEEEIAKMQKKVGGQVNKVALQELTGRGRKKFNVGGDREEGE

SEQ ID NO: 19693 - DNA, 3355 bp, Muscodor strobelii; identical to SEQ ID NO: 19690
  misc_feature: SGI EST ID NO. CUFF.46211.1
  misc_feature: Variant of the nucleotide sequence at SEQ ID NO 19691

SEQ ID NO: 19694 - DNA, 303 bp, Muscodor strobelii
  misc_feature: SGI cDNA ID NO. 566630
  misc_feature: Encodes the peptide sequence at SEQ ID NO 19695
atggccgagtcaacctccccccctcccgccgcgcgcgagaagctcgaggcgcagatcaaatctgccgatatgactgaggacatgtcttcagaggctatcgacgttgctcaagaggccatgggcaagttcacgatcgagaaggacatcgcacagcacatcaagcgcacgttcgatgagcgcaagggccccacctggcactgcatcgtaggcagaaactttggaagcttcgtcactcatgagacgaagcacttcatctacttttacctcggccactgcgccattctgctcttcaagactcaataa

SEQ ID NO: 19695 - protein, 100 aa, Muscodor strobelii
  misc_feature: SGI Peptide ID NO. 566630
  misc_feature (12)..(100): Pfam Id: PF01221 Pfam Desc: Dynein light chain type 1
  misc_feature (9)..(100): NCBI GI: 171695430 Blast Desc: protein product [Podospora anserina] gi|170947957|emb|CAP60121.1| protein product [Podospora anserina]
  misc_feature (1)..(100): NCBI GI: 145613988 Blast Desc: MGG_01216 [Magnaporthe grisea 70-15] gi|145020983|gb|EDK05112.1| MGG_01216 [Magnaporthe grisea 70-15]
  misc_feature (12)..(100): NCBI GI: 225680708 Blast Desc: 8 kDa cytoplasmic dynein light chain [Paracoccidioides brasiliensis Pb03] gi|226282445|gb|EEH38011.1| dynein light chain [Paracoccidioides brasiliensis Pb01]
  misc_feature (12)..(100): NCBI GI: 154280342 Blast Desc: [Ajellomyces capsulatus NAm1] gi|150412927|gb|EDN08314.1| [Ajellomyces capsulatus NAm1] gi|225563036|gb|EEH11315.1| HCBG_00770 [Ajellomyces capsulatus
  misc_feature (12)..(100): NCBI GI: 261188228 Blast Desc: dynein light chain [Ajellomyces dermatitidis SLH14081] gi|239593277|gb|EEQ75858.1| dynein light chain [Ajellomyces dermatitidis SLH14081]
  misc_feature (1)..(100): NCBI GI: 119189733 Blast Desc: CIMG_04914 [Coccidioides immitis RS] gi|240111130|gb|EER29283.1| dynein light chain, cytoplasmic, [Coccidioides posadasii C735 delta SOWgp]
  misc_feature (12)..(100): NCBI GI: 145228997 Blast Desc: An01g03770 [Aspergillus niger] gi|134054903|emb|CAK36915.1| protein product [Aspergillus niger]
  misc_feature (12)..(100): NCBI GI: 119496813 Blast Desc: dynein light chain type 1, [Neosartorya fischeri NRRL 181] gi|121702821|ref|XP_001269675.1| dynein light chain type 1, [Aspergillus clavatus NRRL 1] gi|146322453|ref|XP_750234.2| light
  misc_feature (12)..(100): NCBI GI: 159130710 Blast Desc: dynein light chain type 1, [Aspergillus fumigatus A1163]
  misc_feature (8)..(100): NCBI GI: 156054692 Blast Desc: dynein light chain, cytoplasmic [Sclerotinia sclerotiorum 1980] gi|154703974|gb|EDO03713.1| dynein light chain, cytoplasmic [Sclerotinia sclerotiorum 1980]
MAESTSPPPAAREKLEAQIKSADMTEDMSSEAIDVAQEAMGKFTIEKDIAQHIKRTFDERKGPTWHCIVGRNFGSFVTHETKHFIYFYLGHCAILLFKTQ

SEQ ID NO: 19696 - DNA, 1267 bp, Muscodor strobelii
  misc_feature: SGI EST ID NO. CUFF.46176.0
  misc_feature: Variant of the nucleotide sequence at SEQ ID NO 19694
ccggaatacaacaccacctgctcgccgactcaggcacagacacacaccacatccaatccctcaggccgcccgccaacaacaacaacacagcgtccgtttgttgctttcgacctattattcctatatcttcatttcgacctgcctgtatcttaaactaagcatccccactcttcacctcagcgcgtcactcccgaatcaacgccatcatggccgagtcaacctccccccctcccgccgcgcgcgagaagctcgaggcgcagatcaaatctgccgatatgactgaggacatgtcttcagaggctatcgacgttggtatgcgactctcctccaccccgatcctatacttgcgcccgttctcaccaacaacttgcagctcaagaggccatgggcaagttcacgatcgagaaggacatcgcacagcacatcaagcgcacgttcgatgagcgcaagggccccacctggcactgcatcgtaggcagaaactttggaagcttcgtcactcatgagacgaagcacttcatctacttttacctcggccactgcgccattctgctcttcaagactcaataagctaatttaacttttgatccatcttgtttatacccaaactggccatccgatgtgtgttctcaagtcctcagccgccgtcacattggcccccgatctcggcatacgccaccagagagcatgcacaagcataagcacatgtctgtctacatgtacgacacgcacgaatgatagagaatgaaagagaatgagaataggcatctctgagagagtagagaaggagatcaatcgacccaaccatgtacccagatgtaggaacatcagagtccgactactggccacgatctggcaccgtagccaaataccaaaccctgtatatcaatcaatgagctcgaggcgctctcgaggaaaccaactcagacggagttccccaagcctactttccagtgcatctcataaggactccataccaaattcacatgaactccacgtgatctccaacatctcccaagtaatccacgactcggttgcacaagcccacggcctcgcggctaatgagcaagtaacaacgaactacgcaaccagctcgcagagtatttccccatatcctatccactcttgacgtaacgtctttgtaatagttcaaatcaccatttttgtaataactcaggaagcaaggggtattctcgcagtctagctagttaattaattacgcaagctgcatactcgacgtcctaggatcaaggatatagtcaatttc

SEQ ID NO: 19697 - DNA, 1413 bp, Muscodor strobelii
  misc_feature: SGI cDNA ID NO. 566631
  misc_feature: Reduced expression when VOC is produced
  misc_feature: Encodes the peptide sequence at SEQ ID NO 19698
atgtcgttcctcgagatccccgacgcgggcctgcagctggacagcccgcccagctcccgcaactacctgcccatgcaggcctttggcatcaccttgaacgacaacatgatcgaggagatgatccgaagcgtccagaagggcaacgacatcgagctgactctggggagctctccctcgttccagtgtggatcgatggaacaggatgtcacagtactcccagactcggtcaactatgacctgtacctcaccaatggagccaagacgcagcggctgcccaacactaccatgtcactcctcaagaagccacccactgctctgtcgaaccccgccaagcagaccaagaagcctcccaagcccgtcaagaacttcagccgtgcctcgtcttccggggtggactcggacgcagacacacggacgagttcgaattcccaaaggagcactactggatctaaattcggcaaaaacggcccaaagccccttcccgccggacgatcggcgatggcgagtgtattgtcgagcacaactgcgcgatccctaccttcgagccccggcctgaacggcgttgcctcccccaatcctgccttctccgcctcccaacagacattagaaaagaacagggggcaaagaacggctctggtccatgagctcgcagcaggggaccagccattcgagcacctgaaagatgtgtggagtggtgccgagtccgacctccaaggcgccgttgagaaggtggcaagcctggataaagcctcggacaaatggagcctgaagaagatctattggaaagagctggatgtctggaactatgcttacgacacctctgaagatcgacagtcggccatagataatgccatcagacagtacgacaagcaacgaattggcacatccgacccggtatgggagagactcttgcccaaggaagaaaggggcaagggcaagatcttgagcaagctgcaagccacgatcgccaagcagggcgccatccctcctgcacctaagatccaagttcagaaagcagaggaaggaaacaaaagcgatgctgattctgcaaagtccaagggagaagccatgtcgaggtccaactcacagccaaccagcaagcccaagaaagctgccgacacccagacaaaacgactactctccaacaagcccaagcccccaaagccgtcccctaaaaagtggaccgccaaggccaaggccgccgaggagagtaacaagaaacgggtgctgtcagaggaatttgtgtatgacacggatacaagtgaagacgaggcaccgctctctcaaagtacagcaagcgccccgaagccaaagccaaagccactgcccagaccagcggagaagccggtagaaaaggtggcagacaaggcaccaccaaacccaaggagccgcccgctccttctgctgccctga

SEQ ID NO: 19698 - protein, 470 aa, Muscodor strobelii
  misc_feature: SGI Peptide ID NO. 566631
  misc_feature (1)..(430): NCBI GI: 46108010 Blast Desc: FG00887.1 [Gibberella zeae PH-1] gi|193499285|gb|ACF18585.1| COM1 [Gibberella zeae]
  misc_feature (1)..(470): NCBI GI: 256735424 Blast Desc: NECHADRAFT_31795 [Nectria haematococca mpVI 77-13-4]
  misc_feature (4)..(430): NCBI GI: 145613992 Blast Desc: MGG_01215 [Magnaporthe grisea 70-15] gi|145020985|gb|EDK05114.1| MGG_01215 [Magnaporthe grisea 70-15]
  misc_feature (4)..(430): NCBI GI: 70997213 Blast Desc: COM1 [Magnaporthe grisea]
  misc_feature (4)..(448): NCBI GI: 85116197 Blast Desc: NCU02609 [Neurospora crassa OR74A] gi|28926812|gb|EAA35776.1| NCU02609 [Neurospora crassa OR74A] gi|38567161|emb|CAE76455.1| conserved [Neurospora crassa]
  misc_feature (3)..(437): NCBI GI: 171695428 Blast Desc: protein product [Podospora anserina] gi|170947956|emb|CAP60120.1| protein product [Podospora anserina]
  misc_feature (3)..(452): NCBI GI: 116182078 Blast Desc: CHGG_01667 [Chaetomium globosum CBS 148.51] gi|88185964|gb|EAQ93432.1| CHGG_01667 [Chaetomium globosum CBS 148.51]
  misc_feature (4)..(427): NCBI GI: 154296410 Blast Desc: BC1G_13031 [Botryotinia fuckeliana B05.10] gi|150843392|gb|EDN18585.1| BC1G_13031 [Botryotinia fuckeliana B05.10]
  misc_feature (212)..(382): NCBI GI: 261355230 Blast Desc: COM1 [Verticillium albo-atrum VaMs.102]
  misc_feature (4)..(298): NCBI GI: 156054696 Blast Desc: SS1G_06196 [Sclerotinia sclerotiorum 1980] gi|154703976|gb|EDO03715.1| SS1G_06196 [Sclerotinia sclerotiorum 1980]
  misc_feature: Useful for introducing or modulating the production of volatile compounds
MSFLEIPDAGLQLDSPPSSRNYLPMQAFGITLNDNMIEEMIRSVQKGNDIELTLGSSPSFQCGSMEQDVTVLPDSVNYDLYLTNGAKTQRLPNTTMSLLKKPPTALSNPAKQTKKPPKPVKNFSRASSSGVDSDADTRTSSNSQRSTTGSKFGKNGPKPLPAGRSAMASVLSSTTARSLPSSPGLNGVASPNPAFSASQQTLEKNRGQRTALVHELAAGDQPFEHLKDVWSGAESDLQGAVEKVASLDKASDKWSLKKIYWKELDVWNYAYDTSEDRQSAIDNAIRQYDKQRIGTSDPVWERLLPKEERGKGKILSKLQATIAKQGAIPPAPKIQVQKAEEGNKSDADSAKSKGEAMSRSNSQPTSKPKKAADTQTKRLLSNKPKPPKPSPKKWTAKAKAAEESNKKRVLSEEFVYDTDTSEDEAPLSQSTASAPKPKPKPLPRPAEKPVEKVADKAPPNPRSRPLLLLP

SEQ ID NO: 19699 - DNA, 3947 bp, Muscodor strobelii
  misc_feature: SGI EST ID NO. CUFF.46524.1
  misc_feature: Variant of the nucleotide sequence at SEQ ID NO 19697
cagtggttatcagtggtcatcagcggctttcaacaggcatcaatgagcaaaatgacacacaaagagcacaaagccgtgactggcgaggagtaccgggagtctacttcagctcgctctccaccgtctgccatcctccctctccatccgcgatccacacaccacccagcgccgtgcatcagagttccacccagcccagacaacgcccatccaactcatccgtcctcgcctctctccaaccagccagcccggggcagccactactgctgctgccaaccgtctgctgcctctctttgcctggccacttcaaacctcaaccttgacctccacctttctccttctcccacctcaccctcgccacgccagcgagcacgagcagagtcgaagctaggcagagtgacggagagagaccaagctgggcaaggtagtctgacctctactcgcttcctctctcccttggttaacatcttccaccaccaacacactccctctgcatccctcaaccactggccgttcctacgtgccacattatagctacttatcttatttaccattgccagttcgccgtattcgacgtacgcggctggccggtccctctctcccagcgtgggaagcttcaacacctccctcaagtccgagcacaatatgtgacgcagctgcatgagcatccaaccattcatcagttgggctctccacggtctggctaggtgcagactgcacagctgattactgattgctgctgtctcgcctcgaccacttcacataaacacataaaccctatctcgacaaccccggaaccgcccacgatgtcgttcctcgagatccccgacgcgggcctgcagctggacagcccgcccagctcccgcaactacctgcccatgcaggcctttggcatcaccttgaacgacaacatgatcgaggagatgatccgaagcgtccagaagggcaacgacatcgagctgactctggggagctctccctcgttccagtgtggatcgatggaacaggatgtcacagtactcccagactcggtcaactatgacctgtacctcaccaatggagccaagacgcagcggctgcccaacactaccatgtcactcctcaagaagccacccactgctctgtcgaaccccgccaagcagaccaagaagcctcccaagcccgtcaagaacttcagccgtgcctcgtcttccggggtggactcggacgcagacacacggacgagttcgaattcccaaaggagcactactgggtatggacagctctatacaatgctcacgtctggtgctaatgacatgcagatctaaattcggcaaaaacggcccaaagccccttcccgccggacgatcggcgatggcgagtgtattgtcgagcacaactgcgcgatccctaccttcgagccccggcctgaacggcgttgcctcccccaatcctgccttctccgcctcccaacagacattagaaaagaacagggggcaaagaacggctctggtccatgagctcgcagcaggggaccagccattcgagcacctgaaagatgtgtggagtggtgccgagtccgacctccaaggcgccgttgagaaggtggcaagcctggataaagcctcggacaaatggagcctgaagaagatctattggaaagagctggatgtctggaactatgcttacgacacctctgaagatcgacagtcggccatagataatgccatcagacagtacgacaagcaacgaattggcacatccgacccggtatgggagagactcttgcccaaggaagaaaggggcaagggcaagatcttgagcaagctgcaagccacgatcgccaagcagggcgccatccctcctgcacctaagatccaagttcagaaagcagaggaaggaaacaaaagcgatgctgattctgcaaagtccaagggagaagccatgtcgaggtccaactcacagccaaccagcaagcccaagaaagctgccgacacccagacaaaacgactactctccaacaagcccaagcccccaaagccgtcccctaaaaagtggaccgccaaggccaaggccgccgaggagagtaacaagaaacgggtgctgtcagaggaatttgtgtatgacacggatacaagtgaagacgaggcaccgctctctcaaagtacagcaagcgccccgaagccaaagccaaagccactgcccagaccagcggagaagccggtagaaaaggtggcagacaaggcaccaccaaacccaaggagccgcccgctccttctgctgccctgaaggcaaagccgaaacccgttgtcagagctccacgtgcgccgatcaaggcgcccgcgccccctcaagtcaccacagaagcgtcctcgcgaagaagatgagagcagctcaagctccggggctccattgagcaagcgcaacaagcccaaggagctgccgagacctctgccagaaaagacagtgaaacatcgtgcgtcggatgcgagccagcattctcgtggaaccagcggaacagtgtcttccaacttcaccatgaagagtaagaacacgtcgccaaccaaatcctcccctctcgccatatcgccaccgacgaatgcctccgatctcgaagaccgtgcctcgagccaaagaccgccgaaccactcgcagcagcgcccgtcccagcagccccgtgtggcagacagggctcgggatcgcgaacgcgagcgtgatcgcggactgcccaaaggctccaccaacggtacatccacttcgatgtccactacttcgtcagcgtcgtccaccgttgtggtcaagaaaagcaacaagcgtcccagggaaccggaacccgagcaagattcaccggagtcgacgccgaccccgcccgccaagaagcctcgtatttccaaggaggttctcgtgcttgcgcgtaaatttacccagttctatgaaaagtacgaggtacttcaccacgaggtcgctgcgatgaaggacccacccgacgataagatggctgatctgctcgagatgcgtggtcggttggtcaagatgaagagtgatatccagcaacgggccgtttcatccggggcttagctgggttcccctggatttcgacttcgttctccctgcgtttgtctctgggtcgcctcatgtggacaataggcttgtcaaattcgccgaacggacgtccgttcgcagacgtcactaataggagtcttcttagaagcatacatcacatcgagctgggaggatcaggatcttaaaataaccaaccgggcaaacgaattatatactatattccgatgcatttcttgttggttcctgagcatcggatctttgaaagcattttacgagcagaaagcaccccacgacgtggatcggggacgcggaatggaatctgattcgatgtttacttctatggcactttcgatatcctgacatggatttttacatctggaatgcgaccttggaaaatggacatgggtagagctgcgatctgtttagcgagctctcggtccgtaggtgaagcctgaggcaaggaggctcattcaactaccacccctgaagcgacagggttaattggagctgcaggagcggggctactgcgaggttagtagggactacttccacctcttctctcgtatactattacgattacgatctatctctggcatatgcagacggcattcgattcacaagcacatcggattagtttatcacacgcacactggacatttagcgggaaattcggagtcttgaattgtatttttgaggctttggtcatctatttgtactcagcgagcttgtttttggcatgtattgccttgtttgggataggagatcaaaaacaaaaagaatgattggcattgattggtatctgtgtacgatcgtttagagagatgagacagagaataaagtcatcacagagacagacagatatattatactatattcttacgtgttatatgctttcgtgccgaagtcgg

SEQ ID NO: 19700 - DNA, 540 bp, Muscodor strobelii
  misc_feature: SGI cDNA ID NO. 566632
  misc_feature: Reduced expression when VOC is produced
  misc_feature: Encodes the peptide sequence at SEQ ID NO 19701
atgaagagtaagaacacgtcgccaaccaaatcctcccctctcgccatatcgccaccgacgaatgcctccgatctcgaagaccgtgcctcgagccaaagaccgccgaaccactcgcagcagcgcccgtcccagcagccccgtgtggcagacagggctcgggatcgcgaacgcgagcgtgatcgcggactgcccaaaggctccaccaacggtacatccacttcgatgtccactacttcgtcagcgtcgtccaccgttgtggtcaagaaaagcaacaagcgtcccagggaaccggaacccgagcaagattcaccggagtcgacgccgaccccgcccgccaagaagcctcgtatttccaaggaggttctcgtgcttgcgcgtaaatttacccagttctatgaaaagtacgaggtacttcaccacgaggtcgctgcgatgaaggacccacccgacgataagatggctgatctgctcgagatgcgtggtcggttggtcaagatgaagagtgatatccagcaacgggccgtttcatccggggcttag

SEQ ID NO: 19701 - protein, 179 aa, Muscodor strobelii
  misc_feature: SGI Peptide ID NO. 566632
  misc_feature (3)..(170): NCBI GI: 261355230 Blast Desc: COM1 [Verticillium albo-atrum VaMs.102]
  misc_feature (2)..(170): NCBI GI: 145613992 Blast Desc: MGG_01215 [Magnaporthe grisea 70-15] gi|145020985|gb|EDK05114.1| MGG_01215 [Magnaporthe grisea 70-15]
  misc_feature (2)..(170): NCBI GI: 70997213 Blast Desc: COM1 [Magnaporthe grisea]
  misc_feature (116)..(170): NCBI GI: 256735424 Blast Desc: NECHADRAFT_31795 [Nectria haematococca mpVI 77-13-4]
  misc_feature (2)..(170): NCBI GI: 85116197 Blast Desc: NCU02609 [Neurospora crassa OR74A] gi|28926812|gb|EAA35776.1| NCU02609 [Neurospora crassa OR74A] gi|38567161|emb|CAE76455.1| conserved [Neurospora crassa]
  misc_feature (113)..(170): NCBI GI: 116182078 Blast Desc: CHGG_01667 [Chaetomium globosum CBS 148.51] gi|88185964|gb|EAQ93432.1| CHGG_01667 [Chaetomium globosum CBS 148.51]
  misc_feature (50)..(172): NCBI GI: 171695428 Blast Desc: protein product [Podospora anserina] gi|170947956|emb|CAP60120.1| protein product [Podospora anserina]
  misc_feature (3)..(170): NCBI GI: 240106104 Blast Desc: CPC735_056670 [Coccidioides posadasii C735 delta SOWgp]
  misc_feature (3)..(170): NCBI GI: 119192406 Blast Desc: CIMG_00580 [Coccidioides immitis RS]
  misc_feature (117)..(170): NCBI GI: 46108010 Blast Desc: FG00887.1 [Gibberella zeae PH-1] gi|193499285|gb|ACF18585.1| COM1 [Gibberella zeae]
  misc_feature: Useful for introducing or modulating the production of volatile compounds
MKSKNTSPTKSSPLAISPPTNASDLEDRASSQRPPNHSQQRPSQQPRVADRARDRERERDRGLPKGSTNGTSTSMSTTSSASSTVVVKKSNKRPREPEPEQDSPESTPTPPAKKPRISKEVLVLARKFTQFYEKYEVLHHEVAAMKDPPDDKMADLLEMRGRLVKMKSDIQQRAVSSGA

SEQ ID NO: 19702 - DNA, 3947 bp, Muscodor strobelii; identical to SEQ ID NO: 19699
  misc_feature: SGI EST ID NO. CUFF.46524.1
  misc_feature: Variant of the nucleotide sequence at SEQ ID NO 19700

SEQ ID NO: 19703 - DNA, 555 bp, Muscodor strobelii
  misc_feature: SGI cDNA ID NO. 566633
  misc_feature: Encodes the peptide sequence at SEQ ID NO 19704
atgatggcagagatgagagtatcactcgcggtgactcagttgagcgacaggatcaagcaaagtaacatattctggcatgattttcgggacgagtatgagaaggaagtcgcaaatattaagatttatgctggcgcagacatacttcaacagatatggcagaagaaagtcggtcaaaagaagaagcatgtcaactaccaagcaattggacttgagagttgcctacagtcagcccacaatgcagcgaagcttctggccgcaaatgaagactccgaagatattgacgagtacaattcacagcaaaattttctaggaaaagtgcgaagtgctggcgatgtcattgtcggattgaacaagctgtcatattcaagccaatctgcgtgtatggatttccagcagcaattagccgatttagatacacttgtgcaggcttctggctttctgaatcgtttcgacggacgatcatcacagcaatccatgaacggggacgaagccgatgccggagaccctaacgcggataccgaaggttaccagaactcgtttaccaatggcgattga

SEQ ID NO: 19704 - protein, 184 aa, Muscodor strobelii
  misc_feature: SGI Peptide ID NO. 566633
MMAEMRVSLAVTQLSDRIKQSNIFWHDFRDEYEKEVANIKIYAGADILQQIWQKKVGQKKKHVNYQAIGLESCLQSAHNAAKLLAANEDSEDIDEYNSQQNFLGKVRSAGDVIVGLNKLSYSSQSACMDFQQQLADLDTLVQASGFLNRFDGRSSQQSMNGDEADAGDPNADTEGYQNSFTNGD

SEQ ID NO: 19705 - DNA, 1619 bp, Muscodor strobelii
  misc_feature: SGI EST ID NO. CUFF.46092.0
  misc_feature: Variant of the nucleotide sequence at SEQ ID NO 19703
cagctcgcctgcatgtttggtagtttgtgcagagcatagtgatctaatgtcggtaattggtccgctaggtccctttgccttcgtatgcttgccctgtcaaacaatgctgcaaaggcacaactttgcagtatgcagagtcacgttgctgccttgacgggttacctgcatcttgcacctctggaagatggtccttccgaaataaaggtacagacagctctataataattatttaatgtcacaaggcctaaggtgatatcgacgatccttcgtggtcggtcgccaaacacttcaacaaccgaatgctactgtcatttggcgatcactagtactcgcaatgtcaaaacctccacatcagccgtttttcgtgcatccatatgcccaccatgcccaaagttcaagcccaggctcttcccgacgggactggagacgccatacattagcaactaccaattctgagtctcggatgatggcagagatgagagtatcactcgcggtgactcagttgagcgacaggatcaagcaaagtaacatattctggcatgattttcgggacgagtatgagaaggaagtcgcaaatattaagatttatgctggcgcagacatacttcaacagatatggcagaagaaagtcggtcaaaagaagaagcatgtcaactaccaagcaattggacttgagagttgcctacagtcagcccacaatgcagcgaagcttctggccgcaaatgaagactccgaagatattgacgagtacaattcacagcaaaattttctaggaaaagtgcgaagtgctggcgatgtcattgtcggattgaacaagctgtcatattcaagccaatctgcgtgtatggatttccagcagcaattagccgatttagatacacttgtgcaggcttctggctttctgaatcgtttcgacggacgatcatcacagcaatccatgaacggggacgaagccgatgccggagaccctaacgcggataccgaaggttaccagaactcgtttaccaatggcgattgaggtggaaagattactagatgcaatgaaaagtgagaaggactccaggtttgtgacgaagagcgtgggcgcagtagtgagatgtgagaatcttatccatgggaatgggcagccgtgagccgtgagccgtgagacgttcttgttagtagtatcctagactgacagaaatgtttccactatcacatgacgtacctgagagaaaaaattggtgaagcatcgtccccatcagagtgatcggaattgaattctcttgaataagaggctgtgtatcgcacttaagtgaatgccgcacaagcttcatgacgactctcccataggaaccatcctcatccatcgtctccttgcggatatacatggagggcggtcctgcgtttctgatgccaatcatacgcgcgacgtggcgcgaggtcctcacggacagatctgtgggaatccccacgcgagggaaggcacagataagattgaagcgtactccgaatttctcacgggcaaagaagtgcgcagctcgagctccgaagaacacgagcgtagcgcgaacagctacgacgagcgaagccattccgtgtgtagcccagaaacacagccttgatgaggacgatgcttg

SEQ ID NO: 19706 - DNA, 1026 bp, Muscodor strobelii
  misc_feature: SGI cDNA ID NO. 566634
  misc_feature: Encodes the peptide sequence at SEQ ID NO 19707
atgactgcaacatgcgttgacacagctgacttcccacaggttgggcagagaccaagttatgaagacttgatgaactgcttagaaaagcttcacctccaacctccaatttggaattctacggcctcggaacagacaacccatgaaaactacgaaagtagtgctcgcaatcggcgtgaaatcacatcatacctgtccagtatcgtgagcagtggcctctcctggatatactgcgacgatcagaaagagagactttgggatgaggccagtcgttgcctttcagagcgttgtggacgagcggggatgggcgagatcaatagggtatggccatttgagaagaggaaaaaggctttccaactcattgttcgagaacctcctattaccggcgattcgctaggacacaagacatggtgctcttcatatattatggctcagctgctcgacaacatcgcgactgggccactctcccatcttctgggcttgacttgtgcaaggcctgctaaggttttggagctcggctcaggcacaggacttttagggatggctgccgcagccatgtggcaaactgaagttgtgctcagtgaccttcccataattatgaccaatttggacttcaatattgagcagaacaaggagacagtcgagggtatgggtgggcggatgtcatctggcgctcttacgtggggcactgacaatgggaatgacacaatgttcctgcaccggaatcagttcgatgtaatccttgcagcggatggcatctacgacgatgatcacccggctcttctatctgccgcgattcagagccacatgcttcacagtccgaattcaagagccctggttatgacaccgttacgagaccaaatcacaagggatctgattgctcagttccggctggaaatgggtagtggcggcatacctttgaccgttctagaagaacacacagtggccggacaagatgattggggggagcacggaagtgcggcagttgaatgctggtacggcattttcggaagcagccaatctcgttga

SEQ ID NO: 19707 - protein, 341 aa, Muscodor strobelii
  misc_feature: SGI Peptide ID NO. 566634
  misc_feature (10)..(340): NCBI GI: 116182084 Blast Desc: CHGG_01670 [Chaetomium globosum CBS 148.51] gi|88185967|gb|EAQ93435.1| CHGG_01670 [Chaetomium globosum CBS 148.51]
  misc_feature (10)..(335): NCBI GI: 38567162 Blast Desc: conserved [Neurospora crassa]
  misc_feature (6)..(336): NCBI GI: 46108012 Blast Desc: FG00888.1 [Gibberella zeae PH-1]
  misc_feature (1)..(337): NCBI GI: 39950407 Blast Desc: MGG_01212 [Magnaporthe grisea 70-15] gi|145020988|gb|EDK05117.1| MGG_01212 [Magnaporthe grisea 70-15]
  misc_feature (10)..(311): NCBI GI: 85116193 Blast Desc: NCU02608 [Neurospora crassa OR74A] gi|28926811|gb|EAA35775.1| [Neurospora crassa OR74A]
  misc_feature (6)..(335): NCBI GI: 256735423 Blast Desc: NECHADRAFT_98928 [Nectria haematococca mpVI 77-13-4]
  misc_feature (10)..(338): NCBI GI: 171695424 Blast Desc: protein product [Podospora anserina] gi|170947954|emb|CAP60118.1| protein product [Podospora anserina]
  misc_feature (6)..(340): NCBI GI: 261355228 Blast Desc: conserved [Verticillium albo-atrum VaMs.102]
  misc_feature (10)..(336): NCBI GI: 154282413 Blast Desc: [Ajellomyces capsulatus NAm1] gi|150410182|gb|EDN05570.1| [Ajellomyces capsulatus NAm1]
  misc_feature (10)..(336): NCBI GI: 255957053 Blast Desc: Pc21g23120 [Penicillium chrysogenum Wisconsin 54-1255] gi|211590990|emb|CAP97209.1| Pc21g23120 [Penicillium chrysogenum Wisconsin 54-1255]
MTATCVDTADFPQVGQRPSYEDLMNCLEKLHLQPPIWNSTASEQTTHENYESSARNRREITSYLSSIVSSGLSWIYCDDQKERLWDEASRCLSERCGRAGMGEINRVWPFEKRKKAFQLIVREPPITGDSLGHKTWCSSYIMAQLLDNIATGPLSHLLGLTCARPAKVLELGSGTGLLGMAAAAMWQTEVVLSDLPIIMTNLDFNIEQNKETVEGMGGRMSSGALTWGTDNGNDTMFLHRNQFDVILAADGIYDDDHPALLSAAIQSHMLHSPNSRALVMTPLRDQITRDLIAQFRLEMGSGGIPLTVLEEHTVAGQDDWGEHGSAAVECWYGIFGSSQSR

SEQ ID NO: 19708 - DNA, 1696 bp, Muscodor strobelii
  misc_feature: SGI EST ID NO. CUFF.46117.1
  misc_feature: Variant of the nucleotide sequence at SEQ ID NO 19706
gggctccagcgcatcagccgcagaaccctatcagggcagtcagtgtggggcatcgcaaggcagctgcccccaaggctaaagcccagggtgcccttagtgtcctccacattgttgctcactaccttacctcatgtacgtaggattagtaaaatgcaggcttcatcttcatcatggcgaacgagcaatttctagatcgtgtcggaaggaaggaacgggtctgctatgagcctctaatctagctctggattgaacgcttataatattgaagttatttgttcgatgctaaattgaggtcttgtttggactcggaattttagctactacggaaatcatgactgcaacatgcgttgacacagctgacttcccacaggttgggcagagaccaagttatgaagacttgatgaactgcttagaaaagcttcacctccaacctccaatttggaattctacggcctcggaacagacaacccatgaaaactacgaaagtagtgctcgcaatcggcgtgaaatcacatcatacctgtccagtatcgtgagcagtggcctctcctggatatactgcgacgatcagaaagagagactttgggatgaggccagtcgttgcctttcagagcgttgtggacgagcggggatgggcgagatcaatagggtatggccatttgagaagaggaaaaaggctttccaactcattgttcgagaacctcctattaccggcgattcgctaggacacaagacatggtgctcttcatatattatggctcagctgctcgacaacatcgcgactgggccactctcccatcttctgggcttgacttgtgcaaggcctgctaaggttttggagctcggctcaggcacaggacttttagggatggctgccgcagccatgtggcaaactgaagttgtgctcagtgaccttcccataattatgaccaatttggacttcaatattgagcagaacaaggagacagtcgagggtatgggtgggcggatgtcatctggcgctcttacgtggggcactgacaatgggaatgacacaatgttcctgcaccggaatcagttcgatgtaatccttgcagcggatggcatctacgacgatgatcacccggctcttctatctgccgcgattcagagccacatgcttcacagtccgaattcaagagccctggttatgacaccgttacgagaccaaatcacaagggatctgattgctcagttccggctggaaatgggtagtggcggcatacctttgaccgttctagaagaacacacagtggccggacaagatgattggggggagcacggaagtgcggcagttgaatgctggtacggcattttcggaagcagccaatctcgttgatcgtatcagacttgctttgcacgctgtgactgtctaggatgattctgattcataacataattgaaatttgaataagacttctggggctgtgttggtttgaagtgtcaatgaaggaagaacgattgagcctttcatctcatgcatgaggcaagcgtggaacatctttattttgacctcatggatcgatgcctcggtcccgaaaatgacaatcgagtttgaactaaatgctaaatgattcacggaacgggacttcggctgcttctcaggacccgacagagtcttgtaggtcgatccttccggacttaccacggaagcctttcctatctagctctgttattt

SEQ ID NO: 19709 - DNA, 711 bp, Muscodor strobelii
  misc_feature: SGI cDNA ID NO. 566635
  misc_feature: Encodes the peptide sequence at SEQ ID NO 19710
atggtgggcacaactaagtacacggatgagcagatcaacttcattcttgatcggacagtccgagagatcccgcgtggggagacgaataatgtgcatctccaagcggtggccgaattccaacggcggtataaccagccggatttcgggctgaaccaagtgcgatatgtgacggagcgatacggcactgatcctgcctacggaaaccgagccgcgaacatcgtcaagcgtcaaggcatcgccgctgatttctcacctcctcaacaacctaatcaatatcttgttgttgataccacaatggctggcggcaagagcaacgagtcctccaaacgtcgtgtcccggacacctacgtctcttgcagacgctgcgctggcaccggcatcgagccggccagtggcactcagcaaggctctggcatacagacggcacccagcgccaaacgccgtagaggggctgacaactcagagctggctcgtagtcaaagccagcaccccaccccaacgccgtcgtcgtatcttcaacctgctcaacctgcccagatgccctcccaatcgcccaccgacagccacatcgcgatgacgtatgccggagcaggccaaaaccctcccactccgttcggtggcaacatctcgcctcgcaacaataacaattatggtggaatgtctgctgacgacgcgtacatggctgatgcggcttctcgacccggctactag

SEQ ID NO: 19710 - protein, 236 aa, Muscodor strobelii
  misc_feature: SGI Peptide ID NO. 566635
MVGTTKYTDEQINFILDRTVREIPRGETNNVHLQAVAEFQRRYNQPDFGLNQVRYVTERYGTDPAYGNRAANIVKRQGIAADFSPPQQPNQYLVVDTTMAGGKSNESSKRRVPDTYVSCRRCAGTGIEPASGTQQGSGIQTAPSAKRRRGADNSELARSQSQHPTPTPSSYLQPAQPAQMPSQSPTDSHIAMTYAGAGQNPPTPFGGNISPRNNNNYGGMSADDAYMADAASRPGY

SEQ ID NO: 19711 - DNA, 416 bp, Muscodor strobelii
  misc_feature: SGI EST ID NO. CUFF.46108.0
  misc_feature: Variant of the nucleotide sequence at SEQ ID NO 19709
attccctaacacgacttctttgattttaagaaccgaatgttgcccaactcacagcagacttcgtgccaaggtaacctgcgagcgttcacccaagagctaccttgtgccacccttcacgacgaatttcaataacaataaagaggctgcgttgctattccccgtagctttgatagaagcgcagaaatattgcctggcatggtgggcacaactaagtacacggatgagcagatcaacttcattcttgatcggacagtccgagagatcccgcgtggggagacgaataatgtgcatctccaagcggtggccgaattccaacggcggtataaccagccggatttcgggctgaaccaagtgcgatatgtgacggagcgatacggcactgatcctgcctacggaaaccgagccgcgaacatcgt

SEQ ID NO: 19712 - DNA, 654 bp, Muscodor strobelii
  misc_feature: SGI cDNA ID NO. 566636
  misc_feature: Reduced expression when VOC is produced
  misc_feature: Encodes the peptide sequence at SEQ ID NO 19713
atgcccacttcgtcatcttctaacacgcctggcctgagcacacatgatcgcccgagcatgagttccggcctcagagcccctcatcccgctgccatgcacagtccccatcccctgcccgcgacttctagctctgcaagtcgtgctcaacttggtatgggttattcaccctccggtcgtcaaggtctccagcaacgtagcaacccaccccatgatcgctccaacctgacccatcatactacctacgaccagtcaacttctgctggttccaacacggctcctggcagttttgttccaccgtactacttcgctgaccaaggacgtctcgaccccaatatgcttcagctacccacgaaccgccaacctgccgacaataccttcggagcttccaatgctcaagatcaccttcccaccatgcccgaatatcaagactacagcgacggcagacacagtcacggatggtcagcgggccgcggcaattcaagctggtctcccaacaacgaagccattgaccccgctgtcctgacgaacaatggtaacaacaacgagaaccgcgctaccactaccctcgccgccgacaccccccctgtcacgtcccagagccagaccgttctcccgagcatcgagaaccctccccgcagcagcggcgcctcatga

SEQ ID NO: 19713 - protein, 217 aa, Muscodor strobelii
  misc_feature: SGI Peptide ID NO. 566636
  misc_feature: Useful for introducing or modulating the production of volatile compounds
MPTSSSSNTPGLSTHDRPSMSSGLRAPHPAAMHSPHPLPATSSSASRAQLGMGYSPSGRQGLQQRSNPPHDRSNLTHHTTYDQSTSAGSNTAPGSFVPPYYFADQGRLDPNMLQLPTNRQPADNTFGASNAQDHLPTMPEYQDYSDGRHSHGWSAGRGNSSWSPNNEAIDPAVLTNNGNNNENRATTTLAADTPPVTSQSQTVLPSIENPPRSSGAS

SEQ ID NO: 19714 - DNA, 1228 bp, Muscodor strobelii
  misc_feature: SGI EST ID NO. CUFF.46111.0
  misc_feature: Variant of the nucleotide sequence at SEQ ID NO 19712
cgctggcaccggcatcgagccggccagtggcactcagcaaggctctggcatacagacggcacccagcgccaaacgccgtagaggggctgacaactcagagctggctcgtagtcaaagccagcaccccaccccaacgccgtcgtcgtatcttcaacctgctcaacctgcccagatgccctcccaatcgcccaccgacagccacatcgcgatgacgtatgccggagcaggccaaaaccctcccactccgttcggtggcaacatctcgcctcgcaacaataacaattatggtggaatgtctgctgacgacgcgtacatggctgatgcggcttctcgacccggctactagaacttcctaggtcaagacactcaatctcccatgcccacttcgtcatcttctaacacgcctggcctgagcacacatgatcgcccgagcatgagttccggcctcagagcccctcatcccgctgccatgcacagtccccatcccctgcccgcgacttctagctctgcaagtcgtgctcaacttggtatgggttattcaccctccggtcgtcaaggtctccagcaacgtagcaacccaccccatgatcgctccaacctgacccatcatactacctacgaccagtcaacttctgctggttccaacacggctcctggcagttttgttccaccgtactacttcgctgaccaaggacgtctcgaccccaatatgcttcagctacccacgaaccgccaacctgccgacaataccttcggagcttccaatgctcaagatcaccttcccaccatgcccgaatatcaagactacagcgacggcagacacagtcacggatggtcagcgggccgcggcaattcaagctggtctcccaacaacgaagccattgaccccgctgtcctgacgaacaatggtaacaacaacgagaaccgcgctaccactaccctcgccgccgacaccccccctgtcacgtcccagagccagaccgttctcccgagcatcgagaaccctccccgcagcagcggcgcctcatgaggcaacgacgatagctaagacaagatcaattgctgagagaacgatgctatttcctttgttatacagagaagagataggtggatgacgcagaatcctggatctctgttcgccggatctcctaatcattttccttataaaattcagaaaagcgataaacaaattggtggatagtgtaggattataagacctaaggcgctg

SEQ ID NO: 19715 - DNA, 1524 bp, Muscodor strobelii
  misc_feature: SGI cDNA ID NO. 566637
  misc_feature: Encodes the peptide sequence at SEQ ID NO 19716
atgaccctaataagcctcccccgggagctgcgggatatcatatatgggtactacgttgtgctcgacggcggttacgtatatgatcataagtcgggcaagctaaaaccagcaggagacgggtcccattcccatctcatggccctccaggcaacctgcaggcaatttcgcgaggagatggatggccttgctcttaagctcaatagcatcaccttttcaaccgaatactcgcgcgagtcctcgacgagagcagcttccttcgatgtggtctgccgcgatattctggaagagaaatatcagctactatttgccggttccattggacacctcatcaacgatgctgtgaaacacgatgtgaggcgtcgttatccccagttcgtatttgtcttggaggaactggcccgtaactcgactctatcccgcataagtacctatagattcgagggttatgctcggtccatttgctctgagttcgtctcttatacgttgtgtcgtattgccgagggatctcccgacgcctttcctcgacctggactgctagagctatgtgatcaaagctgggctgcgccaacccaagacgaccttgcagttgaaaagctgtcaagagggggtattccggggggtattagtgaacgtaagcgacgtggaaattacagcaaatatcttgacgatcctgactacagcgggtaccagcggaaattctatttttccgcagctgctaccgcgatccgatttcttgagtcttttccagacatccggcctcacgtgagacgtgtcgtgcttgatgagaatcactgggccgtctcatttcccgagcaacatggtcgaggcttcctaccctttttgctcgaaaatccccgactttgcatagagcgacgcgtcaatctttggagtgcgatccttccatatacagatgcaagggcgtacaagcttgggagcatttcatattgggaacaccatttgagcgacgaggtcgggttggaacgtcgacatatccacggctccattgctctttgggtggtagaagccgcgacccttccggcaaccttctccctagtcatagatggccaatcagaccctcagcatagcgccgaggtatttcaaatagctgtgcgggaagcttcgcgacagatagccctaaatcgctcttttcatctaaaggatctccccagtgagaaaccatctagctgtatgccagcttggtacactgcgcgggatatagacgatatgtttgattcttacccccacataatgcaaagtatcgttgagcatacgtctccaaacattcgtgtcaacttcaaccccggcactttggcaaatgtcgaagagataatcaaagaacatcttgacaactccgcgttctctaggaaagactgggatttctggtattgcatggaaatggtgcatgagggggtgctttcacgctacaatcttctcggcgagccgattggcgcccgcacacaaggcaacgacggttcgggagtttacgaaggctatatcgtgcggtctaaagaccaccgcagatag

SEQ ID NO: 19716 - protein, 507 aa, Muscodor strobelii
  misc_feature: SGI Peptide ID NO. 566637
  misc_feature (2)..(446): NCBI GI: 256729016 Blast Desc: NECHADRAFT_79869 [Nectria haematococca mpVI 77-13-4]
  misc_feature (3)..(443): NCBI GI: 171682854 Blast Desc: protein product [Podospora anserina] gi|170941386|emb|CAP67036.1| protein product [Podospora anserina]
  misc_feature (4)..(449): NCBI GI: 189199968 Blast Desc: conserved [Pyrenophora tritici-repentis Pt-1C-BFP] gi|187983420|gb|EDU48908.1| conserved [Pyrenophora tritici-repentis Pt-1C-BFP]
  misc_feature (2)..(446): NCBI GI: 256728246 Blast Desc: NECHADRAFT_87838 [Nectria haematococca mpVI 77-13-4]
  misc_feature (3)..(377): NCBI GI: 169613873 Blast Desc: SNOG_10070 [Phaeosphaeria nodorum SN15] gi|111061285|gb|EAT82405.1| SNOG_10070 [Phaeosphaeria nodorum SN15]
  misc_feature (3)..(446): NCBI GI: 256721320 Blast Desc: NECHADRAFT_87025 [Nectria haematococca mpVI 77-13-4]
  misc_feature (3)..(395): NCBI GI: 189199878 Blast Desc: PTRG_05943 [Pyrenophora tritici-repentis Pt-1C-BFP] gi|187983375|gb|EDU48863.1| PTRG_05943 [Pyrenophora tritici-repentis Pt-1C-BFP]
  misc_feature (6)..(367): NCBI GI: 189191392 Blast Desc: [Pyrenophora tritici-repentis Pt-1C-BFP] gi|187973641|gb|EDU41140.1| [Pyrenophora tritici-repentis Pt-1C-BFP]
  misc_feature (2)..(136): NCBI GI: 169625447 Blast Desc: SNOG_15996 [Phaeosphaeria nodorum SN15] gi|111055455|gb|EAT76575.1| SNOG_15996 [Phaeosphaeria nodorum SN15]
  misc_feature (266)..(437): NCBI GI: 169625447 Blast Desc: SNOG_15996 [Phaeosphaeria nodorum SN15] gi|111055455|gb|EAT76575.1| SNOG_15996 [Phaeosphaeria nodorum SN15]
MTLISLPRELRDIIYGYYVVLDGGYVYDHKSGKLKPAGDGSHSHLMALQATCRQFREEMDGLALKLNSITFSTEYSRESSTRAASFDVVCRDILEEKYQLLFAGSIGHLINDAVKHDVRRRYPQFVFVLEELARNSTLSRISTYRFEGYARSICSEFVSYTLCRIAEGSPDAFPRPGLLELCDQSWAAPTQDDLAVEKLSRGGIPGGISERKRRGNYSKYLDDPDYSGYQRKFYFSAAATAIRFLESFPDIRPHVRRVVLDENHWAVSFPEQHGRGFLPFLLENPRLCIERRVNLWSAILPYTDARAYKLGSISYWEHHLSDEVGLERRHIHGSIALWVVEAATLPATFSLVIDGQSDPQHSAEVFQIAVREASRQIALNRSFHLKDLPSEKPSSCMPAWYTARDIDDMFDSYPHIMQSIVEHTSPNIRVNFNPGTLANVEEIIKEHLDNSAFSRKDWDFWYCMEMVHEGVLSRYNLLGEPIGARTQGNDGSGVYEGYIVRSKDHRR

SEQ ID NO: 19717 - DNA, 2928 bp, Muscodor strobelii
  misc_feature: SGI EST ID NO. CUFF.46230.0
  misc_feature: Variant of the nucleotide sequence at SEQ ID NO 19715
caagcattttgagtttgagtttcactaacagcggtaccaacatgtcccgttttggctcgccgaacccttcggactgagtcactgccaatagcaacgaaataaataccacgatttctaattccttttccctccccccctctcttattcctaccaggtcgtatcccaaatatcgcatcgcaccgcactttattgtcacagcttctctttgacttccactggaggtgcgtcttagttacagacgtaccaaaagccacagtgtgcactgtgaatgattacagtgtgagaccagcggctggaaatccattgcactccgaaggaatcgaccaaggaccagtcaggcgaacgacttcagcagccttggaacataccctttcgaatcctcacttacagattgggatcaatcatctgtgccgccatgaccctaataagcctcccccgggagctgcgggatatcatatatgggtactacgttgtgctcgacggcggttacgtatatgatcataagtcgggcaagctaaaaccagcaggagacgggtcccattcccatctcatggccctccaggcaacctgcaggcaatttcgcgaggagatggatggccttgctcttaagctcaatagcatcaccttttcaaccgaatactcgcgcgagtcctcgacgagagcagcttccttcgatgtggtctgccgcgatattctggaagagaaatatcagctactatttgccggttccattggacacctcatcaacgatgctgtgaaacacgatgtgaggcgtcgttatccccagttcgtatttgtcttggaggaactggcccgtaactcgactctatcccgcataagtacctatagattcgagggttatgctcggtccatttgctctgagttcgtctcttatacgttgtgtcgtattgccgagggatctcccgacgcctttcctcgacctggactgctagagctatgtgatcaaagctgggctgcgccaacccaagacgaccttgcagttgaaaagctgtcaagagggggtattccggggggtattagtgaacgtaagcgacgtggaaattacagcaaatatcttgacgatcctgactacagcgggtaccagcggaaattctatttttccgcagctgctaccgcgatccgatttcttgagtcttttccagacatccggcctcacgtgagacgtgtcgtgcttgatgagaatcactgggccgtctcatttcccgagcaacatggtcgaggcttcctaccctttttgctcgaaaatccccgactttgcatagagcgacgcgtcaatctttggagtgcgatccttccatatacagatgcaagggcgtacaagcttgggagcatttcatattgggaacaccatttgagcgacgaggtcgggttggaacgtcgacatatccacggctccattgctctttgggtggtagaagccgcgacccttccggcaaccttctccctagtcatagatggccaatcagaccctcagcatagcgccgaggtatttcaaatagctgtgcgggaagcttcgcgacagatagccctaaatcgctcttttcatctaaaggatctccccagtgagaaaccatctagctgtatgccagcttggtacactgcgcgggatatagacgatatgtttgattcttacccccacataatgcaaagtatcgttgagcatacgtctccaaacattcgtgtcaacttcaaccccggcactttggcaaatgtcgaagagataatcaaagaacatcttgacaactccgcgttctctaggaaagactgggatttctggtattgcatggaaatggtgcatgaggggtacgtcgtacctcgtccaccactgccttcgtgggaacaggtgaagaatgatcgtcgttgtccgctactcgcagacgactagtggcttcttgagacccttcttatgctatatttgtagctgtttagccttaccaaatccataatgttgcagccatagggtgctttcacgctacaatcttctcggcgagccgattggcgcccgcacacaaggcaacgacggttcgggagtttacgaaggctatatcgtgcggtctaaagaccaccgcagataggcggaaggtggaataggaacataagagaacacgggagataatacttttctaaataataacacgggcacctcaggtcatcgacatatctctcctcgtcatgcgctctctcctctaacaatagtcagtctcaattcttcacacaagcaaaaacttaccaccactttcaagtcgtcatcgtgccacatgctggaccactcccctcagtcaagtttttgcatacataccatttacaaccctggaagatttcaagtcacccgtaagccctacattgggcgaagatgcgactgatatcagaactacacggctggaataatttacccccatcgcctctaggcaaaggatcggttgggacgtattacagtcacgttgcatacatgcatgtgaaatggatggctattaattgatggaggagctacggagggcggaggttccgacgtacaggcctacatacagtggtgccatcggcgctagtgccagacattgctgatggtgcctaaggcaaccatctctttggggcaatgctcacgcgtcaaccaacaggaccagatattctgttcttcaggtgaggccacgtaccatttggcttgcagagaagaacacatagtagtaatatcccttgctgtcgcattatatttatttcagggcttgtgtggaccgaccatgtcatctttgccgaactcttatggcccgagtcccgattattgactctatcctatagttcaagggttacgaccacccagcactgaaacttgtcataataagtcttttggtttgattctagctctttctcggggttccagagggagtcaatgtcatacaagatgatacccgg

SEQ ID NO: 19718 - DNA, 525 bp, Muscodor strobelii
  misc_feature: SGI cDNA ID NO. 566638
  misc_feature: Encodes the peptide sequence at SEQ ID NO 19719
cgcctgcccttcaacaccgtctgcggcgagtacctcaacaactcggccggctgggtccatgccgtcgccttctcaccaaccggcgacgccctcgccttcgccgcccacgacagcagcatcaccgtcgtctaccccgccggcccagaccagcccccgcgcgccctcgtcagcctcaccacccagctactgcccttcatgagcatcgtgtgggccgccgacgaccagatcattgccgccggctacgactgcgaggccttccgctttaacggcgacgcagatggctggcatttaaccggcacactcgaggccaagggacggcccgggctcggcgacgccagggaagagtctgccctcaacatgttcaaacagatggatctcaagggcaaggtcaaagacgatacccagctaaagactactcaccagaacacaatcaccactctacgtgtatatcagggcaaccccggagctgtcaagagacttagcacaagcggtgtagatggaagagtcgttatatggaatatttaa

SEQ ID NO: 19719 - protein, 174 aa, Muscodor strobelii
  misc_feature: SGI Peptide ID NO. 566638
  misc_feature (1)..(174): NCBI GI: 171696034 Blast Desc: protein product [Podospora anserina] gi|170948259|emb|CAP60423.1| protein product [Podospora anserina]
  misc_feature (1)..(174): NCBI GI: 261357484 Blast Desc: ARP2/3 actin-organizing complex subunit Sop2 [Verticillium albo-atrum VaMs.102]
  misc_feature (1)..(174): NCBI GI: 145614718 Blast Desc: conserved [Magnaporthe grisea 70-15] gi|145021613|gb|EDK05742.1| conserved [Magnaporthe grisea 70-15]
  misc_feature (1)..(172): NCBI GI: 256734480 Blast Desc: [Nectria haematococca mpVI 77-13-4]
  misc_feature (1)..(173): NCBI GI: 156057557 Blast Desc: conserved [Sclerotinia sclerotiorum 1980] gi|154702295|gb|EDO02034.1| conserved [Sclerotinia sclerotiorum 1980]
  misc_feature (1)..(173): NCBI GI: 154323984 Blast Desc: actin related protein 2/3 complex subunit [Botryotinia fuckeliana B05.10] gi|150842620|gb|EDN17813.1| actin related protein 2/3 complex subunit [Botryotinia fuckeliana B05.10]
  misc_feature (1)..(173): NCBI GI: 46107454 Blast Desc: FG00610.1 [Gibberella zeae PH-1]
  misc_feature (1)..(174): NCBI GI: 189193693 Blast Desc: structural constituent of cytoskeleton [Pyrenophora tritici-repentis Pt-1C-BFP] gi|187978749|gb|EDU45375.1| structural constituent of cytoskeleton [Pyrenophora Pt-1C-BFP]
  misc_feature (1)..(173): NCBI GI: 85112110 Blast Desc: NCU02781 [Neurospora crassa OR74A] gi|28926051|gb|EAA35040.1| NCU02781 [Neurospora crassa OR74A]
  misc_feature (1)..(174): NCBI GI: 115400916 Blast Desc: ATEG_07425 [Aspergillus terreus NIH2624] gi|114189987|gb|EAU31687.1| ATEG_07425 [Aspergillus terreus NIH2624]
RLPFNTVCGEYLNNSAGWVHAVAFSPTGDALAFAAHDSSITVVYPAGPDQPPRALVSLTTQLLPFMSIVWAADDQIIAAGYDCEAFRFNGDADGWHLTGTLEAKGRPGLGDAREESALNMFKQMDLKGKVKDDTQLKTTHQNTITTLRVYQGNPGAVKRLSTSGVDGRVVIWNI

SEQ ID NO: 19720 - DNA, 587 bp, Muscodor strobelii
  misc_feature: SGI EST ID NO. CUFF.46138.0
  misc_feature: Variant of the nucleotide sequence at SEQ ID NO 19718
cgcctgcccttcaacaccgtctgcggcgagtacctcaacaactcggccggctgggtccatgccgtcgccttctcaccaaccggcgacgccctcgccttcgccgcccacgacagcagcatcaccgtcgtctaccccgccggcccagaccagcccccgcgcgccctcgtcagcctcaccacccagctactgcccttcatgagcatcgtgtgggccgccgacgaccagatcattgccgccggctacgactgcgaggccttccgctttaacggcgacgcagatggctggcatttaaccggcacactcgaggccaagggacggcccgggctcggcgacgccagggaagagtctgccctcaacatgttcaaacagatggatctcaagggcaaggtcaaagacgatacccagctaaagactactcaccagaacacaatcaccactctacgtgtatatcagggcaaccccggagctgtcaagagacttagcacaagcggtgtagatggaagagtcgttatatggaatatttaaatcttaaaatacgtagaaaaaataatataaactataaaataatatttgttttaatgtttatt

SEQ ID NO: 19721 - DNA, 1083 bp, Muscodor strobelii
  misc_feature: SGI cDNA ID NO. 566639
  misc_feature: Encodes the peptide sequence at SEQ ID NO 19722
atgggcttttggtcttcggtcaaaaacgggttgggccaagtgggaggcttcctcgtgaacaatgcgggtggtatactcacagtagccgaaacggtagccaaagtagccgcgttagctgtgctcgaagatgaccacctgtttgaagcagaagacgactctgagaacaacattatgcccaagttaaaccgcaatatcaacaaggcggacgaaatcatggctaaggaagcggctaagcgcttcaaggcaccaagtgacgacactaactcgtcaacttcgttcaccacgaccggcccgttcgatctcccggccctctggccatcgccccctgtcctcccaactggcggcgcggcgaaggtccccccgagcatgtcggccgatatcaataggtttctcgtcatgcaccacatccccactgtcgtcggcggcagcgatatcggacaaagcattgcgcagcagatgttttctaactttgaaaaacattttgtagttgacagcgtctcccagctcgcaggtgcaccaataagcgtcgagcagccaaacggtatttctataactgggggccacatttactacaggatccctatgggtaaccccggcggaaaccaatcgtggcactcatcgcttcgcctcttcttgaaaaagcccgacagcatgactaagtctatccgggaggaaaggaagaagtgcaccattccggcggtcatgagtaccgtcaagcctgaccaggcgtacaaccagactaccatctctgtgacgtggaatgggacgaaggacaccgatcaaatgaccagcgacgccgtgactgagttagtcaaggactcagctggcgacatcacccacgtcgcgcctccctacaaggacggcagcaagtacaagtatcaattcaagtcatcgaccgagactggtcctggtgaggtcatggcggccttctcgactgccctacacaacgttatttcacatgtgaatgatcctccacatggaacgattgctccacctgagaagaaaaacattctacctatgatgccacaactcaagatctcgcagatggcaacgctacttcccgccgccgagaaccaactataa

SEQ ID NO: 19722 - protein, 360 aa, Muscodor strobelii
  misc_feature: SGI Peptide ID NO. 566639
  misc_feature (1)..(228): NCBI GI: 67526055 Blast Desc: AN3485.2 [Aspergillus nidulans FGSC A4] gi|40739856|gb|EAA59046.1| AN3485.2 [Aspergillus nidulans FGSC A4] gi|259482003|tpe|CBF76058.1| TPA: conserved [Aspergillus FGSC
  misc_feature (1)..(210): NCBI GI: 171691306 Blast Desc: protein product [Podospora anserina] gi|170945601|emb|CAP71714.1| protein product [Podospora anserina]
MGFWSSVKNGLGQVGGFLVNNAGGILTVAETVAKVAALAVLEDDHLFEAEDDSENNIMPKLNRNINKADEIMAKEAAKRFKAPSDDTNSSTSFTTTGPFDLPALWPSPPVLPTGGAAKVPPSMSADINRFLVMHHIPTVVGGSDIGQSIAQQMFSNFEKHFVVDSVSQLAGAPISVEQPNGISITGGHIYYRIPMGNPGGNQSWHSSLRLFLKKPDSMTKSIREERKKCTIPAVMSTVKPDQAYNQTTISVTWNGTKDTDQMTSDAVTELVKDSAGDITHVAPPYKDGSKYKYQFKSSTETGPGEVMAAFSTALHNVISHVNDPPHGTIAPPEKKNILPMMPQLKISQMATLLPAAENQL

SEQ ID NO: 19723 - DNA, 1007 bp, Muscodor strobelii
  misc_feature: SGI EST ID NO. CUFF.46153.0
  misc_feature: Variant of the nucleotide sequence at SEQ ID NO 19721
ttctcgtcatgcaccacatccccactgtcgtcggcggcagcgatatcggacaaagcattgcgcagcagatgttttctaactttgaaaaacattttgtagttgacagcgtctcccagctcgcaggtgcaccaataagcgtcgagcagccaaacggtatttctataactgggggccacatttactacaggatccctatgggtaaccccggcggaaaccaatcgtggcactcatcgcttcgcctcttcttgaaaaagcccgacagcatgactaagtctatccgggaggaaaggaagaagtgcaccattccggcggtcatgagtaccgtcaagcctgaccaggcgtacaaccagactaccatctctgtgacgtggaatgggacgaaggacaccgatcaaatgaccagcgacgccgtgactgagttagtcaaggactcagctggcgacatcacccacgtcgcgcctccctacaaggacggcagcaagtacaagtatcaattcaagtcatcgaccgagactggtcctggtgaggtcatggcggccttctcgactgccctacacaacgttatttcacatgtgaatgatcctccacatggaacgattgctccacctgagaagaaaaacattctacctatgatgccacaactcaagatctcgcagatggcaacgctacttcccgccgccgagaaccaactataaagaaacaattcagatcgcggggttcggagactcttaccgagtgacgtacgcaggcaaggatcacaggtattgatgagaaggatggtcatttgcactaccttgaataagcatgacatcgtagtagagaacttggttggagcgttgggtttgtcgatacaacacgctcggaggattagggggaggacgtaagcctcgcgtgctgaacctcccgatacctctctgcagttatttatttagcaggtcctaggagaactaataatgatactttgattcaaaatacatgttctgatttcgagctgacttgacgcccgg

SEQ ID NO: 19724 - DNA, 951 bp, Muscodor strobelii
  misc_feature: SGI cDNA ID NO. 566640
  misc_feature: Encodes the peptide sequence at SEQ ID NO 19725
atggccgagtttgcgagtgccgtagtcggcctcgccgtctttggcgcctcagtcggaaatagtctctgcaaattgatcgacacggtaaaggatgctccaagcgagatcctcgcgctatctgacgaagtcaccgattttcgttcaattctttcacagctattagaagcacagaactcagaagagttcaagcatgaaatttgcattgatgatctggcggatgccgagagaaaaggtcggcaaattctcgaaagcgttgatagccttattcaagacgttctcaaaaaaaaccatagcaacacaaaaagtagtgccaagcaaggcctcgtaatatcgaaattggaagcgaaactcgatgcactcgcagagtctcagctctcgatgatcgagaagcaggaagagattcactcgagcggatctgccggcgaagcagacatagaaggagacaaagatggaatcaggaagctcttgaaatcgggcaaagcttcgctcaacgacgtggacgcttatggtctcgggttgctctaccacgctgtccactattgccgctcggcatcaggcatcgacaaggcaacagaaacttgcagacttctgttagacatgggggcacatgccgaatgggaagatgagataggcaacactgccattgataatctaattgacgagacgatagtctcattggcaatcaagactactcttcctcgtccccctgatatttctgacttcttccacatctcactcctgtttgatattccagcaaaaagcatctttgacagtcttgttgatgatcgtggtttctcaaccatacacgagatactgttgggattccggcgggactttggaagcttggctcagtatctatcaaatagccgtaagcaacagcacgtgattggcaatgttgacgctcatgactcatgtggtcgatctcccattgcttggattgtcgataattga

SEQ ID NO: 19725 - protein, 316 aa, Muscodor strobelii
  misc_feature: SGI Peptide ID NO. 566640
  misc_feature (145)..(312): NCBI GI: 238493777 Blast Desc: ankyrin repeat domain, [Aspergillus flavus NRRL3357] gi|220696619|gb|EED52961.1| ankyrin repeat domain, [Aspergillus flavus NRRL3357]
MAEFASAVVGLAVFGASVGNSLCKLIDTVKDAPSEILALSDEVTDFRSILSQLLEAQNSEEFKHEICIDDLADAERKGRQILESVDSLIQDVLKKNHSNTKSSAKQGLVISKLEAKLDALAESQLSMIEKQEEIHSSGSAGEADIEGDKDGIRKLLKSGKASLNDVDAYGLGLLYHAVHYCRSASGIDKATETCRLLLDMGAHAEWEDEIGNTAIDNLIDETIVSLAIKTTLPRPPDISDFFHISLLFDIPAKSIFDSLVDDRGFSTIHEILLGFRRDFGSLAQYLSNSRKQQHVIGNVDAHDSCGRSPIAWIVDN

SEQ ID NO: 19726 - DNA, 459 bp, Muscodor strobelii
  misc_feature: SGI cDNA ID NO. 566641
  misc_feature: Elevated expression when VOC is produced
  misc_feature: Encodes the peptide sequence at SEQ ID NO 19727
atgacatggatcaaaccaagctgggcttggatgatgtatcggtctggatacagttataaagataagaatcaaactcgcattctcgcacttcgtctgagacacgaagatttccacaatatcttgagacaagcgatcgtatcgaacaaccatggacctttgaaggaagatgagaaactcaagcttgtacgcgtacaatgggaccctgaacgagatattcgacttggtgttttaccttatagaagtatacagatcggacttaagggcgaagcttccaagaatctcgccgacatcatccttgatattgaagatgtaacgatgaaagcaagagctttgaaaagggcattgggtgagcaggaaatgaccgagagcgagctggcgaagcttggacttgtccctcaagagagtgtatataacacgccagaagacgtgaaaaattccctactgatgatcgattcataa

SEQ ID NO: 19727 - protein, 152 aa, Muscodor strobelii
  misc_feature: SGI Peptide ID NO. 566641
  misc_feature (1)..(149): NCBI GI: 170940179 Blast Desc: protein product [Podospora anserina]
  misc_feature (1)..(149): NCBI GI: 261357714 Blast Desc: conserved [Verticillium albo-atrum VaMs.102]
  misc_feature (1)..(147): NCBI GI: 256734497 Blast Desc: NECHADRAFT_74824 [Nectria haematococca mpVI 77-13-4]
  misc_feature (1)..(149): NCBI GI: 85068247 Blast Desc: NCU07285 [Neurospora crassa OR74A] gi|28923736|gb|EAA32903.1| conserved [Neurospora crassa OR74A]
  misc_feature (1)..(138): NCBI GI: 281203630 Blast Desc: PPL_09325 [Polysphondylium pallidum PN500]
  misc_feature (1)..(141): NCBI GI: 226327538 Blast Desc: PROPEN_01409 [Proteus penneri ATCC 35198] gi|225204064|gb|EEG86418.1| PROPEN_01409 [Proteus penneri ATCC 35198]
  misc_feature (1)..(147): NCBI GI: 260651517 Blast Desc: conserved [Streptomyces scabiei 87.22]
  misc_feature (1)..(143): NCBI GI: 258574383 Blast Desc: ATP-dependent RNA helicase DHX8 [Uncinocarpus reesii 1704] gi|237901639|gb|EEP76040.1| ATP-dependent RNA helicase DHX8 [Uncinocarpus reesii 1704]
  misc_feature (1)..(143): NCBI GI: 238837724 Blast Desc: conserved [Microsporum canis CBS 113480]
  misc_feature (1)..(138): NCBI GI: 197286762 Blast Desc: PMI2933 [Proteus mirabilis HI4320] gi|227355047|ref|ZP_03839458.1| conserved [Proteus mirabilis ATCC 29906] gi|194684249|emb|CAR45777.1| conserved [Proteus mirabilis
  misc_feature: Useful for introducing or modulating the production of volatile compounds
MTWIKPSWAWMMYRSGYSYKDKNQTRILALRLRHEDFHNILRQAIVSNNHGPLKEDEKLKLVRVQWDPERDIRLGVLPYRSIQIGLKGEASKNLADIILDIEDVTMKARALKRALGEQEMTESELAKLGLVPQESVYNTPEDVKNSLLMIDS

SEQ ID NO: 19728 - DNA, 1719 bp, Muscodor strobelii
  misc_feature: SGI EST ID NO. CUFF.46207.2
  misc_feature: Variant of the nucleotide sequence at SEQ ID NO 19726
aagttcgattaataggtgcaatatcaagctatatgtctcatatatcccttctttaacgtttcagtaaagcgaattggtgaatatgatagtgttatactgacagatctgccacggcgttccaaacagtgcgtgttgatgatggtaatgacacacccgcatgtctttattgacacagaatatcgaaaactacgaaagagacaattcaaaactcaatgtacatagacagcccacaaataaagagagtagaaaatcaataaacgtcaaagcaatggcgacatgaatgtatggggcgacgagcgcgatcggacatacttcatgacggttgtgccttgatcgcacggcttcccacgtactgcattgcaccctaactgaagaccatcgccgcatttccatatttatgtcatagatatcgtactaagtggcacgtttttggacgaatacatagatctatatatgcttcagctttggcataatggtagatgctcttcgggctaaggtgaaagtggctggggctgtgcaccggcgtgagtcaagtaggcgctgtaactagacgcaacatgcaaccaaggcaagaacgaatatatatgtaatacgaagcgtgatgtataagaaggcccttgttgaaaaaattggattgtcagtcgtaacaaacctaagcagacgcaagtggaggttgtttactctgtcaatcaaaagtccgaaattggaggatgtgaaatgggcggtttctttggtgtgctattggtttgaaactaggcttttattttttccatttccacagccatcacacaagccacaccgaggtcgaacccgacgtgacggggcgggtcacaagtcacaaattgcaatggcggagacacatgccgacggaatagcttccaaggttccgtttagacaaattcgcgctttatgtatttaccattctcccgtaatcgctactatttggttaaaggttgtctgataaggtagaagcaaaggcatctaggctaacgatcttgtgttgccaagatgacgaagacacaattacggtatatcaggcatattcggaacaaattgcctcagctgcagttgaagagcagagactgtctgcctcaccggctttcctaccaacgcgaatgacatggatcaaaccaagctgggcttggatgatgtatcggtctggatacagttataaagataagaatcaaactcgcattctcgcacttcgtctgagacacgaagatttccacaatatcttgagacaagcgatcgtatcgaacaaccatggacctttgaaggaagatgagaaactcaagcttgtacgcgtacaatgggaccctgaacgagatattcgacttggtgttttaccttatagaagtatacagatcggacttaagggcgaagcttccaagaatctcgccgacatcatccttgatattgaagatgtaacgatgaaagcaagagctttgaaaagggcattgggtgagcaggaaatgaccgagagcgagctggcgaagcttggacttgtccctcaagagagtgtatataacacgccagaagacgtgaaaaattccctactgatgatcgattcataatagcgctcgtagtgcaataggatatctctacaactcgcaatagacctgccttcctcgaacaatgctaagttccaattgacaattcgacctgcattctgtctcatagtgacgagtaccccttgtttctgagctggcaatattgcta

SEQ ID NO: 19729 - DNA, 939 bp, Muscodor strobelii
  misc_feature: SGI cDNA ID NO. 566642
  misc_feature: Elevated expression when VOC is produced
  misc_feature: Encodes the peptide sequence at SEQ ID NO 19730
atggctcgcaaaaatcctttcattgtggctgttactttgtcttctgctgcagctcttcttttctttctgacattttcatataatagtcagactgtacttaccagtgatttagaaatctggccgtctcccaggccggaagctttgtcattgacccatcaaccttttccgaagaagatatggcaaagctggaaagacgactccgaagatccaacaccacgaacaaatgggtttccacgtaaatggcgtacgcttaaccccgaccatcgatacgaacgtatcactgacgccaactctaacgattacgttgaagatcgtttctcccgaaatatatcccaaatcttccagaggctgggcgaccctatcttacgagccgacttcctccgctaccttgtgatggcccttgaaggaggactatgggcggacattgacgtgctacctcaccagccgatcgcgtcgtgggtcccagacatatataaaaacgccaccaatctagttgttggcatagaaaacgacaaacacaagaaccctatatggcctggatcaccctattccatccaactggcccaatatgtaatactagcaaaaccaaatcatcctgcattgctgaggctggtggaaagtgtttcccagaagctcgatcgtttcctagaagcagatgctaccccagccagggtgagcttttccgacgttatgtctatgacaggtcccttcgcgttcactgatgtcctgatggaatacttcacggaggtgactggaataaaacacaatggagatgagctagacggaatgcatgagcctatgctcatcggagatgtcctggtcttgcctatagacagttttgggtggctgccacaaaatcatgtccacgagctcggccatccttcgattctcatcgaacatctattcataggatcatggagagcaggacatccaggctga

SEQ ID NO: 19730 - protein, 312 aa, Muscodor strobelii
  misc_feature: SGI Peptide ID NO. 566642
  misc_feature (111)..(160): Pfam Id: PF04488 Pfam Desc: Glycosyltransferase sugar-binding region containing DXD motif
  misc_feature (4)..(312): NCBI GI: 256728859 Blast Desc: NECHADRAFT_123337 [Nectria haematococca mpVI 77-13-4]
  misc_feature (10)..(312): NCBI GI: 46130596 Blast Desc: FG08902.1 [Gibberella zeae PH-1]
  misc_feature (48)..(312): NCBI GI: 116179260 Blast Desc: CHGG_00258 [Chaetomium globosum CBS 148.51] gi|88184555|gb|EAQ92023.1| CHGG_00258 [Chaetomium globosum CBS 148.51]
  misc_feature (56)..(311): NCBI GI: 169598218 Blast Desc: SNOG_01908 [Phaeosphaeria nodorum SN15] gi|111069000|gb|EAT90120.1| SNOG_01908 [Phaeosphaeria nodorum SN15]
  misc_feature (55)..(310): NCBI GI: 226281852 Blast Desc: conserved [Paracoccidioides brasiliensis Pb01]
  misc_feature (55)..(310): NCBI GI: 225680411 Blast Desc: alpha-1,6-mannosyltransferase Och1 [Paracoccidioides brasiliensis Pb03] gi|226287810|gb|EEH43323.1| conserved [Paracoccidioides brasiliensis Pb18]
  misc_feature (12)..(311): NCBI GI: 159130267 Blast Desc: glycosyl transferase, [Aspergillus fumigatus A1163]
  misc_feature (12)..(311): NCBI GI: 70992859 Blast Desc: glycosyl transferase [Aspergillus fumigatus Af293] gi|66848911|gb|EAL89240.1| glycosyl transferase, [Aspergillus fumigatus Af293]
  misc_feature (45)..(310): NCBI GI: 256721487 Blast Desc: NECHADRAFT_106087 [Nectria haematococca mpVI 77-13-4]
  misc_feature (12)..(311): NCBI GI: 255953835 Blast Desc: Pc21g06250 [Penicillium chrysogenum Wisconsin 54-1255] gi|211589381|emb|CAP95522.1| Pc21g06250 [Penicillium chrysogenum Wisconsin 54-1255]
  misc_feature (52)..(307): SWISSPROT Homolog: EC 2.4.1.232 Initiation-specific alpha-1,6-mannosyltransferase
  misc_feature: Useful for introducing or modulating the production of volatile compounds
MARKNPFIVAVTLSSAAALLFFLTFSYNSQTVLTSDLEIWPSPRPEALSLTHQPFPKKIWQSWKDDSEDPTPRTNGFPRKWRTLNPDHRYERITDANSNDYVEDRFSRNISQIFQRLGDPILRADFLRYLVMALEGGLWADIDVLPHQPIASWVPDIYKNATNLVVGIENDKHKNPIWPGSPYSIQLAQYVILAKPNHPALLRLVESVSQKLDRFLEADATPARVSFSDVMSMTGPFAFTDVLMEYFTEVTGIKHNGDELDGMHEPMLIGDVLVLPIDSFGWLPQNHVHELGHPSILIEHLFIGSWRAGHPG

SEQ ID NO: 19731 - DNA, 1382 bp, Muscodor strobelii
  misc_feature: SGI EST ID NO. CUFF.46220.0
  misc_feature: Variant of the nucleotide sequence at SEQ ID NO 19729
ttcatgttctttcccaggccctgacagggtagaacagcagcttggcgcttcaccagccagctctatgctgtctattactgccccttgtctggtaagtctctggagtacatcaagagaagagcagccccttgcttgggatgatatacgtaagataggagaccagcctacgcatcatgacttgacaaaaacacatcatagtcacgatcagtccattcccagcgtaaggggaacgacacgacttatgatggctcgcaaaaatcctttcattgtggctgttactttgtcttctgctgcagctcttcttttctttctgacattttcatataatagtcagactgtacttaccagtgatttagaaatctggccgtctcccaggccggaagctttgtcattgacccatcaaccttttccgaagaagatatggcaaagctggaaagacgactccgaagatccaacaccacgaacaaatgggtttccacgtaaatggcgtacgcttaaccccgaccatcgatacgaacgtatcactgacgccaactctaacgattacgttgaagatcgtttctcccgaaatatatcccaaatcttccagaggctgggcgaccctatcttacgagccgacttcctccgctaccttgtgatggcccttgaaggaggactatgggcggacattgacgtgctacctcaccagccgatcgcgtcgtgggtcccagacatatataaaaacgccaccaatctagttgttggcatagaaaacgacaaacacaagaaccctatatggcctggatcaccctattccatccaactggcccaatatgtaatactagcaaaaccaaatcatcctgcattgctgaggctggtggaaagtgtttcccagaagctcgatcgtttcctagaagcagatgctaccccagccagggtgagcttttccgacgttatgtctatgacaggtcccttcgcgttcactgatgtcctgatggaatacttcacggaggtgactggaataaaacacaatggagatgagctagacggaatgcatgagcctatgctcatcggagatgtcctggtcttgcctatagacagttttgggtggctgccacaaaatcatgtccacgagctcggccatccttcgattctcatcgaacatctattcataggatcatggagagcaggacatccaggctgacaattggcatttcgtgattctcggtctgtctgctatactagagtcgtggtagatcacacgaattcgtgctagatttttgatgttagagaacgggcataaagtaatctacatccttttaggtatcatgttcatctcgaacttttgtgtctaggtgacgcgtatatgtttatactatgatcactactgttaatcaaatttc

SEQ ID NO: 19732 - DNA, 1425 bp, Muscodor strobelii
  misc_feature: SGI cDNA ID NO. 566643
  misc_feature: Reduced expression when VOC is produced
  misc_feature: Encodes the peptide sequence at SEQ ID NO 19733
atgaagcctttgggccgagtcacgtggcgattatgggattatgggagacagttggacctcttgtttgccgcttccggagaccttcgaaatgttgccaagtccatcgccgagctccctagcagttatagccaactgatcaatattacaatgaacgaccgcgatcttgatatcgtagcacgaaacgtcatcatgctactcattgccctcactgtcgacaacatcgatgaaacgatcgattgtataatccacgtatggtactcgtctctcattcgtaaatccgacctgagcatcgtccaacaaagggtccgtcccctcatcgaaaaagtctgcgaaaatatcaagaacaaaacgtccggtagccttgtgggaaagacatggatattcgggcaacgctctttgagggttgtgctggagaagtcatcgtgggatacacttttgtcactcacggacattccagaggacttaacggcagaacgggcgatgcaagttcgcactgccgtcacccttgctgaatcgagaaaggactatcgcgatagagctctgctttgtcaatcaccttctcatcgaattgcgaagaatcggttttggcaagatggactgttattaccatttgcatatgaccgccatgagtttcgagagccgaacccgactttcttccagactgccgacacctggctgatggctgacaaagccgaccctctcaatggatggtcttcgaaggaggtcgaagacagctcgagtgggcctgcgactgctgatatttacggcaagcttttttatcacgttcgcgcagtgcttcgagctttcatcactcgtctatgcagctcgcaggtctcatttcgactatttcagatggacgcgtctgatcttcacgatcatcttgagagcgggtcttttagtcgaatagaggttgccaacatttcggacggcgcatatcttggaccgcatcgcacaatcttcttgatgattcccttactccaggagcctctcgtcaacccacacgcgacactcatgactctgtttatgaatgctattgaagagaatatcaccgacaaagaccgacttgcggatatcactccacatagtacaacgacgaagcgccttctcaagtacttgccactcaagacgatgtcaattatgtctggcgatatttccgatcccgaaataatcaaattctcattcgctcgggatcttgttgcgacctacgacaacatcttcgatagattcgtgaagaatttcaagttatcagaagcagcggaagtgattggggcggcgatgaaagaaaaacatactgtcgtcgagaagtggccgttcaggttgaagctccgacctggtcagccgggagcccaggaggaattcgaccggcttttgcgtggaggtgtgtcaggaaaggagcgctatgtagagtggaagagaattgcatga

SEQ ID NO: 19733 - protein, 474 aa, Muscodor strobelii
  misc_feature: SGI Peptide ID NO. 566643
  misc_feature (13)..(473): NCBI GI: 238845993 Blast Desc: conserved [Microsporum canis CBS 113480]
  misc_feature (13)..(474): NCBI GI: 46110595 Blast Desc: FG02179.1 [Gibberella zeae PH-1]
  misc_feature (14)..(473): NCBI GI: 156056723 Blast Desc: SS1G_04092 [Sclerotinia sclerotiorum 1980] gi|154701878|gb|EDO01617.1| SS1G_04092 [Sclerotinia sclerotiorum 1980]
  misc_feature (95)..(473): NCBI GI: 145249076 Blast Desc: An14g02510 [Aspergillus niger] gi|134081552|emb|CAK41988.1| protein product [Aspergillus niger]
  misc_feature (13)..(473): NCBI GI: 154323824 Blast Desc: BC1G_00311 [Botryotinia fuckeliana B05.10] gi|150842540|gb|EDN17733.1| BC1G_00311 [Botryotinia fuckeliana B05.10]
  misc_feature (16)..(472): NCBI GI: 212535036 Blast Desc: conserved [Penicillium marneffei ATCC 18224] gi|210070073|gb|EEA24163.1| conserved [Penicillium marneffei ATCC 18224]
  misc_feature (14)..(473): NCBI GI: 256720860 Blast Desc: NECHADRAFT_49944 [Nectria haematococca mpVI 77-13-4]
  misc_feature (13)..(472): NCBI GI: 258570069 Blast Desc: [Uncinocarpus reesii 1704] gi|237904108|gb|EEP78509.1| [Uncinocarpus reesii 1704]
  misc_feature (16)..(473): NCBI GI: 242791874 Blast Desc: conserved [Talaromyces stipitatus ATCC 10500] gi|218718431|gb|EED17851.1| conserved [Talaromyces stipitatus ATCC 10500]
  misc_feature (16)..(472): NCBI GI: 240106688 Blast Desc: MYND finger family protein [Coccidioides posadasii C735 delta SOWgp]
  misc_feature: Useful for introducing or modulating the production of volatile compounds
MKPLGRVTWRLWDYGRQLDLLFAASGDLRNVAKSIAELPSSYSQLINITMNDRDLDIVARNVIMLLIALTVDNIDETIDCIIHVWYSSLIRKSDLSIVQQRVRPLIEKVCENIKNKTSGSLVGKTWIFGQRSLRVVLEKSSWDTLLSLTDIPEDLTAERAMQVRTAVTLAESRKDYRDRALLCQSPSHRIAKNRFWQDGLLLPFAYDRHEFREPNPTFFQTADTWLMADKADPLNGWSSKEVEDSSSGPATADIYGKLFYHVRAVLRAFITRLCSSQVSFRLFQMDASDLHDHLESGSFSRIEVANISDGAYLGPHRTIFLMIPLLQEPLVNPHATLMTLFMNAIEENITDKDRLADITPHSTTTKRLLKYLPLKTMSIMSGDISDPEIIKFSFARDLVATYDNIFDRFVKNFKLSEAAEVIGAAMKEKHTVVEKWPFRLKLRPGQPGAQEEFDRLLRGGVSGKERYVEWKRIA

SEQ ID NO: 19734 - DNA, 4067 bp, Muscodor strobelii
  misc_feature: SGI EST ID NO. CUFF.46490.1
  misc_feature: Variant of the nucleotide sequence at SEQ ID NO 19732
ttgaatttgattatacaattgtgaaggatgttgtttcttctttagagtggcctcgttctcaatactcatatttacagctagatggaggaatgaccaattatacctataagaaatgcggcgacctttatacttagctagcatattcgacccataatgaagcctttgggccgagtcacgtgagctcatcacaactttatgatgcatgcatgccttgtgcaagtaatccaataaatactcggtctccaccgagagcctgctccgtttgttagatggtaacagcttgacctccaggacttcaaaataacaaaatggtaacttcgcagttcatctgtgcaaactgaaaaccggatagcactgagtgcaaggcagtcggcgggtatagttgtgggaactgtcttctcgtggcttactgcagccaggactgtcaaaaatcccactggctcattcacaaggccgactgcaagtcgcctcttggcaaggcaacatggaagcccgactgggttctagagaaccgaaaaccggcattcgttagagaggggcggggtgtacggtttggggcaagtaaatacctttgggggaacattcctgcccttgacatcatacgtcttgagtcaaacgaaggtggcgattatgggattatgggagacagttggacctcttgtttgccggtacgtacatgccttcgctcaatattatcgacctccagaactaacgagaattatcacgcaatagcttccggagaccttcgaaatgttgccaagtccatcgccgagctccctagcagttatagccaactgatcaatattacaatgaacgaccgcgatcttgatatcgtagcacgaaacgtcatcatgctactcattgccctcactgtcgacaacatcgatgaaacgatcgattgtataatccacgtatggtactcgtctctcattcgtaaatccgacctgagcatcgtccaacaaagggtccgtcccctcatcgaaaaagtctgcgaaaatatcaagaacaaaacgtccggtagccttgtgggaaagacatggatattcgggcaacgctctttgagggttgtgctggagaagtcatcgtgggatacacttttgtcactcacggacattccagaggacttaacggcagaacgggcgatgcaagttcgcactgccgtcacccttgctgaatcgagaaaggactatcgcgatagagctctgctttgtcaatcaccttctcatcgaattgcgaagaatcggttttggcaagatggactgttattaccatttgcatatgaccgccatgagtttcgagagccgaacccgactttcttccagactgccgacacctggctgatggctgacaaagccgaccctctcaatggatggtcttcgaaggaggtcgaagacagctcgagtgggcctgcgactgctgatatttacggcaagcttttttatcacgttcgcgcagtgcttcgagctttcatcactcgtctatgcagctcgcaggtctcatttcgactatttcagatggacgcgtctgatcttcacgatcatcttgagagcgggtcttttagtcgaatagaggttgccaacatttcggacggcgcatatcttggaccgcatcgcacaatcttcttgatgattcccttactccaggagcctctcgtcaacccacacgcgacactcatgactctgtttatgaatgctattgaagagaatatcaccgacaaagaccgacttgcggatatcactccacatagtacaacgacgaagcgccttctcaagtacttgccactcaagacgatgtcaattatgtctggcgatatttccgatcccgaaataatcaaattctcattcgctcgggatcttgttgcgacctacgacaacatcttcgatagattcgtgaagaatttcaagttatcagaagcagcggaagtgattggggcggcgatgaaagaaaaacatactgtcgtcgagaagtggccgttcaggttgaagctccgacctggtcagccgggagcccaggaggaattcgaccggcttttgcgtggaggtgtgtcaggaaaggagcgctatgtagagtggaagagaattgcatgatgttttgctaactagacaaaaatgatggactaaagctcggtttgcctcgaggaaccgtagcatagttgttaggaatcaataacgaaacaagacacattgggaagacctagtaacaatataagagcagtattgacaatttgcccatcctctatttttttcgactacatcgttgcattaagggagggtgatgtcgttgggaaggcctgtagctgcgtacgcagatgcaccgtcaacaatataaggttttcaacagtacataaatcaacaataatcgcctcattcaatagtccgaacgataagagccgtcaactgaagccgcgcaaagttacggcgaacgttcagtgcattgtcaactcggatgactgccccactgacgcgacgatcatgttcagcgatagcttggtcatacctccgtagagcgaagcgcctgcatatatgtttgttacatgtagccacctttgcaggacgtcgcacatcgtggcaaaatgcaagcacatggccgtgtttgtaacagtatcacaccgatctgcatgacctcaagtgactgtggagcggcatgttctcagacctcggattatttgggaattagcgttcctttggctttgttcgctcggataatatcaatcaacgcctcaaattcgagcatgtccctacctccatgaaattgctccataatggcttcatgggatggccatcgatccccgtatttatccgtcatcgtcgcatacaagaaaagtctcttctccgaatggtcagccaagtcaacccttatccttgcaacctcctccgtctcgtccttatcagattcgtcgtccttcttgtcgggatacttgttgagttgccactctcgaaaggtcagcggcggtgtactgtcattagtgacttgaaaatccatccatcgcggattggacttccgtatggcgatgaaaaaattggcccatgtaagtcgaatttcaggatattcgacggatgcaaagcattcatgcagtgtgacagtctttagcgtttcgtgcttggacaggagaaattctaccagctgtggacaaatcaccgcatactcgaggttcagatcttgcagtctagcgaagcagtccggtcgtaaggacatagtatcttccggcccctccaaatttgctgtccaattagagccatatggtccatgctcgtagcaggacactcgtgcctttgtcgtgttctctaggtggcgaaagaaataagcatccatgtgttgtacgaagtacatgtaaccgttcagggtgccgcactcccagcctgcgccattgccactgccccagatagagatgtcgcaagtctcaatttgtgatagaaattggtcccactgcggtgtgaaccatgacgatagtgcttttggaatgagatccttcacggtcagcgaggtgatgtttgtattttccgaaacgctcgcccatgtctcagccatcactcttcgccacgagaactctgcttcagactcgtcgatcatgtctctgctagtctcttcaacagtaaaaacgtacatcgatgcaccatcgctaagatcgtctcgactatcccaaattccgtcatcccgaccatcaaaatcgaaggtaaaatgaacaattaggctagtcatgtgtggaaggtgctgtccacgaagtagttcagctgctgcgagaggaagaactggtcctggctcatcctctggctctccgctgtcctgactcaacttcggatggcctgttccgtggaacgacagtgctcgcacattaccaccgatcttctctgcgagggcgaggacctcatttgcttcgcattcatcgctcgtgagcttcaaggtgcgaaacacgatcggcagaagatgagtgcgacaattagaatttgttgcacttaaagtgaggcgtccgtcgaagtctgtatagtcaacaatgcgaagaaagagctcgaatgcaagcgactcgagaatgcttcgtgagcctctcgttgttggggccatggttttat

SEQ ID NO: 19735 - DNA, 1398 bp, Muscodor strobelii
  misc_feature: SGI cDNA ID NO. 566644
  misc_feature: Reduced expression when VOC is produced
  misc_feature: Encodes the peptide sequence at SEQ ID NO 19736
atggccccaacaacgagaggctcacgaagcattctcgagtcgcttgcattcgagctctttcttcgcattgttgactatacagacttcgacggacgcctcactttaagtgcaacaaattctaattgtcgcactcatcttctgccgatcgtgtttcgcaccttgaagctcacgagcgatgaatgcgaagcaaatgaggtcctcgccctcgcagagaagatcggtggtaatgtgcgagcactgtcgttccacggaacaggccatccgaagttgagtcaggacagcggagagccagaggatgagccaggaccagttcttcctctcgcagcagctgaactacttcgtggacagcaccttccacacatgactagcctaattgttcattttaccttcgattttgatggtcgggatgacggaatttgggatagtcgagacgatcttagcgatggtgcatcgatgtacgtttttactgttgaagagactagcagagacatgatcgacgagtctgaagcagagttctcgtggcgaagagtgatggctgagacatgggcgagcgtttcggaaaatacaaacatcacctcgctgaccgtgaaggatctcattccaaaagcactatcgtcatggttcacaccgcagtgggaccaatttctatcacaaattgagacttgcgacatctctatctggggcagtggcaatggcgcaggctgggagtgcggcaccctgaacggttacatgtacttcgtacaacacatggatgcttatttctttcgccacctagagaacacgacaaaggcacgagtgtcctgctacgagcatggaccatatggctctaattggacagcaaatttggaggggccggaagatactatgtccttacgaccggactgcttcgctagactgcaagatctgaacctcgagtatgcggtgatttgtccacagctggtagaatttctcctgtccaagcacgaaacgctaaagactgtcacactgcatgaatgctttgcatccgtcgaatatcctgaaattcgacttacatgggccaattttttcatcgccatacggaagtccaatccgcgatggatggattttcaagtcactaatgacagtacaccgccgctgacctttcgagagtggcaactcaacaagtatcccgacaagaaggacgacgaatctgataaggacgagacggaggaggttgcaaggataagggttgacttggctgaccattcggagaagagacttttcttgtatgcgacgatgacggataaatacggggatcgatggccatcccatgaagccattatggagcaatttcatggaggtagggacatgctcgaatttgaggcgttgattgatattatccgagcgaacaaagccaaaggaacgctaattcccaaataa

SEQ ID NO: 19736 - protein, 465 aa, Muscodor strobelii
  misc_feature: SGI Peptide ID NO. 566644
  misc_feature (12)..(459): NCBI GI: 46115846 Blast Desc: FG03765.1 [Gibberella zeae PH-1]
  misc_feature (12)..(461): NCBI GI: 256730173 Blast Desc: NECHADRAFT_45286 [Nectria haematococca mpVI 77-13-4]
  misc_feature (33)..(463): NCBI GI: 169785861 Blast Desc: [Aspergillus oryzae RIB40] gi|83776139|dbj|BAE66258.1| protein product [Aspergillus oryzae]
  misc_feature (33)..(463): NCBI GI: 238506767 Blast Desc: conserved [Aspergillus flavus NRRL3357] gi|220689298|gb|EED45649.1| conserved [Aspergillus flavus NRRL3357]
  misc_feature (34)..(459): NCBI GI: 261195224 Blast Desc: [Ajellomyces dermatitidis SLH14081] gi|239587888|gb|EEQ70531.1| [Ajellomyces dermatitidis SLH14081]
  misc_feature (10)..(450): NCBI GI: 145611648 Blast Desc: [Magnaporthe grisea 70-15] gi|145018906|gb|EDK03185.1| [Magnaporthe grisea 70-15]
  misc_feature (34)..(459): NCBI GI: 239610623 Blast Desc: [Ajellomyces dermatitidis ER-3]
  misc_feature (111)..(327): NCBI GI: 169618187 Blast Desc: SNOG_12282 [Phaeosphaeria nodorum SN15] gi|111058975|gb|EAT80095.1| SNOG_12282 [Phaeosphaeria nodorum SN15]
  misc_feature (231)..(456): NCBI GI: 238495686 Blast Desc: conserved [Aspergillus flavus NRRL3357] gi|220695729|gb|EED52072.1| conserved [Aspergillus flavus NRRL3357]
  misc_feature (22)..(459): NCBI GI: 154280637 Blast Desc: [Ajellomyces capsulatus NAm1] gi|150411310|gb|EDN06698.1| [Ajellomyces capsulatus NAm1]
  misc_feature: Useful for introducing or modulating the production of volatile compounds
MAPTTRGSRSILESLAFELFLRIVDYTDFDGRLTLSATNSNCRTHLLPIVFRTLKLTSDECEANEVLALAEKIGGNVRALSFHGTGHPKLSQDSGEPEDEPGPVLPLAAAELLRGQHLPHMTSLIVHFTFDFDGRDDGIWDSRDDLSDGASMYVFTVEETSRDMIDESEAEFSWRRVMAETWASVSENTNITSLTVKDLIPKALSSWFTPQWDQFLSQIETCDISIWGSGNGAGWECGTLNGYMYFVQHMDAYFFRHLENTTKARVSCYEHGPYGSNWTANLEGPEDTMSLRPDCFARLQDLNLEYAVICPQLVEFLLSKHETLKTVTLHECFASVEYPEIRLTWANFFIAIRKSNPRWMDFQVTNDSTPPLTFREWQLNKYPDKKDDESDKDETEEVARIRVDLADHSEKRLFLYATMTDKYGDRWPSHEAIMEQFHGGRDMLEFEALIDIIRANKAKGTLIPK

SEQ ID NO: 19737 - DNA, 1599 bp, Muscodor strobelii
  misc_feature: SGI cDNA ID NO. 566645
  misc_feature: Elevated expression when VOC is produced
  misc_feature: Encodes the peptide sequence at SEQ ID NO 19738
atggaggacaaagcttcgccatcttcgagtgttcatgcatatgggtatgaaacttccgtcacggcgccaatatctcgcgatgacgctaccctacgccaattaggaaagaagcctgtcctcaaacgaagttttggattcatcaccattcttgggctaagctgcactatcctcataacatgggaagccgtgttatttgttttcctctccggctacacaaatgggggaccggcaggtcttgtatacggctacctcgtcgcatggtttggaatgatctccatcttcctaacactgtcagaaatggtctcaatggcgcctacttcaggcggccagtatcactgggtttccattctatcaccaccgggatgtcaaaaattcctaggctacatcacaggctggctgcagttgactggatggcaagctatcatctcttcctcggggttgttgactggcacattaattcaaagtctcatcctacttacgcatccggggtacggtgagcatatgaggaactggcacggcactttgatcagctgggctgtcattcttctaaactttggaatcaacgcctcttttagcacggtcttcgcgaaattcgaggggttcgcattcatcttccatattcttggcttctttgcggtgttattgccacttgtactacttggtggccctgcggatgcaaaggatgtattccaaacatttctgaacggaggagattggcagacgcaaggtctttcattgagcataggaatatctgggacggtgttcgctctgctcggtggagatggcgcaattcatatggcagaagagatccgtaacccggcgaaggtcttaccatggtcgctcctcacgacgctaatcgtcaacggtagcttggggtttgccatgctgattgcgaccttgtacttcgcaggtgatctggatgccgccgtgaccgcggatccacactttccgtttatgcctattctccgcaacgcccttgattcagtcccgggtgctgcagtccttgcgtctctcattgtgatcatgctcttcacggctgctacaggctgcctagcttccacgtcccggatatactgggcattctcccgagaccgcgctcttcctggttggaggacgctgaagaagaccagcacgaaaacgaacattccgatatacgccgttgtcactacagcagtaatagctatcattctgtcattgatcaacattggtgatgcgactgccttcaatggagttatatcaatatcgatagcaggtgttcttggatcatatcttgtggccgcgtctcttttgctttatcgcagggtgactggaggcattagagaccctaatgagaatgacgaaaaggtcaatcgcgtcggcacggacttaacttggggcccctggcgtctgccaaaggttatcggcatcataatcaacattttgacaatcatctttctcattttctttctcttcttcagcttctggcctgtgtcaagaacagtcactcctcagactatgaattgggccgttttggctacagtcgtcgtctttgcattcagtgtgctgtattatctattatgggcgaagaaagaatacactggcccagtgattgaggtgtga

SEQ ID NO: 19738 - protein, 532 aa, Muscodor strobelii
  misc_feature: SGI Peptide ID NO. 566645
  misc_feature (51)..(531): Pfam Id: PF00324 Pfam Desc: Amino acid permease
  misc_feature (73)..(115): Pfam Id: PF00324 Pfam Desc: Amino acid permease
  misc_feature (6)..(532): NCBI GI: 115492221 Blast Desc: conserved [Aspergillus terreus NIH2624] gi|114197598|gb|EAU39298.1| conserved [Aspergillus terreus NIH2624]
  misc_feature (15)..(531): NCBI GI: 255953911 Blast Desc: Pc21g06640 [Penicillium chrysogenum Wisconsin 54-1255] gi|211589419|emb|CAP95561.1| Pc21g06640 [Penicillium chrysogenum Wisconsin 54-1255]
  misc_feature (23)..(531): NCBI GI: 212540776 Blast Desc: amino acid permease, [Penicillium marneffei ATCC 18224] gi|210067842|gb|EEA21934.1| amino acid permease, [Penicillium marneffei ATCC 18224]
  misc_feature (26)..(531): NCBI GI: 46127687 Blast Desc: FG08221.1 [Gibberella zeae PH-1]
  misc_feature (3)..(532): NCBI GI: 238484007 Blast Desc: GABA permease, [Aspergillus flavus NRRL3357] gi|220701292|gb|EED57630.1| GABA permease, [Aspergillus flavus NRRL3357]
  misc_feature (3)..(531): NCBI GI: 256728317 Blast Desc: NECHADRAFT_73000 [Nectria haematococca mpVI 77-13-4]
  misc_feature (2)..(532): NCBI GI: 238497279 Blast Desc: choline transport protein, [Aspergillus flavus NRRL3357] gi|220694755|gb|EED51099.1| choline transport protein, [Aspergillus flavus NRRL3357]
  misc_feature (25)..(531): NCBI GI: 259485677 Blast Desc: TPA: GABA transporter, (Eurofung) [Aspergillus nidulans FGSC A4]
  misc_feature (27)..(532): NCBI GI: 256720570 Blast Desc: [Nectria haematococca mpVI 77-13-4]
  misc_feature (25)..(531): NCBI GI: 240107898 Blast Desc: choline transport protein, [Coccidioides posadasii C735 delta SOWgp]
  misc_feature: Useful for introducing or modulating the production of volatile compounds
MEDKASPSSSVHAYGYETSVTAPISRDDATLRQLGKKPVLKRSFGFITILGLSCTILITWEAVLFVFLSGYTNGGPAGLVYGYLVAWFGMISIFLTLSEMVSMAPTSGGQYHWVSILSPPGCQKFLGYITGWLQLTGWQAIISSSGLLTGTLIQSLILLTHPGYGEHMRNWHGTLISWAVILLNFGINASFSTVFAKFEGFAFIFHILGFFAVLLPLVLLGGPADAKDVFQTFLNGGDWQTQGLSLSIGISGTVFALLGGDGAIHMAEEIRNPAKVLPWSLLTTLIVNGSLGFAMLIATLYFAGDLDAAVTADPHFPFMPILRNALDSVPGAAVLASLIVIMLFTAATGCLASTSRIYWAFSRDRALPGWRTLKKTSTKTNIPIYAVVTTAVIAIILSLINIGDATAFNGVISISIAGVLGSYLVAASLLLYRRVTGGIRDPNENDEKVNRVGTDLTWGPWRLPKVIGIIINILTIIFLIFFLFFSFWPVSRTVTPQTMNWAVLATVVVFAFSVLYYLLWAKKEYTGPVIEV

SEQ ID NO: 19739 - DNA, 5665 bp, Muscodor strobelii
  misc_feature: SGI EST ID NO. CUFF.46236.1
  misc_feature: Variant of the nucleotide sequence at SEQ ID NO 19737
ggaaactgttcgtctgcttccccgaacgggatcgtttttagtccgtgatgttgatgcagcaattgcctacttaacatgagaatgaaaagacaggcataaaaatcggcctaatcgagtcttttaagacgaatacttgataatctaaaagactagggcttgtgatgaatgatgtctatcgagcgctggtctacttcaatgacaatttctgattatgggagacgatgaagtctactattaatgttctctccccctattcccagggctttatagtcttcccatcttcaaacttaccccccactgggcgccacataagacagaggctgaagtcacccactctttgctgcagagatagccattgccggccaggattctttctttgcgggtatacggggttgtcaatgacggaaatgaaccctgtcgcttcatactttcccatgtcgcttgcatctagaaagagatcgattcatctcatctgctttgctagcaactcaatccatgaactgacggcaaacaccatgccgccgatagtcaggatgggtgaagatgatgaacaagtctatcgtattgatgagcgaagcgattcttgccgcaaataacggttagagtaatagtaaacttacaaacatgtggtctttgagcataacgaagtctaggactcacatggatctgcagggcctcttctgcgtaagctcgagagccatcatccggaaaccatggagctactggaggtttgtggtccgtgtaagggttctgctcaaagatgctccaaagtgcgccgtcagcaatcttacctgattcttcatcaaccatcttttgccaataacttgcagggtcattagcgtccgattgttttagttgatttgccgtgtctttaattgctcgctttcgcgacttgtggtcgcagccatgaactggaaaccagagctgaatgcacggttgaggcgggtcttcgtatgattcaaacatgcatcgagcaattgaagaaaagtccctttggggatctatgtcttccaaaacgaggggcatcttaagtcggagtgtttgaaagggggacggagagcaaggcctcgggaagcgcaatccttggctgctgatcagcagcgcaagttgatgtctcacgaaggcaagtgagccagacggtggtataagcattcaatatgacaaattgaacctaaacagacttagagagacgacttgcacgccttcatattgtatgttcacctctcgttcaccgagcgatgtaaacgtcgatccagattatttcggcacaagacttctgaaattgacccattccaggtgacagagcaaaatcgcctaattccggattgacaggggtgcagctgcggtagatcattgctactgctctacagttggagaaacgatgccgggtatgcccgaccgaggactctggggaatggtgtggtatcatgagtcctcctgtttgtctactgttaagaaataatgatacagctacaaagtgcataacggaaatcgaaagtcttggacgtttctgagtaccagttccgctcaggttcggatcaatctgcaacacaacaataccaatctgaatgcgttcaatctcgatcgtttatccgcctgtaaaatcctttagtactacgtgaattcgttggccgatgccttgagacataccgttctactactcgatactagcaccacaattttgggcaacgaacctcaaataatgacagtctctcaacagaatcccgattctagctgattgctgatatgccttgatctttaattgtcccgatctaacataactaaatttgctgcggcctacacacttatatctattcatctcattcctcggtcacggtctgacgcagtcacaataagtacgattaccagtaaagcaatatcgaaagagtcgactgagacaggcgattcttgagtcaaaacggccgatcgagagaaattcagtacactcgtcgtctcatgattaataggccagattttgaacatgacaagagctctcttgttcaaattttgacatggtttctcttcattgcctctatcttagggatcggcgctcggattgggacgaagctggtgatgagtcgcctgaaactcggctgggacgataaaatattgttgatcgctcaggcggtatttctcggacagtctatctcggtgtccattggatcgtcacttggccttggaaagccagcaagcacactggataaagccacaatcagcaacgtactcaagacagaatatgccagtgatctactcctgatagtcacactgactttgatcaaatggtccctgtcattattcatctatcatttgagcccaggtaaactacatcgacagatcaatggatgcatcacaggagccgtaggactttgggccctgacatcgattgctcctctgctcttccaatgcggcatcacggccccatgggactactccaacacacagcgctgtattaatcgaaaagcattatggatatatattgggatctcgaatatcattacggagcttctttacatcatcctgtactgctttgtgttttggagccttcaactagcaccacgcaagcgaatcgttcttatcagtattttcacttcgaggatatttgtagttgccgcaatcgcagttcagctcgctgtgttcaacggcgtctacacgatgcctgatgttacgtatggggcatggttgcctacgattctggatcaaaccataggttctttgagcataatcactgcttgcgttccatttttaaaaccgttcatggaaagcttagaggcggacattgtgcgtgtacatagcactggggggtcagaggaggaagtctcacggaacgttcgcggctcagggtcgctggggtatactctgtctgaatatggtaattcctcggcaatttgttcatacccaagtgcgtactctcatactacttcatagcagctatagaacgaatgaaacgtacagaacaaatggcacatcagatgttgtgctcagtgagtgattacaatttcgaccctgatattcatccgtcttaccctccctcacggaagtggagtaaaacccaagcgttgcttggctcgccagcgcgtccgcaatctgcactgcatcatttgtagaggcgctttctttttcgcacacaagccctgcatgtttcactgcacaaaagaggaggtctgaaataatgatccggaatgcgacgccgacaacaaaatgatgccactgcacgggcttggcagtactctggcaaggatagacgcatttcgatttggggtatacccattcgctttgaaagcctctctcgtgggacccttgttcgctcccgcacgaccctgcagtatcttgaaggcaagtaattagtggctttagtgtcgcccaccgaatcgtatcagtactaccgaatccgggtctgatggagagaacaggacattgcactgaactgacgggcaacgcgcgcgctttggcatttcgctaaatacatctcttctaattcaatcaagggttccgaggaagagctgaggcaccagctggttcttcgacgattcagctttcttcagcgctcctaggggttcatctggaaagctgaattatatatgtacttccaatgatcaaactgctgaggtcctatactacactctattctcactagttctatcgctttggagactggtagagacagtcccattctagtctaattgcgaagtccccacgacctaaaacctagtggcaggatggaggacaaagcttcgccatcttcgagtgttcatgcatatgggtatgaaacttccgtcacggcgccaatatctcgcgatgacgctaccctacgccaattaggaaagaagcctgtcctcaaacgaagttttggattcatcaccattcttgggctaagctgcactatcctcataacatgggaagccgtgttatttgttttcctctccggctacacaaatgggggaccggcaggtcttgtatacggctacctcgtcgcatggtttggaatgatctccatcttcctaacactgtcagaaatggtctcaatggcgcctacttcaggcggccagtatcactgggtttccattctatcaccaccgggatgtcaaaaattcctaggctacatcacaggctggctgcagttgactggatggcaagctatcatctcttcctcggggttgttgactggcacattaattcaaagtctcatcctacttacgcatccggggtacggtgagcatatgaggaactggcacggcactttgatcagctgggctgtcattcttctaaactttggaatcaacgcctcttttagcacggtcttcgcgaaattcgaggggttcgcattcatcttccatattcttggcttctttgcggtgttattgccacttgtactacttggtggccctgcggatgcaaaggatgtattccaaacatttctgaacggaggagattggcagacgcaaggtctttcattgagcataggaatatctgggacggtgttcgctctgctcggtggagatggcgcaattcatatggcagaagagatccgtaacccggcgaaggtcttaccatggtcgctcctcacgacgctaatcgtcaacggtagcttggggtttgccatgctgattgcgaccttgtacttcgcaggtgatctggatgccgccgtgaccgcggatccacactttccgtttatgcctattctccgcaacgcccttgattcagtcccgggtgctgcagtccttgcgtctctcattgtgatcatgctcttcacggctgctacaggctgcctagcttccacgtcccggatatactgggcattctcccgagaccgcgctcttcctggttggaggacgctgaagaagaccagcacgaaaacgaacattccgatatacgccgttgtcactacagcagtaatagctatcattctgtcattgatcaacattggtgatgcgactgccttcaatggagttatatcaatatcgatagcaggtgttcttggatcatatcttgtggccgcgtctcttttgctttatcgcagggtgactggaggcattagagaccctaatgagaatgacgaaaaggtcaatcgcgtcggcacggacttaacttggggcccctggcgtctgccaaaggttatcggcatcataatcaacattttgacaatcatctttctcattttctttctcttcttcagcttctggcctgtgtcaagaacagtcactcctcagactatgaattgggccgttttggctacagtcgtcgtctttgcattcagtgtgctgtattatctattatgggcgaagaaagaatacactggcccagtgattgaggtgtgagcgtgagaaaggtgggacgctagacctcgactgagtaagacctatcgccttataatcggacagaacttattagaaaggatgcgtgctgcgctcggtttaatgtaaatattactttctttcaaatttgttattataagtaacgtggtcactggtgcatatattgtaagacagaaatgatatctcaatcgtttagcaccacctgccaccactgtatagtccctattgtatacgagaggagggccgaatgcgcacgcatttcgcacgtatttcggataaggactgaaacgccataagatagaaaagattctatgaatatatggattattccacttccgtttcgtatttcttct

SEQ ID NO: 19740 - DNA, 258 bp, Muscodor strobelii
  misc_feature: SGI cDNA ID NO. 566646
  misc_feature: Encodes the peptide sequence at SEQ ID NO 19741
atggttgatgaagaatcaggtaagattgctgacggcgcactttggagcatctttgagcagaacccttacacggaccacaaacctccagtagctccatggtttccggatgatggctctcgagcttacgcagaagaggccctgcagatccatgtgagtcctagacttcgttatgctcaaagaccacatgtttacttgttcatcatcttcacccatcctgactatcggcggcatggtgtttgccgtcagttcatggattga

SEQ ID NO: 19741 - protein, 85 aa, Muscodor strobelii
  misc_feature: SGI Peptide ID NO. 566646
  misc_feature (1)..(85): NCBI GI: 156055888 Blast Desc: SS1G_05296 [Sclerotinia sclerotiorum 1980] gi|154703080|gb|EDO02819.1| SS1G_05296 [Sclerotinia sclerotiorum 1980]
  misc_feature (1)..(85): NCBI GI: 154302378 Blast Desc: BC1G_09973 [Botryotinia fuckeliana B05.10] gi|150855461|gb|EDN30653.1| BC1G_09973 [Botryotinia fuckeliana B05.10]
  misc_feature (1)..(84): NCBI GI: 154298180 Blast Desc: BC1G_12055 [Botryotinia fuckeliana B05.10] gi|150858241|gb|EDN33433.1| BC1G_12055 [Botryotinia fuckeliana B05.10]
  misc_feature (1)..(84): NCBI GI: 242796234 Blast Desc: conserved [Talaromyces stipitatus ATCC 10500] gi|218719344|gb|EED18764.1| conserved [Talaromyces stipitatus ATCC 10500]
  misc_feature (6)..(85): NCBI GI: 240108921 Blast Desc: GNAT family acetyltransferase, [Coccidioides posadasii C735 delta SOWgp]
  misc_feature (2)..(85): NCBI GI: 256720567 Blast Desc: NECHADRAFT_55801 [Nectria haematococca mpVI 77-13-4]
  misc_feature (4)..(85): NCBI GI: 119181255 Blast Desc: CIMG_05757 [Coccidioides immitis RS]
  misc_feature (1)..(85): NCBI GI: 258572524 Blast Desc: [Uncinocarpus reesii 1704] gi|237905294|gb|EEP79695.1| [Uncinocarpus reesii 1704]
  misc_feature (1)..(84): NCBI GI: 145254205 Blast Desc: An18g00950 [Aspergillus niger] gi|134084139|emb|CAK47172.1| protein product [Aspergillus niger]
  misc_feature (1)..(85): NCBI GI: 145237354 Blast Desc: An07g02400 [Aspergillus niger] gi|134075793|emb|CAK39329.1| protein product [Aspergillus niger]
MVDEESGKIADGALWSIFEQNPYTDHKPPVAPWFPDDGSRAYAEEALQIHVSPRLRYAQRPHVYLFIIFTHPDYRRHGVCRQFMD

SEQ ID NO: 19742 - DNA, 2317 bp, Muscodor strobelii
  misc_feature: SGI EST ID NO. CUFF.46235.3
  misc_feature: Variant of the nucleotide sequence at SEQ ID NO 19740
gtgtgttggagtagtcccatggggccgtgatgccgcattggaagagcagaggagcaatcgatgtcagggcccaaagtcctacggctcctgtgatgcatccattgatctgtcgatgtagtttacctgggctcaaatgatagatgaataatgacagggaccatttgatcaaagtcagtgtgactatcaggagtagatcactggcatattctgtctgaggcccgacttgttgataagaatatgcgccatggcgaacatacatgtacgaggagcacgaaccttgagtacgttgctgattgtggctttatccagtgtgcttgctggctttccaaggccaagtgacgatccaatggacaccgagatagactgtccgagaaataccgcctttatcaatttagttttgtcgcatggaataactcagaaagcacaaacctgagcgatcaacaatattttatcgtcccagccgagtttcaggcgactcatcaccagcttcgtcccaatccgagcgccgatccctaagatagaggcaatgaagagaaaccatgtcaaaatttgaacaagagagctcttgtcatgttcaaaatctggcctattaatcatgagacgacgagtgtactgaatttctctcgatcggccgttttgactcaagaatcgcctgtctcagtcgactctttcgatattgctttactggtaatcgtacttattgtgactgcgtcagaccgtgaccgaggaatgagatgaatagatataagtgtgtaggccgcagcaaatttagttatgttagatcgggacaattaaagatcaaggcatatcagcaatcagctagaatcgggattctgttgagagactgtcattatttgaggttcgttgcccaaaattgtggtgctagtatcgagtagtagaacggtatgtctcaaggcatcggccaacgaattcacgtagtactaaaggattttacaggcggataaacgatcgagattgaacgcattcagattggtattgttgtgttgcagattgatccgaacctgagcggaactggtactcagaaacgtccaagactttcgatttccgttatgcactttgtagctgtatcattatttcttaacagtagacaaacaggaggactcatgataccacaccattccccagagtcctcggtcgggcatacccggcatcgtttctccaactgtagagcagtagcaatgatctaccgcagctgcacccctgtcaatccggaattaggcgattttgctctgtcacctggaatgggtcaatttcagaagtcttgtgccgaaataatctggatcgacgtttacatcgctcggtgaacgagaggtgaacatacaatatgaaggcgtgcaagtcgtctctctaagtctgtttaggttcaatttgtcatattgaatgcttataccaccgtctggctcacttgccttcgtgagacatcaacttgcgctgctgatcagcagccaaggattgcgcttcccgaggccttgctctccgtccccctttcaaacactccgacttaagatgcccctcgttttggaagacatagatccccaaagggacttttcttcaattgctcgatgcatgtttgaatcatacgaagacccgcctcaaccgtgcattcagctctggtttccagttcatggctgcgaccacaagtcgcgaaagcgagcaattaaagacacggcaaatcaactaaaacaatcggacgctaatgaccctgcaagttattggcaaaagatggttgatgaagaatcaggccctgcagatccatgtgagtcctagacttcgttatgctcaaagaccacatgtttacttgttcatcatcttcacccatcctgactatcggcggcatggtgtttgccgtcagttcatggattgagttgctagcaaagcagatgagatgaatcgatctctttctagatgcaagcgacatgggaaagtatgaagcgacagggttcatttccgtcattgacaaccccgtatacccgcaaagaaagaatcctggccggcaatggctatctctgcagcaaagagtgggtgacttcagcctctgtcttatgtggcgcccagtggggggtaagtttgaagatgggaagactataaagccctgggaatagggggagagaacattaatagtagacttcatcgtctcccataatcagaaattgtcattgaagtagaccagcgctcgatagacatcattcatcacaagccctagtcttttagattatcaagtattcgtcttaaaagactcgattaggccgatttttatgcctgtcttttcattctcatgttaagtaggcaattgctg

SEQ ID NO: 19743 - DNA, 1530 bp, Muscodor strobelii
  misc_feature: SGI cDNA ID NO. 566647
  misc_feature: Elevated expression when VOC is produced
  misc_feature: Encodes the peptide sequence at SEQ ID NO 19744
atgttggacacacaatcgtcagatgatagcttcataagtgagaaggatcaccatggtgagcctccgcgcctcaaacagctcaaagtatgcgaaagggtgttcaaatttgacggaagcaataacagcaattctatatggtcaggcgcagatgatcctcggcgtcccatgaattggcccttcagcaagaagtggtgcgcgacattcgtgctctccgcaatcgctttcgtgcagcccctagcagagacagctttgacacccttggaagatcagatatcctccacgttagatatcaatcaaccgtatcaatggattctggtcaactctctggtgttagtcggcatcggcctatcatctctttttcttgggccattatcagagctttacggtcgcaaaccaatgctcttggcaggcagtttttcattcatcgtatggaatacggcgagcggcggagtcagctcattgacgcagatgcttgtgctgaggctcttgagcggtttcggtgcatcggttggcgatgccatagctcctggtgtgttagccgacatatggccagtcgagttgcgcggaagagcttttgcgattttctacgctgcgccactgttcggaacaggtattggacccatcattggaatattcgtcacagaagctctgaattggcgatgggtattttggatcacttcgtcggcttcgctggtcaccgtttttgcaattttggctttccttgcagaatcctacgagccaaaaatcgagcaattgctccgcagagagacgcatgttgatggtcatgcgaaaccggaaagccacgatgggcagccgaagtcagacttggcggccgtcatgaagcagaacttataccgaccatttcgcatgcttaccactcaagttatcatccaggttctagcgctgtacatggctttgctatacgggataatgtggcttttcctattcatctatcctctcttatggaccgagcaatacaagcaggagccaaagatcgccagtctcaactacttatccttcggtctcggtatggttgcgggcgtgtttatcgcaggctttattaatgacgccatctactcttacttgaaaattcgttacaagagtcccggacgtcccgaatttcgagtcccggccatgatcattggtacagtatgtgctccagcaggtttacttatctggggctggtctggccaggctcgagtgcactggattatcccaaatatagggagttttgtgtttgcgacaggcgtttatatatgttcagcgtgtgtatcggtttacacgatagatacatacacaaggtatgcagcatctgctgtatgcaccaatctcgttctgcggagtctgacgggagcattcttccccgtttttgcgccatatctatttgacgaactaggttttggttacggagcgactgtcctcgctgcaggctttttgaccattggagtttcggtcatggctgccctgtggttctgcggtgaaagccttcggtctcgaagcccctattgtgcagccgatactggcgaataa

SEQ ID NO: 19744 - protein, 509 aa, Muscodor strobelii
  misc_feature: SGI Peptide ID NO. 566647
  misc_feature (70)..(455): Pfam Id: PF07690 Pfam Desc: Major Facilitator Superfamily
  misc_feature (62)..(490): Pfam Id: PF00083 Pfam Desc: Sugar (and other) transporter
  misc_feature (102)..(227): Pfam Id: PF00083 Pfam Desc: Sugar (and other) transporter
  misc_feature (2)..(506): NCBI GI: 255956543 Blast Desc: Pc21g20360 [Penicillium chrysogenum Wisconsin 54-1255] gi|211590735|emb|CAP96933.1| Pc21g20360 [Penicillium chrysogenum Wisconsin 54-1255]
  misc_feature (46)..(506): NCBI GI: 67541557 Blast Desc: AN6942.2 [Aspergillus nidulans FGSC A4] gi|40738507|gb|EAA57697.1| AN6942.2 [Aspergillus nidulans FGSC A4] gi|259480553|tpe|CBF71792.1| TPA: conserved [Aspergillus FGSC
  misc_feature (39)..(504): NCBI GI: 256725896 Blast Desc: [Nectria haematococca mpVI 77-13-4]
  misc_feature (46)..(505): NCBI GI: 240106137 Blast Desc: Major Facilitator Superfamily protein [Coccidioides posadasii C735 delta SOWgp]
  misc_feature (3)..(504): NCBI GI: 46140021 Blast Desc: FG11525.1 [Gibberella zeae PH-1]
  misc_feature (46)..(505): NCBI GI: 119192316 Blast Desc: CIMG_00535 [Coccidioides immitis RS]
  misc_feature (12)..(505): NCBI GI: 119467378 Blast Desc: MFS multidrug transporter, [Neosartorya fischeri NRRL 181] gi|119405647|gb|EAW15598.1| MFS multidrug transporter, [Neosartorya fischeri NRRL 181]
  misc_feature (32)..(505): NCBI GI: 121703922 Blast Desc: MFS multidrug transporter, [Aspergillus clavatus NRRL 1] gi|119398369|gb|EAW08799.1| MFS multidrug transporter, [Aspergillus clavatus NRRL 1]
  misc_feature (12)..(505): NCBI GI: 70984531 Blast Desc: MFS multidrug transporter [Aspergillus fumigatus Af293] gi|66845399|gb|EAL85734.1| MFS multidrug transporter, [Aspergillus fumigatus Af293] gi|159122556|gb|EDP47677.1| MFS
  misc_feature (7)..(504): NCBI GI: 261191077 Blast Desc: MFS multidrug transporter [Ajellomyces dermatitidis SLH14081] gi|239590991|gb|EEQ73572.1| MFS multidrug transporter [Ajellomyces dermatitidis SLH14081]
  misc_feature: Useful for introducing or modulating the production of volatile compounds
MLDTQSSDDSFISEKDHHGEPPRLKQLKVCERVFKFDGSNNSNSIWSGADDPRRPMNWPFSKKWCATFVLSAIAFVQPLAETALTPLEDQISSTLDINQPYQWILVNSLVLVGIGLSSLFLGPLSELYGRKPMLLAGSFSFIVWNTASGGVSSLTQMLVLRLLSGFGASVGDAIAPGVLADIWPVELRGRAFAIFYAAPLFGTGIGPIIGIFVTEALNWRWVFWITSSASLVTVFAILAFLAESYEPKIEQLLRRETHVDGHAKPESHDGQPKSDLAAVMKQNLYRPFRMLTTQVIIQVLALYMALLYGIMWLFLFIYPLLWTEQYKQEPKIASLNYLSFGLGMVAGVFIAGFINDAIYSYLKIRYKSPGRPEFRVPAMIIGTVCAPAGLLIWGWSGQARVHWIIPNIGSFVFATGVYICSACVSVYTIDTYTRYAASAVCTNLVLRSLTGAFFPVFAPYLFDELGFGYGATVLAAGFLTIGVSVMAALWFCGESLRSRSPYCAADTGE

SEQ ID NO: 19745 - DNA, 2703 bp, Muscodor strobelii
  misc_feature: SGI EST ID NO. CUFF.46217.0
  misc_feature: Variant of the nucleotide sequence at SEQ ID NO 19743
aagtacctaaggtaatgcgtgcgatcaggctcgaacgacccgccaggagtctacctcctcgcattggtcaatatgcgagtatagggtttcactgcaccaaccattcggaattgcattgcccttgctttgattgtactgtaaagccgaaaatattcattatatatcacagacagaaataagaacaagcaagtatttagatacgacaacttgcgattatcgacaaagtgatagccacgaccaccatcgctagatttttcaacatgactatagcatcggtctccggctgacatagtaaagtccaaggagtgccgggactctttagtggttaagtgagatagcgactcatgtaaccgaccattccgaggttgagatgtgagttgcataccggtgggacataaataagctccgccccccttgatgctacgcaaccagtcctatgtcggtttccattcacttgaccggtcggaatacgacccatccatttcaccaaccccaactaggaaacaaacttctgattccattttcatctggaatcaggcaggttcgcgggccttccactctcgccagcatcgaaatgcaggaaatcattgcctgcggagacccaaagacagacatgcccccgccacaccataatgtctgttgcgaccttccatcatcgtgccgataatgaaagttccatgcaaagtaccatgcatcccttacagcatggatcattaacattccgcccccaagccctgtatctcatgacgatcattcgtgatgatgtcttaccaacagtatagttggagtcgttgtgtgacatcgtgggatgcgggtgcctactggttggcggaatgggtgatgggtgaggcttgatccgctagagcggtaggaggtataatgagtattttaagaccgaccctaatagatcgtagtacgtagagcagccatcttgctcatgaagctatcttgggaattgaaaatgatgatgttggacacacaatcgtcagatgatagcttcataagtgagaaggatcaccatggtgagcctccgcgcctcaaacagctcaaagtatgcgaaagggtgttcaaatttgacggaagcaataacagcaattctatatggtcaggcgcagatgatcctcggcgtcccatgaattggcccttcagcaagaagtggtgcgcgacattcgtgctctccgcaatcgctttcgtgcagcccctagcagagacagctttgacacccttggaagatcagatatcctccacgttagatatcaatcaaccgtatcaatggattctggtcaactctctggtgttagtcggcatcggcctatcatctctttttcttgggccattatcagagctttacggtcgcaaaccaatgctcttggcaggcagtttttcattcatcgtatggaatacggcgagcggcggagtcagctcattgacgcagatgcttgtgctgaggctcttgagcggtttcggtgcatcggttggcgatgccatagctcctggtgtgttagccgacatatggccagtcgagttgcgcggaagagcttttgcgattttctacgctgcgccactgttcggaacaggtattggacccatcattggaatattcgtcacagaagctctgaattggcgatgggtattttggatcacttcgtcggcttcgctggtcaccgtttttgcaattttggctttccttgcagaatcctacgagccaaaaatcgagcaattgctccgcagagagacgcatgttgatggtcatgcgaaaccggaaagccacgatgggcagccgaagtcagacttggcggccgtcatgaagcagaacttataccgaccatttcgcatgcttaccactcaagttatcatccaggttctagcgctgtacatggctttgctatacgggataatgtggcttttcctattcatctatcctctcttatggaccgagcaatacaagcaggagccaaagatcgccagtctcaactacttatccttcggtctcggtatggttgcgggcgtgtttatcgcaggctttattaatgacgccatctactcttacttgaaaattcgttacaagagtcccggacgtcccgaatttcgagtcccggccatgatcattggtacagtatgtgctccagcaggtttacttatctggggctggtctggccaggctcgagtgcactggattatcccaaatatagggagttttgtgtttgcgacaggcgtttatatatgttcagcgtgtgtatcggtttacacgatagatacatacacaaggtatgcagcatctgctgtatgcaccaatctcgttctgcggagtctgacgggagcattcttccccgtttttgcgccatatctatttgacgaactaggttttggttacggagcgactgtcctcgctgcaggctttttgaccattggagtttcggtcatggctgccctgtggttctgcggtgaaagccttcggtctcgaagcccctattgtgcagccgatactggcgaataagctatagactagatatagagagctataaggtgatatgaactgtacttggcaatatcttaatagccgaagccaagtcgatgtacttttaattcaaggcagaggagctctgaagcttataaattcccttgagtttctgaccttgcacgtctttgcagtccagtgtgctatcgtatctgaaatcgaatacccagttagagaagctccac

SEQ ID NO: 19746 - DNA, 1830 bp, Muscodor strobelii
  misc_feature: SGI cDNA ID NO. 566648
  misc_feature: Encodes the peptide sequence at SEQ ID NO 19747
atggctctgcacactaaactccctgcacatctgcaggaggtcgatgttatcatttctggcggcggcacctcgggcaatgtccttgcttcgaggatctctgatgcatatcccgatctgagcatcctcgtagttgaagcgggcctagacaatgcaaataaccccaatgtgacaattccgagtctgtatcgcttcaatctaggcccagacagcactaccactaccgccgtgataggccagccggaggaacaactcgcgggtcgcacgcttccggtttgtaccggtgctgtcctaggcggtgggtcgtccgtcaatgcattggcatatgcccgtggccaggcgtctgactttgatgcctggaagacgaaaggatgggcgtcgaacgagcttcttcccttcctgaaaaagttagagacctttcacggcgaggacgacctcaatacccacggacatggtggtcccattgaggcgtcgcttgggaaatatgtgaacgagccgctaatgaatgattttgtcgctgccgttagtagcactgggtataaaatgaccggcgatgtgcacgacctcagtgcagttgatgccgtgtctcgcaatctgcggtacgcatcgctcagagacgggaagaggcaagacacggcgcacaagtacttgcatcctcggctccatgatgacaagcatcctaaactcaatgttctcgtcgcagctcaggtcatcaaggtcttgtttggccctgaaaatgaggccatcggtatcgaatatcgactcaatcctaagttccaagttggggatgattccgagcgtaaaagtgtgcatacaattaaggctagaaaacttgtgatcatatcttccggtgtcttcggcacccctctgatacttgaaagatccggtcttggcgacaagaagttcctggacgcagccgatatcaaagtcactcatcaactgcccggtgttggccgtgaatatcacgaccacccaaccatgtcgtatgtgtacaagtccaatttagacccagcagacaccgtggatagcctcttcagcggcctaaggaatctcaacgagctgattcaaaacgatgaccccatcttgagctggactggtgttgatgcaatggccaagatccggcccagcgcgtcggagctcgaagagtttcgggatcattacctggcgatttgggaacgcaaattcaaaaatgtttcggacaaaccactggttcttctcgctgtgataaacggtcttctcgcagatgtggatctcctgtcgcccaatgctgcctacttcactatcgcaccgttcttggtccatcccgagtctcggggccatgtgcacattacgggccctgggatcgacgatcctgtcaacttccgcacgggcttcctctcggatctggacgatttcgacataaattcgcacgtatgggcttacaagcgacagcgcgaagccgcccgacatatgaagttctacgacggcgaggtggcctccaagcatccgccgttccccgaagaatccggggcctcgttgaccaagccgcccggcgagcacctgacgtactcgatcgaggacgacgagcttatcaagatgtttgtgcgcgagcgcgttggaactatttcacatggtttagggacgtgccccatggctaccgagcaggacatgggtgtcgtcgacgcgagccttaacgtctacggaactaagaagttgaagctcgccgatctgagcatcgcacctggaaatgtgtcgggaaacacgatgaatacggcagtgctcatcggcgagaaggcagcggatattattatcaaggagctggcaagtgagaagaatttgggacagcaagaatag

SEQ ID NO: 19747 - protein, 609 aa, Muscodor strobelii
  misc_feature: SGI Peptide ID NO. 566648
  misc_feature (427)..(591): Pfam Id: PF05199 Pfam Desc: GMC oxidoreductase
  misc_feature (14)..(338): Pfam Id: PF00732 Pfam Desc: GMC oxidoreductase
  misc_feature (513)..(591): Pfam Id: PF05199 Pfam Desc: GMC oxidoreductase
  misc_feature (427)..(497): Pfam Id: PF05199 Pfam Desc: GMC oxidoreductase
  misc_feature (14)..(326): Pfam Id: PF00732 Pfam Desc: GMC oxidoreductase
  misc_feature (15)..(53): Pfam Id: PF05834 Pfam Desc: Lycopene cyclase protein
  misc_feature (1)..(600): NCBI GI: 46115592 Blast Desc: FG03638.1 [Gibberella zeae PH-1]
  misc_feature (2)..(601): NCBI GI: 169770081 Blast Desc: [Aspergillus oryzae RIB40] gi|83767369|dbj|BAE57508.1| protein product [Aspergillus oryzae]
  misc_feature (2)..(601): NCBI GI: 238487560 Blast Desc: glucose-methanol-choline (gmc) oxidoreductase, [Aspergillus flavus NRRL3357] gi|220699897|gb|EED56236.1| glucose-methanol-choline (gmc) oxidoreductase, [Aspergillus
  misc_feature (1)..(600): NCBI GI: 242821127 Blast Desc: glucose dehydrogenase, [Talaromyces stipitatus ATCC 10500] gi|218712539|gb|EED11964.1| glucose dehydrogenase, [Talaromyces stipitatus ATCC 10500]
  misc_feature (1)..(607): NCBI GI: 256722595 Blast Desc: [Nectria haematococca mpVI 77-13-4]
  misc_feature (1)..(600): NCBI GI: 145250491 Blast Desc: An15g02200 [Aspergillus niger] gi|134082279|emb|CAK42323.1| protein product [Aspergillus niger]
  misc_feature (1)..(600): NCBI GI: 256723917 Blast Desc: NECHADRAFT_92276 [Nectria haematococca mpVI 77-13-4]
  misc_feature (1)..(600): NCBI GI: 171677813 Blast Desc: protein product [Podospora anserina] gi|170936975|emb|CAP61633.1| protein product [Podospora anserina]
  misc_feature (1)..(600): NCBI GI: 256730307 Blast Desc: NECHADRAFT_94976 [Nectria haematococca mpVI 77-13-4]
  misc_feature (1)..(599): NCBI GI: 189210457 Blast Desc: alcohol dehydrogenase [Pyrenophora tritici-repentis Pt-1C-BFP] gi|187977653|gb|EDU44279.1| alcohol dehydrogenase [Pyrenophora tritici-repentis Pt-1C-BFP]
  misc_feature (12)..(600): SWISSPROT Homolog: EC 1.1.3.13 Alcohol oxidase
MALHTKLPAHLQEVDVIISGGGTSGNVLASRISDAYPDLSILVVEAGLDNANNPNVTIPSLYRFNLGPDSTTTTAVIGQPEEQLAGRTLPVCTGAVLGGGSSVNALAYARGQASDFDAWKTKGWASNELLPFLKKLETFHGEDDLNTHGHGGPIEASLGKYVNEPLMNDFVAAVSSTGYKMTGDVHDLSAVDAVSRNLRYASLRDGKRQDTAHKYLHPRLHDDKHPKLNVLVAAQVIKVLFGPENEAIGIEYRLNPKFQVGDDSERKSVHTIKARKLVIISSGVFGTPLILERSGLGDKKFLDAADIKVTHQLPGVGREYHDHPTMSYVYKSNLDPADTVDSLFSGLRNLNELIQNDDPILSWTGVDAMAKIRPSASELEEFRDHYLAIWERKFKNVSDKPLVLLAVINGLLADVDLLSPNAAYFTIAPFLVHPESRGHVHITGPGIDDPVNFRTGFLSDLDDFDINSHVWAYKRQREAARHMKFYDGEVASKHPPFPEESGASLTKPPGEHLTYSIEDDELIKMFVRERVGTISHGLGTCPMATEQDMGVVDASLNVYGTKKLKLADLSIAPGNVSGNTMNTAVLIGEKAADIIIKELASEKNLGQQE

SEQ ID NO: 19748 - DNA, 4294 bp, Muscodor strobelii
  misc_feature: SGI EST ID NO. CUFF.46240.1
  misc_feature: Variant of the nucleotide sequence at SEQ ID NO 19746
agacaatgggagtacttattttgagacatagccaatattctgtgagagatatgtgcctcaacctctcgaacttctccttgatcgtacacatcttcatgcgcttctaggctactagagtcacaagtatacctccacccgctttgcgattcagctaggtcagacacagaacttgataacattccatctcaccattgatgattattgtcccgcgccgtccccccgacaactatacaacctaaatttgattgaggaatgcgctatgcgtaacggatagcatactccccccctatatttttcaatttacaattacttgtgcgggaagacagacgatggtagccggtgtatgatatgcctagtatctaactttttgtctatccgaggtgagattcaataaaaagacacctatctgaccatgataaagacttggcagtggctgattcccgtttcggcctgaagggtgcccggataacagaatgtaagggggctcattgtatatggccgggctgtggctgtgcgttaccgcccggacgatccgggatggttagtgactgtgtgcagtataaagctgatttacaagtgcttcctgaacaaagttcgaaaccttttcaggaggtgcgaaaatgggacataaatttgaattgcatcgaagagaacggaactagaagtattttatgaacatgatgctgtcatgtcctccaacgggcagtgtggcctatatttgttgtggtatcagagcgagggtgtcgctcccaatccgaatagttggtaagcactaacaatacgtcgtattctaccaataggactgctaccacccttacgccgcaaatctatctcaccacgtatcatgccacgccctgctgctctgtctgtttcttaccttcactgctgtctcgtctacgctatttgacaggacacttggaattccaaacattattaaaagcgcaaaatactaaaacgctatggctctgcacactaaactccctgcacatctgcaggaggtcgatgttatcatttctggcggcggcacctcgggcaatgtccttgcttcgaggatctctgatgcatatcccgatctgagcatcctcgtagttgaagcgggcctagacaatgcaaataaccccaatgtgacaattccgagtctgtatcgcttcaatctaggcccagacagcactaccactaccgccgtgataggccagccggaggaacaactcgcgggtcgcacgcttccggtttgtaccggtgctgtcctaggcggtgggtcgtccgtcaatgcattggcatatgcccgtggccaggcgtctgactttgatgcctggaagacgaaaggatgggcgtcgaacgagcttcttcccttcctgaaaaagttagagacctttcacggcgaggacgacctcaatacccacggacatggtggtcccattgaggcgtcgcttgggaaatatgtgaacgagccgctaatgaatgattttgtcgctgccgttagtagcactgggtataaaatgaccggcgatgtgcacgacctcagtgcagttgatgccgtgtctcgcaatctgcggtacgcatcgctcagagacgggaagaggcaagacacggcgcacaagtacttgcatcctcggctccatgatgacaagcatcctaaactcaatgttctcgtcgcagctcaggtcatcaaggtcttgtttggccctgaaaatgaggccatcggtatcgaatatcgactcaatcctaagttccaagttggggatgattccgagcgtaaaagtgtgcatacaattaaggctagaaaacttgtgatcatatcttccggtgtcttcggcacccctctgatacttgaaagatccggtcttggcgacaagaagttcctggacgcagccgatatcaaagtcactcatcaactgcccggtgttggccgtgaatatcacgaccacccaaccatgtcgtatgtgtacaagtccaatttagacccagcagacaccgtggatagcctcttcagcggcctaaggaatctcaacgagctgattcaaaacgatgaccccatcttgagctggactggtgttgatgcaatggccaagatccggcccagcgcgtcggagctcgaagagtttcgggatcattacctggcgatttgggaacgcaaattcaaaaatgtttcggacaaaccactggttcttctcgctgtgataaacgggcgagtcattccattcgttatagctacgttgctattattgacataaatacagtcttctcgcagatgtggatctcctgtcgcccaatgctgcctacttcactatcgcaccgttcttggtccatcccgagtctcggggccatgtgcacattacgggccctgggatcgacgatcctgtcaacttccgcacgggcttcctctcggatctggacgatttcgacataaattcgcacgtatgggcttacaagcgacagcgcgaagccgcccgacatatgaagttctacgacggcgaggtggcctccaagcatccgccgttccccgaagaatccggggcctcgttgaccaagccgcccggcgagcacctgacgtactcgatcgaggacgacgagcttatcaagatgtttgtgcgcgagcgcgttggaactatttcacatggtttagggacgtgccccatggctaccgagcaggacatgggtgtcgtcgacgcgagccttaacgtctacggaactaagaagttgaagctcgccgatctgagcatcgcacctggaaatgtgtcgggaaacacgatgaatacggcagtgctcatcggcgagaaggcagcggatattattatcaaggagctggcaagtgagaagaatttgggacagcaagaatagatagaacaatccctacacttactagcggtcactgtgtttttattttcaaatggaatatcattggttctcaaagcattgcataatacattctgtcttcattagtgcatgctgaacgtggttcgataaatctagcaaagtgacactagtttagtacaatttcgcagttccaagctgttggaatttcaacgctgaaaccgcctcataaaccgcagggcgatcggctgtaacgaacatcggcaatggtgcgaccgaagcacctctgtgggctttcaagaaaaatatcgcggaatatctttctggacattcgccatcttgcttatctttcatccctggcggcacggatacttgatgcagaccagcacgtatgaggccattagtccatcgttcgagtgtgtcgctggcaaggactaaaacttcatggggcttgtcattgctagctggtggaataggggtgaacaagcgtcgttctttagttgattgactcctgtcttcggcttccagccctccgatttgatcttgaaagacaagggagataataccaaggtcggtatggggccatgtacgcttgagcccgtcgtcggatagatcctgaacacggactgatgggtaacggttcagtcgtatttcgctagcgactggttggcataaggagagaatttggtttctcggaacgccaaaacctagctcgatagcactgacgatttgttcacttgtgctctggagttcaacatatagtgactcgactgttttctgaaaattcgcgcccttttcgtgtgcaggccattgattgggatattccatgtcgtgtgacggtcctgcatcaaaatgttcctcgcagcaactcagcctttgagtacttctctggtattatcaaatagactcactcggacatctctaagcccatcccaactcttgtgaccaatcagattgccttcaaataagcgcgatgtctgttccatgcccactatgctgtagccacgttgaggcaaagggcccggcgggttgactatttccatcttcttatcgagtgggattgagaagaagtctcgagccttcacataagttattgttaagtggatatttgaaaggtcggaggatatcacggcctaccactctcagaaaatcgtctccgaggcaactgattgtatggtaattgatgagcctgattgcgccatgcttcctgaggccatcaactatttgttgagatatttctagcctttctggcgagtcgcctgcggcatatcctgagaaatcaatcgtactaagcattttcatggaaggtaagtagatctgcatataaatgtgctgcttaaggctttattcttctgtaagatgaagatatgttaggcgcgtagcctgcttaaatagaattcctgccgcgctgaccgcgctgaccgtcataacctgctgtgtaatagtgactgatctaggccggagtaatcatgcttgcttg

SEQ ID NO: 19749 - DNA, 744 bp, Muscodor strobelii
  misc_feature: SGI cDNA ID NO. 566649
  misc_feature: Encodes the peptide sequence at SEQ ID NO 19750
atggccgacaccatcgccgacaaggtcgcccaagctccggtcgctagcaccgacgccaaggctcccgagaccactgactcactgcctcccatcaccaaggagcccgccggcacagctgatgcctcaatggtgccttctgcgtctgccgttactgacacgctcgcggccaaagacgctgctgcacctagcgctgacgcagcgaaaacggaggaagctcccaaggagtcggcagctcagccagaagacgcatccaagaagacgtctgacactgacagctccgctctgcagtctgagaacccgaaggaccccgccccgacccctgcaactgtcacatctggtccgggcgcggcgctctctaatggcgagcctaagcctgtcgccatcgaggaggtgaaggaccaagacatgcctgatgcgaaactccccgagagtgctgatgcccccactgtcaccactggagtagagacggagaaggtgcccgctgtcacaggcgacgatgctaccactggcgacaagcgcaaagctgatgaagctgctaagcctgacaatgaggggaaagcagaggaacctgccgacaagaagcagaagacagagaccaacggtgctgcgacgactaatggtggtgctagaaagcctggcaggccaaagaaggagaagggcaaggcggcagctgctccggctccagctgcgccgatcggacgcgccgcaaggaggacgagaagccagggtctgaccgatgcctga

SEQ ID NO: 19750 - protein, 247 aa, Muscodor strobelii
  misc_feature: SGI Peptide ID NO. 566649
MADTIADKVAQAPVASTDAKAPETTDSLPPITKEPAGTADASMVPSASAVTDTLAAKDAAAPSADAAKTEEAPKESAAQPEDASKKTSDTDSSALQSENPKDPAPTPATVTSGPGAALSNGEPKPVAIEEVKDQDMPDAKLPESADAPTVTTGVETEKVPAVTGDDATTGDKRKADEAAKPDNEGKAEEPADKKQKTETNGAATTNGGARKPGRPKKEKGKAAAAPAPAAPIGRAARRTRSQGLTDA

SEQ ID NO: 19751 - DNA, 1990 bp, Muscodor strobelii
  misc_feature: SGI EST ID NO. CUFF.46311.0
  misc_feature: Variant of the nucleotide sequence at SEQ ID NO 19749
cctcagggtctgggaccagggccgctcggaaggagaggagagcatcccagcagccatcttatgtaaacagcgttaagagcaagctttggtccaagaatgttttcccgtcccgtccgcagctgctgattcgcccgtgacaccgcgcaaagcatggagagagcttcctgactaacctcacctcacctgttcctgcctcctcccaactttccctttctccctcccccatctccgtttcacctttcaacacctcgccgactgcacaaaacatcatcaagcagtccagcgttcacatcgccaccacacatccaagcttagaagcatacttaacccttgaattcatatcccgcagtctccactgctattcttagcacctctccgcacgcactgtacacccgagcttgagcttcgcgctcctacgtcatcgacatggccgacaccatcgccgacaaggtcgcccaagctccggtcgctagcaccgacgccaaggctcccgagaccactgactcactgcctcccatcaccaaggagcccgccggcacagctgatgcctcaatggtgccttctgcgtctgccgttactgacacgctcgcggccaaagacgctgctgcacctagcgctgacgcagcgaaaacggaggaagctcccaaggagtcggcagctcagccagaagacgcatccaagaagacgtctgacactgacagctccgctctgcagtctgagaacccgaaggaccccgccccgacccctgcaactgtcacatctggtccgggcgcggcgctctctaatggcgagcctaagcctgtcgccatcgaggaggtgaaggaccaagacatgcctgatgcgaaactccccgagagtgctgatgcccccactgtcaccactggagtagagacggagaaggtgcccgctgtcacaggcgacgatgctaccactggcgacaagcgcaaagctgatgaagctgctaagcctgacaatgaggggaaagcagaggaacctgccgacaagaagcagaagacagagaccaacggtgctgcgacgactaatggtggtgctagaaagcctggcaggccaaagaaggagaagggcaaggcggcagctgctccggctccagctgcgccgatcggacgcgccgcaaggaggacgagaagccagggtctgaccgatgcctgagccggcggtcagagattgaaatgatctggactgcaataaacgaatgacatgacacggattgagttgatgcgtgctttggacttgacaggttgcctcctgaagtctgggtactgcgttggatgaggactgatgcttacattgcagcaatgagggatgatgagagaaaatggttaaagcttatggttatgaagttcggataacattcgtggaataggctgatggcttgcgtttccaggatgaaactggatatcggcccaattgaatggcttgacttctgcgctaggatgtcgacttggcctgggatcacacgaggagggcaaggcgcattgcttgtacatataatcaacatgcgatagtggcttgagttgattttacggcatgtcttcttcatggatctttgctgtgctcgtggtgtgcttattataaggttgcctgtgcagtcgatcacaatgactctccacctcgtcgtcgttcagaatcgtggaggcgagcagggtcagagcccctgcgttcaccttctaggagatttcgtatcccgtactacactgggataatctttgtgctcccttttacctgcataccctgagctagctgatgagatggcttgtagcccgcttgaccccttcgtgcggattgatgaattgattgcttcttgataatatctagttctgctgagagtgaacgatcgtgaatgatgccatgccatgggcaaaaagacttatcgctgagatttgagatgccctgagttgaagccatcatcttgttgcacaccatcaattgacgaccccctttgtcaatatgcaacttataactttcatgt

SEQ ID NO: 19752 - DNA, 864 bp, Muscodor strobelii
  misc_feature: SGI cDNA ID NO. 566650
  misc_feature: Encodes the peptide sequence at SEQ ID NO 19753
atgatccaagttgctggcgaccgtcccaccgttgctggctaccagccaaactcgcctgccaacggataccccgccatttccaaacccactcggccatcatcaagttcactgcactgcatctgtgatgaattaggggaaaaactcgataaatttctagccgaggaaccaaaatcggccacacttcggaatgtgcaggcccgagtacgcgaggcggtaggcgtggtagacgaggcgctccggcggtactctcccgaagaaatatctttatcatataatggaggcaaagattgtctcgtcctactcatcataatacttgcctgtctctcccgccgaaacacacaatcgaaagcaacaaatggccagtcgaatgcgcctccactccccgacaaacttcaatctgtatatatcgtatcgccacatccattcgccgagatagacgagttcgtagagagctcctgtgccgaatatcatttagaaaatacgcgctacgagctggggatgaagcaaggcttagaaaaatacctagcagagcgacctaatatcaaggccatatttgttggcacgcggcggacggatccccatggggagaagttgacacatttcgaccccaccgatgccggatggcctgacttcatgcggatacaccccgtaattgactggcattatgccgatatctgggctttcatacggcaattggatattccatactgtccattatatgaccagggatatacgagtctaggtggtactgaagacacccatcccaaccccaatcttaagaagtcggatggaagcggagcaggtttcctcccggcctacgaattagtaggggatgaagaggaacgactcgggagagataaatga

SEQ ID NO: 19753 - protein, 287 aa, Muscodor strobelii
  misc_feature: SGI Peptide ID NO. 566650
  misc_feature (86)..(255): Pfam Id: PF01507 Pfam Desc: Phosphoadenosine phosphosulfate reductase family
  misc_feature (167)..(255): Pfam Id: PF01507 Pfam Desc: Phosphoadenosine phosphosulfate reductase family
  misc_feature (86)..(102): Pfam Id: PF01507 Pfam Desc: Phosphoadenosine phosphosulfate reductase family
  misc_feature (31)..(287): NCBI GI: 171687190 Blast Desc: protein product [Podospora anserina] gi|170943556|emb|CAP69209.1| protein product [Podospora anserina]
  misc_feature (36)..(287): NCBI GI: 145612043 Blast Desc: MGG_12267 [Magnaporthe grisea 70-15] gi|145019286|gb|EDK03514.1| MGG_12267 [Magnaporthe grisea 70-15]
  misc_feature (41)..(286): NCBI GI: 156049235 Blast Desc: SS1G_08324 [Sclerotinia sclerotiorum 1980] gi|154692723|gb|EDN92461.1| SS1G_08324 [Sclerotinia sclerotiorum 1980]
  misc_feature (36)..(287): NCBI GI: 164423040 Blast Desc: NCU09233 [Neurospora crassa OR74A] gi|157069923|gb|EAA34574.2| NCU09233 [Neurospora crassa OR74A]
  misc_feature (36)..(287): NCBI GI: 38566980 Blast Desc: conserved [Neurospora crassa]
  misc_feature (41)..(286): NCBI GI: 154299692 Blast Desc: BC1G_11472 [Botryotinia fuckeliana B05.10] gi|150857162|gb|EDN32354.1| BC1G_11472 [Botryotinia fuckeliana B05.10]
  misc_feature (32)..(222): NCBI GI: 256720904 Blast Desc: [Nectria haematococca mpVI 77-13-4]
  misc_feature (36)..(287): NCBI GI: 212536412 Blast Desc: FAD synthetase, [Penicillium marneffei ATCC 18224] gi|210070761|gb|EEA24851.1| FAD synthetase, [Penicillium marneffei ATCC 18224]
  misc_feature (37)..(286): NCBI GI: 225558606 Blast Desc: FAD synthetase [Ajellomyces capsulatus G186AR]
  misc_feature (36)..(285): NCBI GI: 240106381 Blast Desc: Phosphoadenosine phosphosulfate reductase domain containing protein [Coccidioides posadasii C735 delta SOWgp]
  misc_feature (67)..(275): SWISSPROT Homolog: EC 2.7.7.2 FAD synthetase
MIQVAGDRPTVAGYQPNSPANGYPAISKPTRPSSSSLHCICDELGEKLDKFLAEEPKSATLRNVQARVREAVGVVDEALRRYSPEEISLSYNGGKDCLVLLIIILACLSRRNTQSKATNGQSNAPPLPDKLQSVYIVSPHPFAEIDEFVESSCAEYHLENTRYELGMKQGLEKYLAERPNIKAIFVGTRRTDPHGEKLTHFDPTDAGWPDFMRIHPVIDWHYADIWAFIRQLDIPYCPLYDQGYTSLGGTEDTHPNPNLKKSDGSGAGFLPAYELVGDEEERLGRDK

SEQ ID NO: 19754 - DNA, 1501 bp, Muscodor strobelii
  misc_feature: SGI EST ID NO. CUFF.46262.0
  misc_feature: Variant of the nucleotide sequence at SEQ ID NO 19752
cttcgacagcattcgattgttcactgcactcgtggcccgaggcaagggacggcacggcgcggcctccgatgtcttgtcatatccacatgcaactctgaatgttttcttttctcataccttcggcagttatacttatcctatagataatcctgtatctgttaatactgtcgcgctcttctgccgtgttgacacgctctagcacctcggaacattgctgaatggagtcgtaccccgccatttgccgtcattagagcttgcgcgactgtcagacttccagtcggtggtccttggtacgaattggtattcaagccgccacgataggcagtaatccagacgcaaggaaccgtgttttagaagctgtactttcacgaaaactctcataaaactctcataatgatccaagttgctggcgaccgtcccaccgttgctggctaccagccaaactcgcctgccaacggataccccgccatttccaaacccactcggccatcatcaagttcactgcactgcatctgtgatgaattaggggaaaaactcgataaatttctagccgaggaaccaaaatcggccacacttcggaatgtgcaggcccgagtacgcgaggcggtaggcgtggtagacgaggcgctccggcggtactcgtgtgtctcacctttgcgacaacatccctcgacatcttgctaagtctcgtcctactcatcataatacttgcctgtctctcccgccgaaacacacaatcgaaagcaacaaatggccagtcgaatgcgcctccactccccgacaaacttcaatctgtatatatcgtatcgccacatccattcgccgagatagacgagttcgtagagagctcctgtgccgaatatcatttagaaaatacgcgctacgagctggggatgaagcaaggcttagaaaaatacctagcagagcgacctaatatcaaggccatatttgttggcacgcggcggacggatccccatggggagaagttgacacatttcgaccccaccgatgccggatggcctgacttcatgcggatacaccccgtaattgactggcattatgccgatatctgggctgtatgtttcagcaactcaatattcatcactcttgacagttaagaaatgacgaactgccactaacactctaccagttcatacggcaattggatattccatactgtccattatatgaccagggatatacgagtctaggtggtactgaagacacccatcccaaccccaatcttaagaagtcggatggaagcggagcaggtttcctcccggcctacgaattagtaggggatgaagaggaacgactcgggagagataaatgatagatgataccgatataaatcatgctcttacactcaactcattagcgggcatgtgcattgcaagaagtgaaggttttgtatagagcatagaactatggcgttttgatcggtgaattctgaagaagataactctttcaatatattttgacaacctcgctgtcatccatc

SEQ ID NO: 19755 - DNA, 3291 bp, Muscodor strobelii
  misc_feature: SGI cDNA ID NO. 566651
  misc_feature: Encodes the peptide sequence at SEQ ID NO 19756
atggtggcgcaactagaacgcgatgccttcctcttgtcggctgagcatgtcgcgaaaggcttgggtacagacacagagaagggtctgtcgtctgctcaggtggcccaattacagaaggaacatcctcccaacgaactagatgttggcggtgccattgcgtggtacaagattctattcaagcagttcgctaatgctatgatcttggtcctggttcttgcaacgatcctaagttttgtagtgaaagactatgttgaagggggcgttctccttggagtcatatttctaaatgcattcatcggcttttaccaagaatttggggcagagaagaagatggatgctcttagactcctttcttccccctcggcgactgttctgcgcgatggcaaaacatcagttattgccaatgctgaggtagtcccaggcgatatcatactcctgaaaatgggcgatacgatacccgccgaccttcgtctcttcgaagtaatgaacttagcagctgatgaagagtccttaacgggagaatcattgcctgctgacaagaccgtggagattctcgaccaccccgagcttggcattggcgatcggacgaacattgcttatggtacaacaactgttcagaaaggccgtggccgtggtatagtcgtctcgacagggatggagacggaggtcggcaaaattgctgcgtccacagcaaaaaagcctcgtaaagctggccgctcaatgaactacaagaaatatgggaaaagccagccggtcattggcctctcgaagcggatttacgatttcatcgggaagtttcttggactgactgaagggacaccgctacagcgaaaactgtctaagcttgcctatgtcctctttggctgtgctcttgtcttggcgttgattgtctttgctgtcaacgagttcaatagctcccaagaggttgtcctctatgctattagcactggaattgctataattcccgagtctcttgttgctgttctgactttgaccatggttgtcgctgttactgtgatgcgaaaggcaaacgtcgttgttcgtgatctgtccgcacttgaagcgctcggtggtgtgaccaatatctgctctgacaaaactgggaccttgactcaaggtgctatgatcgttcaaaaagtttggctgccgatgcaagcaatctacactgtacgagattcaaaacatcctaacaatcctacggcgggtcgggttagcgtctcacaaatcgaagatgcagctactcagaatcctccccgtgacttcgatcaagaacagagtaccgcaaaactccgattcgatatccctgagaaagaagtcagtcagggccagagcccaaccaaagcaagtgaagacgaagaaccggaagcagagatgactcctcatttagaggccttcttacggtccgctgcgctgtgcaatcttgcaacagtgagacacgaggagcaccctactggcgatcagctggagtggcaggcaactggtgaaccaacggagatcgctctgcaagtctttgcacacaggtttgagcgggggaagaagtctatgcaaagtcaaggctggaaacaagttgcggaattcccttttgacagcagtatcaaacgcatgtccgtcatttacaacggaccctcgcatgatgatagtattgttctgacaaaaggtgcagtcgagcgcattgtcgatctgtgtacttcagttcgtgtgggagatcgggatcagccaatgaccgatgagctgaaaggccgcatactagagcaaatggactcctttgctagtctgggtcaaagagtgcttgctatcgcttcacggcaatgggatggcaagtaccaagacgagaaaagttcggaaccaaacggcggcgacgacgcaatccgacagcatgtggaatcgaatctgacgcttctgggtctagctggaatctacgacccgcctcgcacagagacaacggctgctattgctgaatgttcaacagctggaatccgtgtccacatgctgactggcgatcatcctaccacggcagaagccatagctaaagaagtcggtattatcccacgcgacttaggcgttttgagtgaatccgttgccaaatcaattgtgcaaaaggcaagcgactttgacaagttgagcgacgctgaaattgatgcgttgcccgagctacctcttgttctcgctagatgtgctccggataccaagacacgcatgattgatgcgctacggcgccgaggcgctttcatggcgatgactggcgatggagtcaatgatgcgccctctctgtcgcgtgccgacgttggtatcgcaatgggctccggctccgacgttgctaagtctgctgcgaagatcgtgctggtcgacgacaaattcaactcaattgttgcagccattcgagaaggacgccgcatgtttgacaacattcagaagtttatcttgcacctgcttacatccaacgtaggcgaggtcattctcctcatcgtgggactcgcattcagagataaatctcgactatccgtgtttcctatctcgccattgcagattctgtggatcaatctcctgacctctagcttccctgccttcggacttgggcgcgaactcgcatcaccattgatcatgaacaagccaccacatgacaagaaaagcggtgtgttcacctggcaggttctgtgcgatatgcttgtatacggcatcctcatgggtaccttgacacttgcgagcttcgtcgtcgttgtctacggcgcgggtaatggaaatttgggcgagaattgtaacaaggcatattcggaatcctgcgataccgtgttccgggcccgagccacagttttcgccgagttgacttggctaatcctcatcagcgcttgggaatttaaggatctacggcggtcgctttttcgattgcatcctaatgatacgagacgattcccgctgttcgctgatttgtgggcaaacaaggttctcttctgggcagtcgtcgtcggtgccttaagtgtgttccccgtggtgtatatcccgaagctcaacacgaatgtattcaaacatacaggcatctcttgggagtgggctattgccgtcgttgcaacggtgttgtttgtcgctggtatggagctctggaagttgatgaagagagaatttagactgtttgaggataaggctgttgttggaggtccgttcaaccagggaagtgaggcacagggtcgactttctagggtgttgagtatggtcagtgtcaggagtttgaagagcgagaagcgaaagaacacggacgagactagcaatccttttgtgaccctgcagctgtcatga

SEQ ID NO: 19756 - protein, 1096 aa, Muscodor strobelii
  misc_feature: SGI Peptide ID NO. 566651
  misc_feature (359)..(770): Pfam Id: PF00702 Pfam Desc: haloacid dehalogenase-like hydrolase
  misc_feature (870)..(1040): Pfam Id: PF00689 Pfam Desc: Cation transporting ATPase, C-terminus
  misc_feature (1)..(82): Pfam Id: PF00690 Pfam Desc: Cation transporter/ATPase, N-terminus
  misc_feature (88)..(355): Pfam Id: PF00122 Pfam Desc: E1-E2 ATPase
  misc_feature (88)..(228): Pfam Id: PF00122 Pfam Desc: E1-E2 ATPase
  misc_feature (270)..(355): Pfam Id: PF00122 Pfam Desc: E1-E2 ATPase
  misc_feature (748)..(793): Pfam Id: PF08282 Pfam Desc: haloacid dehalogenase-like hydrolase
  misc_feature (1)..(1086): NCBI GI: 46116806 Blast Desc: FG04245.1 [Gibberella zeae PH-1]
  misc_feature (1)..(1086): NCBI GI: 256725574 Blast Desc: [Nectria haematococca mpVI 77-13-4]
  misc_feature (3)..(1062): NCBI GI: 39940324 Blast Desc: MGG_05078 [Magnaporthe grisea 70-15] gi|145010668|gb|EDJ95324.1| MGG_05078 [Magnaporthe grisea 70-15]
  misc_feature (1)..(1092): NCBI GI: 171676956 Blast Desc: protein product [Podospora anserina] gi|170936545|emb|CAP61205.1| protein product [Podospora anserina]
  misc_feature (1)..(1080): NCBI GI: 116196656 Blast Desc: CHGG_04926 [Chaetomium globosum CBS 148.51] gi|88180839|gb|EAQ88307.1| CHGG_04926 [Chaetomium globosum CBS 148.51]
  misc_feature (9)..(1044): NCBI GI: 154291141 Blast Desc: BC1G_15342 [Botryotinia fuckeliana B05.10] gi|150847058|gb|EDN22251.1| BC1G_15342 [Botryotinia fuckeliana B05.10]
  misc_feature (1)..(1083): NCBI GI: 261359042 Blast Desc: calcium-transporting ATPase [Verticillium albo-atrum VaMs.102]
  misc_feature (4)..(1079): NCBI GI: 85106107 Blast Desc: NCU07966 [Neurospora crassa OR74A] gi|28923694|gb|EAA32863.1| conserved [Neurospora crassa OR74A]
  misc_feature (9)..(1043): NCBI GI: 156044746 Blast Desc: SS1G_10477 [Sclerotinia sclerotiorum 1980] gi|154694865|gb|EDN94603.1| SS1G_10477 [Sclerotinia sclerotiorum 1980]
  misc_feature (6)..(1078): NCBI GI: 225558952 Blast Desc: P-type Na+-ATPase [Ajellomyces capsulatus G186AR]
  misc_feature (23)..(1040): SWISSPROT Homolog: EC 3.6.3.8 Calcium-transporting ATPase
MVAQLERDAFLLSAEHVAKGLGTDTEKGLSSAQVAQLQKEHPPNELDVGGAIAWYKILFKQFANAMILVLVLATILSFVVKDYVEGGVLLGVIFLNAFIGFYQEFGAEKKMDALRLLSSPSATVLRDGKTSVIANAEVVPGDIILLKMGDTIPADLRLFEVMNLAADEESLTGESLPADKTVEILDHPELGIGDRTNIAYGTTTVQKGRGRGIVVSTGMETEVGKIAASTAKKPRKAGRSMNYKKYGKSQPVIGLSKRIYDFIGKFLGLTEGTPLQRKLSKLAYVLFGCALVLALIVFAVNEFNSSQEVVLYAISTGIAIIPESLVAVLTLTMVVAVTVMRKANVVVRDLSALEALGGVTNICSDKTGTLTQGAMIVQKVWLPMQAIYTVRDSKHPNNPTAGRVSVSQIEDAATQNPPRDFDQEQSTAKLRFDIPEKEVSQGQSPTKASEDEEPEAEMTPHLEAFLRSAALCNLATVRHEEHPTGDQLEWQATGEPTEIALQVFAHRFERGKKSMQSQGWKQVAEFPFDSSIKRMSVIYNGPSHDDSIVLTKGAVERIVDLCTSVRVGDRDQPMTDELKGRILEQMDSFASLGQRVLAIASRQWDGKYQDEKSSEPNGGDDAIRQHVESNLTLLGLAGIYDPPRTETTAAIAECSTAGIRVHMLTGDHPTTAEAIAKEVGIIPRDLGVLSESVAKSIVQKASDFDKLSDAEIDALPELPLVLARCAPDTKTRMIDALRRRGAFMAMTGDGVNDAPSLSRADVGIAMGSGSDVAKSAAKIVLVDDKFNSIVAAIREGRRMFDNIQKFILHLLTSNVGEVILLIVGLAFRDKSRLSVFPISPLQILWINLLTSSFPAFGLGRELASPLIMNKPPHDKKSGVFTWQVLCDMLVYGILMGTLTLASFVVVVYGAGNGNLGENCNKAYSESCDTVFRARATVFAELTWLILISAWEFKDLRRSLFRLHPNDTRRFPLFADLWANKVLFWAVVVGALSVFPVVYIPKLNTNVFKHTGISWEWAIAVVATVLFVAGMELWKLMKREFRLFEDKAVVGGPFNQGSEAQGRLSRVLSMVSVRSLKSEKRKNTDETSNPFVTLQLS

SEQ ID NO: 19757 - DNA, 5539 bp, Muscodor strobelii
  misc_feature: SGI EST ID NO. CUFF.46369.0
  misc_feature: Variant of the nucleotide sequence at SEQ ID NO 19755
cgacaacgtgttgccaagtgacagccgagaaagccaagcttgggccaagttgggcggatcaagcatggcgtgaccaaaactcaaaggtcgacaatgttttttgtcacgtggcaatccagaaatttgtccagtcgagccaatcctcggccaattcctcactccgagcgccaggctttcagtcccaacagcctctgtgcccagctatgccaagtgctaagtcgctgcactgcccaaaccacaaatcctgcaacgcgcgagtcgactacatctcgtactacctcgtcaatcaaccgcttctcgacgagcgaaatggcatggcagcgtcatcgtagtatgccaccgacgtccagaattttcggtgcacacctgccaagccttggacaacgttgcccaggcttggagccaagttcatactaatagcacaagtgaaaatatgcccgtctctgaagtgaattttcgccttcctgctgcattactgatgtgatatcgtagcaatcgaccccgcggccagcctcagaagtggcgtcatttgactttgctagaactaatgccaatctttgactatccgctacctcatccaatgagtgttcttgtatgctgcccgatcatgtccgacatcttagatctggggttggtgccatccccaagtctctggatgtagcgccaatgatggtatccttatcattgagcaagtattgcgccatgtatccttgacataccttggatatccatatgtacatataagacacctttgctcccctcgtcgaatactttggatctgttctaaagcataaggtagttcattcgacttgctgctaaattacaattgggtcttctagaatctgccttctattgttcatcgctcaattcaactcttgatgcagtcaacatatatgattcaagtatcgtattcagttcaagtacaggaaccaccaattcacaatggtggcgcaactagaacgcgatgccttcctcttgtcggctgagcatgtcgcgaaaggcttgggtacagacacagagaagggtctgtcgtctgctcaggtggcccaattacagaaggaacatcctcccaacgaactagatgttggcggtgccattgcgtggtacaagattctattcaagcagttcgctaatgctatgatcttggtcctggttcttgcaacgatcctaagttttgtagtgaaagactatgttgaagggggcgttctccttggagtcatatttctaaatgcattcatcggcttttaccaagaatttggggcagagaagaagatggatgctcttagactcctttcttccccctcggcgactgttctgcgcgatggcaaaacatcagttattgccaatgctgaggtagtcccaggcgatatcatactcctgaaaatgggcgatacgatacccgccgaccttcgtctcttcgaagtaatgaacttagcagctgatgaagagtccttaacgggagaatcattgcctgctgacaagaccgtggagattctcgaccaccccgagcttggcattggcgatcggacgaacattgcttatggtacaacaactgttcagaaaggccgtggccgtggtatagtcgtctcgacagggatggagacggaggtcggcaaaattgctgcgtccacagcaaaaaagcctcgtaaagctggccgctcaatgaactacaagaaatatgggaaaagccagccggtcattggcctctcgaagcggatttacgatttcatcgggaagtttcttggactgactgaagggacaccgctacagcgaaaactgtctaagcttgcctatgtcctctttggctgtgctcttgtcttggcgttgattgtctttgctgtcaacgagttcaatagctcccaagaggttgtcctctatgctattagcactggaattgctataattcccgagtctcttgttgctgttctgactttgaccatggttgtcgctgttactgtgatgcgaaaggcaaacgtcgttgttcgtgatctgtccgcacttgaagcgctcggtggtgtgaccaatatctgctctgacaaaactgggaccttgactcaaggtgctatgatcgttcaaaaagtttggctgccgatgcaagcaatctacactgtacgagattcaaaacatcctaacaatcctacggcgggtcgggttagcgtctcacaaatcgaagatgcagctactcagaatcctccccgtgacttcgatcaagaacagagtaccgcaaaactccgattcgatatccctgagaaagaagtcagtcagggccagagcccaaccaaagcaagtgaagacgaagaaccggaagcagagatgactcctcatttagaggccttcttacggtccgctgcgctgtgcaatcttgcaacagtgagacacgaggagcaccctactggcgatcagctggagtggcaggcaactggtgaaccaacggagatcgctctgcaagtctttgcacacaggtttgagcgggggaagaagtctatgcaaagtcaaggctggaaacaagttgcggaattcccttttgacagcagtatcaaacgcatgtccgtcatttacaacggaccctcgcatgatgatagtattgttctgacaaaaggtgcagtcgagcgcattgtcgatctgtgtacttcagttcgtgtgggagatcgggatcagccaatgaccgatgagctgaaaggccgcatactagagcaaatggactcctttgctagtctgggtcaaagagtgcttgctatcgcttcacggcaatgggatggcaagtaccaagacgagaaaagttcggaaccaaacggcggcgacgacgcaatccgacagcatgtggaatcgaatctgacgcttctgggtctagctggaatctacgacccgcctcgcacagagacaacggctgctattgctgaatgttcaacagctggaatccgtgtccacatgctgactggcgatcatcctaccacggcagaagccatagctaaagaagtcggtattatcccacgcgacttaggcgttttgagtgaatccgttgccaaatcaattgtgcaaaaggcaagcgactttgacaagttgagcgacgctgaaattgatgcgttgcccgagctacctcttgttctcgctagatgtgctccggataccaagacacgcatgattgatgcgctacggcgccgaggcgctttcatggcgatgactggcgatggagtcaatgatgcgccctctctgtcgcgtgccgacgttggtatcgcaatgggctccggctccgacgttgctaagtctgctgcgaagatcgtgctggtcgacgacaaattcaactcaattgttgcagccattcgagaaggacgccgcatgtttgacaacattcagaagtttatcttgcacctgcttacatccaacgtaggcgaggtcattctcctcatcgtgggactcgcattcagagataaatctcgactatccgtgtttcctatctcgccattgcagattctgtggatcaatctcctgacctctagcttccctgccttcggacttgggcgcgaactcgcatcaccattgatcatgaacaagccaccacatgacaagaaaagcggtgtgttcacctggcaggttctgtgcgatatgcttgtatacggcatcctcatgggtaccttgacacttgcgagcttcgtcgtcgttgtctacggcgcgggtaatggaaatttgggcgagaattgtaacaaggcatattcggaatcctgcgataccgtgttccgggcccgagccacagttttcgccgagttgacttggctaatcctcatcagcgcttgggaatttaaggatctacggcggtcgctttttcgattgcatcctaatgatacgagacgattcccgctgttcgctgatttgtgggcaaacaaggttctcttctgggcagtcgtcgtcggtgccttaagtgtgttccccgtggtgtatatcccgaagctcaacacgaatgtattcaaacatacaggcatctcttgggagtgggctattgccgtcgttgcaacggtgttgtttgtcgctggtatggagctctggaagttgatgaagagagaatttagactgtttgaggataaggctgttgttggaggtccgttcaaccagggaagtgaggcacagggtcgactttctagggtgttgagtatggtcagtgtcaggagtttgaagagcgagaagcgaaagaacacggacgagactagcgtaagtatggatggtaggccgtagagcattatggaactgggatatatatcgttgtctttgggagttttgcttgagatatttgttgaaactacttagctattatgaacagaatccttttgtgaccctgcagctgtcatgaagatgggcatattagatgggcccttgtcggcaaagttcgtcgtactaactctaatcttactcgaatgactgggtcccaaacacctgcgcttgatcgcaaaaaccggctcatgaggctgtcacaataacatctggtgctcagaaggaaaaaactaagtgttacgacaacgtattaccatattgaacctcatcaatcaaaaaatacatactactcatacacatatttcatcatccagtattacagtatttagttactctttcccgaggtaccgcccatcttgtcctggaccatgccaccaattgacccctcggtcgtgaactgcttgccgatcatgccctccttatctaagggaccgccgattttctgcgctgcgccaccgacggctccttgttctgttcgtggagtgttaaattaggcatagcagaaatcagaagtgggataggaatggggatgtttgtatgctgctcaaaaagaactatgttgagtagtggatgtgccgtgtgatggggcaatgtgagtagtgcactttattgctggcacgtttgacacagggaggtaagtaatcgcatgcgcacctgtgaattgctttccaattgcgccctgtgcatcaaatgcctttggcttgtcctcgccgatgcctgcgttggctggtgtcgtggttgatgaggccatgcctgtggaggtcttggagccggtgttggagcttccgtgggacgacattttgatggaactgtgtggatttgtctgattgaacttgtagagacttctcttattgtttgttgcaaagtatgttaatgcgcagttgcagcctggtattgaaataatttggcttgttcattcaattcgcattgcagtttatatacactctggagtatgagaggagatcaaagccagtgatggtccatgaggtcataaatcgtcatgcgatcggccacagctgttgttgtgctggtacctccgattgtcgccataggcagtccaccttcaagctctaggtaaaatttctcgcattaattagaaagagaatgtttctcgatctttgggtttcttaggtgggtcttattgcttcatcaaattgttgtatctggcaaatacatttgggaatttgttcgccagtgttggcttttggagggatggtatctcgaagtgcaagcggcctaaataccggctagcatccatgtacctccatgtgtgcta

SEQ ID NO: 19758 - DNA, 291 bp, Muscodor strobelii
  misc_feature: SGI cDNA ID NO. 566652
  misc_feature: Reduced expression when VOC is produced
  misc_feature: Encodes the peptide sequence at SEQ ID NO 19759
atgtcgtcccacggaagctccaacaccggctccaagacctccacaggcatggcctcatcaaccacgacaccagccaacgcaggcatcggcgaggacaagccaaaggcatttgatgcacagggcgcaattggaaagcaattcacagaacaaggagccgtcggtggcgcagcgcagaaaatcggcggtcccttagataaggagggcatgatcggcaagcagttcacgaccgaggggtcaattggtggcatggtccaggacaagatgggcggtacctcgggaaagagtaactaa

SEQ ID NO: 19759 - protein, 96 aa, Muscodor strobelii
  misc_feature: SGI Peptide ID NO. 566652
  misc_feature (6)..(96): NCBI GI: 171691076 Blast Desc: protein product [Podospora anserina] gi|170945486|emb|CAP71598.1| protein product [Podospora anserina]
  misc_feature (6)..(90): NCBI GI: 85107269 Blast Desc: NCU06597 [Neurospora crassa OR74A] gi|28923943|gb|EAA33103.1| [Neurospora crassa OR74A]
  misc_feature (34)..(90): NCBI GI: 46111959 Blast Desc: FG02861.1 [Gibberella zeae PH-1]
  misc_feature (34)..(90): NCBI GI: 256723933 Blast Desc: NECHADRAFT_37190 [Nectria haematococca mpVI 77-13-4]
  misc_feature (6)..(91): NCBI GI: 39968033 Blast Desc: MGG_02109 [Magnaporthe grisea 70-15] gi|145012991|gb|EDJ97632.1| MGG_02109 [Magnaporthe grisea 70-15]
  misc_feature (29)..(90): NCBI GI: 189190430 Blast Desc: conserved [Pyrenophora tritici-repentis Pt-1C-BFP] gi|187973160|gb|EDU40659.1| conserved [Pyrenophora tritici-repentis Pt-1C-BFP]
  misc_feature (29)..(92): NCBI GI: 169611873 Blast Desc: SNOG_09051 [Phaeosphaeria nodorum SN15] gi|111062123|gb|EAT83243.1| SNOG_09051 [Phaeosphaeria nodorum SN15]
  misc_feature (6)..(92): NCBI GI: 154313966 Blast Desc: [Botryotinia fuckeliana B05.10] gi|150849072|gb|EDN24265.1| [Botryotinia fuckeliana B05.10]
  misc_feature: Useful for introducing or modulating the production of volatile compounds
MSSHGSSNTGSKTSTGMASSTTTPANAGIGEDKPKAFDAQGAIGKQFTEQGAVGGAAQKIGGPLDKEGMIGKQFTTEGSIGGMVQDKMGGTSGKSN

SEQ ID NO: 19760 - DNA, 3371 bp, Muscodor strobelii
  misc_feature: SGI EST ID NO. CUFF.46370.1
  misc_feature: Variant of the nucleotide sequence at SEQ ID NO 19758
tagcacacatggaggtacatggatgctagccggtatttaggccgcttgcacttcgagataccatccctccaaaagccaacactggcgaacaaattcccaaatgtatttgccagatacaacaatttgatgaagcaataagacccacctaagaaacccaaagatcgagaaacattctctttctaattaatgcgagaaattttacctagagcttgaaggtggactgcctatggcgacaatcggaggtaccagcacaacaacagctgtggccgatcgcatgacgatttatgacctcatggaccatcactggctttgatctcctctcatactccagagtgtatataaactgcaatgcgaattgaatgaacaagccaaattatttcaataccaggctgcaactgcgcattaacatactttgcaacaaacaataagagaagtctctacaagttcaatcagacaaatccacacagttccatcaaaatgtcgtcccacggaagctccaacaccggctccaagacctccacaggcatggcctcatcaaccacgacaccagccaacgcaggcatcggcgaggacaagccaaaggcatttgatgcacagggcgcaattggaaagcaattcacagaacaaggagccgtcggtggcgcagcgcagaaaatcggcggtcccttagataaggagggcatgatcggcaagcagttcacgaccgaggggtcaattggtggcatggtccaggacaagatgggcggtacctcgggaaagagtaactaaatactgtaatactggatgatgaaatatgtgtatgagtagtatgtattttttgattgatgaggttcaatatggtaatacgttgtcgtaacacttagttttttccttctgagcaccagatgttattgtgacagcctcatgagccggtttttgcgatcaagcgcaggtgtttgggacccagtcattcgagtaagattagagttagtacgacgaactttgccgacaagggcccatctaatatgcccatcttcatgacagctgcagggtcacaaaaggattctgttcataatagctaagtagtttcaacaaatatctcaagcaaaactcccaaagacaacgatatatatcccagttccataatgctctacggcctaccatccatacttacgctagtctcgtccgtgttctttcgcttctcgctcttcaaactcctgacactgaccatactcaacaccctagaaagtcgaccctgtgcctcacttccctggttgaacggacctccaacaacagccttatcctcaaacagtctaaattctctcttcatcaacttccagagctccataccagcgacaaacaacaccgttgcaacgacggcaatagcccactcccaagagatgcctgtatgtttgaatacattcgtgttgagcttcgggatatacaccacggggaacacacttaaggcaccgacgacgactgcccagaagagaaccttgtttgcccacaaatcagcgaacagcgggaatcgtctcgtatcattaggatgcaatcgaaaaagcgaccgccgtagatccttaaattcccaagcgctgatgaggattagccaagtcaactcggcgaaaactgtggctcgggcccggaacacggtatcgcaggattccgaatatgccttgttacaattctcgcccaaatttccattacccgcgccgtagacaacgacgacgaagctcgcaagtgtcaaggtacccatgaggatgccgtatacaagcatatcgcacagaacctgccaggtgaacacaccgcttttcttgtcatgtggtggcttgttcatgatcaatggtgatgcgagttcgcgcccaagtccgaaggcagggaagctagaggtcaggagattgatccacagaatctgcaatggcgagataggaaacacggatagtcgagatttatctctgaatgcgagtcccacgatgaggagaatgacctcgcctacgttggatgtaagcaggtgcaagataaacttctgaatgttgtcaaacatgcggcgtccttctcgaatggctgcaacaattgagttgaatttgtcgtcgaccagcacgatcttcgcagcagacttagcaacgtcggagccggagcccattgcgataccaacgtcggcacgcgacagagagggcgcatcattgactccatcgccagtcatcgccatgaaagcgcctcggcgccgtagcgcatcaatcatgcgtgtcttggtatccggagcacatctagcgagaacaagaggtagctcgggcaacgcatcaatttcagcgtcgctcaacttgtcaaagtcgcttgccttttgcacaattgatttggcaacggattcactcaaaacgcctaagtcgcgtgggataataccgacttctttagctatggcttctgccgtggtaggatgatcgccagtcagcatgtggacacggattccagctgttgaacattcagcaatagcagccgttgtctctgtgcgaggcgggtcgtagattccagctagacccagaagcgtcagattcgattccacatgctgtcggattgcgtcgtcgccgccgtttggttccgaacttttctcgtcttggtacttgccatcccattgccgtgaagcgatagcaagcactctttgacccagactagcaaaggagtccatttgctctagtatgcggcctttcagctcatcggtcattggctgatcccgatctcccacacgaactgaagtacacagatcgacaatgcgctcgactgcaccttttgtcagaacaatactatcatcatgcgagggtccgttgtaaatgacggacatgcgtttgatactgctgtcaaaagggaattccgcaacttgtttccagccttgactttgcatagacttcttcccccgctcaaacctgtgtgcaaagacttgcagagcgatctccgttggttcaccagttgcctgccactccagctgatcgccagtagggtgctcctcgtgtctcactgttgcaagattgcacagcgcagcggaccgtaagaaggcctctaaatgaggagtcatctctgcttccggttcttcgtcttcacttgctttggttgggctctggccctgactgacttctttctcagggatatcgaatcggagttttgcggtactctgttcttgatcgaagtcacggggaggattctgagtagctgcatcttcgatttgtgagacgctaacccgacccgccgtaggattgttaggatgttttgaatctcgtacagtgtagattgcttgcatcggcagccaaactttttgaacgatcatagcaccttgagtcaaggtcccagttttgtcagagcagatattggtcacaccaccgagcgcttcaagtgcggacagatca

SEQ ID NO: 19761 - DNA, 618 bp, Muscodor strobelii
  misc_feature: SGI cDNA ID NO. 566653
  misc_feature: Encodes the peptide sequence at SEQ ID NO 19762
atggtcgttagatctgtggcgctcctcggaaaggccaatgcgagagccgccgctgtgttgaaacgctctatgctgaaatacgtgcccgattcgtcagagcaagcttctcgcccgaaagtcgtctcattcaattcggtacggaagaccaaagcggaaaaagaagcgcaagcgagagctcaacaggagtctctcaggttagaccacgtgcttgcgtcaagacctgtccaaaccctcaaggagaaaaccgctccatatgcttcattcgatcgacagatcaacattgacctaatcgcctccctcgcatctgcgaatggtggtcgcgacgcgcttcgtgtcctggagcgtcttgaagatccgaatgccgaggcgctcttgctaaaaggtctcagatgcttgcaagcgtatcacgaagcatacaacaaattggacagggaagaagcccgtaagatgattatcgaggacggtgcagcggaaataatcatagattgggtgcaacgaccggcagtttgggacttgctataccaggcattcagtttcgattatgactgtcctctattcaaaactaggttgttcgttggcccttcaaacgtcagagctcgggagaaaccgacctgctaa

SEQ ID NO: 19762 - protein, 205 aa, Muscodor strobelii
  misc_feature: SGI Peptide ID NO. 566653
MVVRSVALLGKANARAAAVLKRSMLKYVPDSSEQASRPKVVSFNSVRKTKAEKEAQARAQQESLRLDHVLASRPVQTLKEKTAPYASFDRQINIDLIASLASANGGRDALRVLERLEDPNAEALLLKGLRCLQAYHEAYNKLDREEARKMIIEDGAAEIIIDWVQRPAVWDLLYQAFSFDYDCPLFKTRLFVGPSNVRAREKPTC

SEQ ID NO: 19763 - DNA, 793 bp, Muscodor strobelii
  misc_feature: SGI EST ID NO. CUFF.46243.0
  misc_feature: Variant of the nucleotide sequence at SEQ ID NO 19761
tctcaatctctgagtgattgcttttggtggcaacgacgtggctgatgaggcaggatactcaccgcacaacgcatcaatcgtatcacgatacatcttcaatcagatgcagtactcttacacgtcgaatcgcgtccaatcgccatggtcgttagatctgtggcgctcctcggaaaggccaatgcgagagccgccgctgtgttgaaacgctctatgctgaaatacgtgcccgattcgtcagagcaagcttctcgcccgaaagtcgtctcattcaattcggtacggaagaccaaagcggaaaaagaagcgcaagcgagagctcaacaggagtctctcaggttagaccacgtgcttgcgtcaagacctgtccaaaccctcaaggagaaaaccgctccatatgcttcattcgatcgacagatcaacattgacctaatcgcctccctcgcatctgcgaatggtggtcgcgacgcgcttcgtgtcctggagcgtcttgaagatccgaatgccgaggcgctcttgctaaaaggtctcagatgcttgcaagcgtatcacgaagcatacaacaaattggacagggaagaagcccgtaagatgattatcgaggacggtgcagcggaaataatcatagattgggtgcaacgaccggcagtttgggacttgctataccaggcattcagtttcgattatgactgtcctctattcaaaactaggttacaatttctgacccacctgtcacgtacccttataggagctctccgtttggagaaactggaacagtggataatgcactgcccgc

SEQ ID NO: 19764 - DNA, 492 bp, Muscodor strobelii
  misc_feature: SGI cDNA ID NO. 566654
  misc_feature: Reduced expression when VOC is produced
  misc_feature: Encodes the peptide sequence at SEQ ID NO 19765
atgccgaccggtctatcaagcacgatgacaatcgctgcgggcacctcaatactggcatcaggctgggcatcaggtctcggagcaggtttcacaatagccggcatgccagcaatcgtcgctggcggcgcctcaagcgaagtgatgctccgcgagtggcgcttccagtttatacgagggcaatatttcgttccaacgttggggttgctcaatgcagtgaactacttctctatcgcgtaccacgcgtataaccgcggtgctgaatggagaggcttcgcggcagctggattatcaacactctttattgtaccttatacgctgactttcatcatgtcgaccaacgccacactcatggctgaacacgataacgccaagaagatgttgggcgaggcggcaatcaaaacgcttatcaaaaagtggtcggatttgaatgttgtgagggtcattgtgccaatgatcgggacaggcttggcgttgtggaatttcagcctctaa

SEQ ID NO: 19765 - protein, 163 aa, Muscodor strobelii
  misc_feature: SGI Peptide ID NO. 566654
  misc_feature (89)..(161): Pfam Id: PF08592 Pfam Desc: Domain of function (DUF1772)
  misc_feature (1)..(153): NCBI GI: 46109262 Blast Desc: FG01513.1 [Gibberella zeae PH-1]
  misc_feature (11)..(154): NCBI GI: 256730794 Blast Desc: NECHADRAFT_89747 [Nectria haematococca mpVI 77-13-4]
  misc_feature (35)..(158): NCBI GI: 197725398 Blast Desc: HypB2 [Aspergillus ochraceoroseus]
  misc_feature (35)..(153): NCBI GI: 171693181 Blast Desc: protein product [Podospora anserina] gi|170946539|emb|CAP73340.1| protein product [Podospora anserina]
  misc_feature (35)..(158): NCBI GI: 259484168 Blast Desc: TPA: conserved [Aspergillus nidulans FGSC A4]
  misc_feature (35)..(154): NCBI GI: 169774089 Blast Desc: [Aspergillus oryzae RIB40] gi|83769375|dbj|BAE59510.1| protein product [Aspergillus oryzae]
  misc_feature (16)..(154): NCBI GI: 238497429 Blast Desc: aflCa / hypC / [Aspergillus flavus NRRL3357] gi|220694830|gb|EED51174.1| aflCa / hypC / [Aspergillus flavus NRRL3357]
  misc_feature (16)..(154): NCBI GI: 212529428 Blast Desc: conserved [Penicillium marneffei ATCC 18224] gi|210074269|gb|EEA28356.1| conserved [Penicillium marneffei ATCC 18224]
  misc_feature (6)..(158): NCBI GI: 146323931 Blast Desc: conserved [Aspergillus fumigatus Af293] gi|129557464|gb|EAL89348.2| conserved [Aspergillus fumigatus Af293] gi|159125715|gb|EDP50832.1| conserved [Aspergillus A1163]
  misc_feature (14)..(154): NCBI GI: 119189089 Blast Desc: [Coccidioides immitis RS]
  misc_feature: Useful for introducing or modulating the production of volatile compounds
MPTGLSSTMTIAAGTSILASGWASGLGAGFTIAGMPAIVAGGASSEVMLREWRFQFIRGQYFVPTLGLLNAVNYFSIAYHAYNRGAEWRGFAAAGLSTLFIVPYTLTFIMSTNATLMAEHDNAKKMLGEAAIKTLIKKWSDLNVVRVIVPMIGTGLALWNFSL

SEQ ID NO: 19766 - DNA, 2420 bp, Muscodor strobelii
  misc_feature: SGI EST ID NO. CUFF.46250.0
  misc_feature: Variant of the nucleotide sequence at SEQ ID NO 19764
gggaaatctgggcttgacttcggtaggcgggttggagcaacaactacaaccaaacagctgtgtagaatccacgaggatatgcaaatatcacatacttagatccctcctcaatgttcttcgggatgtacaattatatcagtacaaacgcgaatactccttagttccagtatgcctatttttagaaagccgcaactgcattcgcgcactaactgatgtcctatgacctgaccaccgataccaggattgtttctctagagcctacctcattctgccttatgcatagtaacgccaccgcattcattattattagaatgactgcttcaccgtaactcagttgcgcgtctcggtgccattaaattgttaatggttagtctactaaaagagaccagttttgttgaaatatgtaccgtcagtaaacgtcatggactacggtacatctgaggacgcagagacaaggcactttttgcatcgattttgggttctcgaatgttctcccatccaatcacaacatcaagaacggttcaatctaagcctcacctgtcgcaatataagatttgatttgctttacgttagttaaaatatatatatcttcacctttttggattctctatcgaatgaaatgggtaccctggctttcctttcccctcaatgtttcttggctggtgcgcccatcttcctcgttgagcacaagcccctactcggctacttccggcagatgctcgaaattgaaataccactgttcatcgaaactcctaatcaaatgcggctctggagcgatagaatagtgggctaacgtaggcgaggtaaacgtatgaaccgagcggtttttattggtctaccccggccacggtgttaacccaggagtcctggtttcttatccccatcatttcgttgttggattttcgaacactgaaagcgcaatagactggcaacaggctccttgcgatttatcggtgtaaattctatacaattttagattcatctacaagaacgtgtcatttgagaccgatgccgttttcgatccaaattctgccttgagagacatattgattcctacttagtggcactagcaccatttctctcactaaagtgcattggatcctgtcgcttgtcattggatgccctcttcgcatgagacagtgctaaacagattcatcgggacttttgccctatattgagattgcgaatgaattgacagagcagtaagataagggaggtgagaatccccgattcgcgtatgcagctatgcttcactcaccacagatgatatgacattaccaatcccacgatgcgattcaagactaggatctcgaatagcaatgggtggcggggctttcttagcttaagcgcagtgcctctgattcgctgaatgctcccctaggtttcgctgtagtgggtttgatccgctatttcagccctaattattgccccggactcaccacgggctcggaaccgaatgggagctatgcaatgccgaatgcgaatatgggcgtcttgatgcattacgaatctacccgccgcccgaactaggatcactttaataagttcttgcgagatgacgagaacaaggtgtggtggttactgagagatataagaatggcgggttagaccttgggatttgagtactttctctcgcaactaccacgactcgcctcgttgaacactgcaccaactctaagcacacgctacgtgaaaggaaccgtcgctgaagaaagacatacatactaaggcctacctttgcttcaaccagttcaccttcgaatttgatcaatatgccgaccggtctatcaagcacgatgacaatcgctgcgggcacctcaatactggcatcaggctgggcatcaggtctcggagcaggtttcacaatagccggcatgccagcaatcgtcgctggcggcgcctcaagcgaagtgatgctccgcgagtggcgcttccagtttatacgagggcaatatttcgttccaacgttggggttgctcaatgcagtgaactacttctctatcgcgtaccacgcgtataaccgcggtgctgaatggagaggcttcgcggcagctggattatcaacactctttattgtaccttatacgctgactttcatcatgtcgaccaacgccacactcatggctgaacacgataacgccaagaagatgttgggcgaggcggcaatcaaaacgcttatcaaaaagtggtcggatttgaatgttgtgagggtcattgtgccaatgatcgggacaggcttggcgttgtggaatttcagcctctaattgaccccgagaaggtgaggggcacagaaatgggtttagcgactaaggtagtgagagctggggcattatcccagaatactggaaggcagtagctaataataccgacaaatttcacgccaacataggtctttaataaaacaatgtaatcatcccaac

SEQ ID NO: 19767 - DNA, 2976 bp, Muscodor strobelii
  misc_feature: SGI cDNA ID NO. 566655
  misc_feature: Encodes the peptide sequence at SEQ ID NO 19768
atgtctgaattcagctgtgaaacgtgcggaaagaccgaaggggtcaaattctgcgaaggatgtaacgactattattgtgatcctcactgggaagcccgacgcgcacacagagagaaccgagtcggaccctcaggcataccacatagcaagctggacccgaaaattgttcgacaggtcaacgagtggatggcagagcctgcaaatgacaccgaagagcaaattcagcacgaaattgacgaagacacgttatggtttggtcttagtaaagacaactacggcgatccgattctggccgaatataggcggttcatgactgtgattatggaaacgtcagaagggacatcgggaaggagatatcctggacttgtttcctttgtcggcgagacaggagcaggaaagagcacattgattcgcctgctcatgaatctcgaaactcgcgacactcccgtaacgggcccggtcatcggtcgtagtaccgtcgaagttccgacctctgcagacgtccatctataccttgatcctaagtccaagttcgagagaccaattctgtttgcagactgtgaaggcttcgagggtggagaaagggaccctgtcgcccaaagccgtgccggtatagattataaggataagaccaacacaccagcagggacctttaacgggaaagatcgaattcataaactcgttagctacaccaggagagccctgcggtgggcttcgagagacgcccttggtcatgagtcgaagagcaagcggcaatacgcaatatccgagatgtaccctcgcatctttcacgtcttttccgacgccgtggtgttcgttttgaacaacccaaagactatggagggagttgttgagaagttgcttctttgggcagattctaactattcagcatctgtaaacttacccagcaagcctcatgcgatcatcgttctcaacaagtccagtagctcaacaccaggggatcagtggagcagatggcgagccacggaggagttcttcaagtccatggacccacaagttttcaaaaataagacgttcgaaagaccgccacctcagagcatgagcgataacctttccgaattcgttacttttatcgcccagaaatgcgacgcagaaggacagatcgagacgctcttcaacaaggtcactaatctggttgcatcttgcataatgtttgattcggctagaaagcaactacttggaaatcctcaagattggtttggacttctatcccgagaagactccaaagctcgtggtgctgcgaaaggttctgaatctcaacaatcgtatgagagcatctgcaggccactgttgcagctcaactgcttcaataactgcatctgcctggtatgcttattcaatcctgctcagtacacactccaatgtgggcatatcgtctgccgcgagtgtatgttggactttggtcgatcagaagatgggtcccagatcgtcctagagttctgtccgctgagcgatggctctaagccatgcagtggcaaagagggcttcactcatgaaccgagtgttattgatatcgagcctgcttacaccggactgagagtcctgaccctggacgggggcggtattcgtggaatcattgagttagtcgtgctcaaggagatcgaagatcgcatagggattcctctgcagaacttcttcgacctagtcgtcggaacaagtaccggtggtattgttgcactcgcattcggacacagcaggtggccgctcaccgagtgcatcgaaatgttccagcgcgttgtacgccaagcgttcaagccacgcaagctgcagaacatgaaagctctcagacatatggagctgatgtggaaaaagagtagatacgaaacaagctctataaatgaagttcttcagagttctttcggtgcttcaaacctgttcggagcatcacatgagaaagaacatgaaactcgacttaagccactgcgggttgccgttctcactgcgtcaggttcaggaacgaagacttacttagcatcgaattacaatgttcggcaaaccccgcgacagtcacctctgggtagaaagccggtggccttagactatacaagacatcggccttcaaatgtggacgatgagtttcaagtctggcaagcggcgcgcgctacatcaagcgcaccaggctacttcaagcctttcaatcacgtcggcttacagttcttagatggggcggtactccataacgacatcatattatcacttggcaccggtttacaaaacgattatgaatacgagggagagtcacaccccaaagccacgagcatccttaccaaagtcccagatttcaataccaagctatctttcatcaagacactcttcacaatagtcaagtatcaaattaagatgaatcttgatgcggaaattagatggcagaactggctccgagaaattccgactaagcaattggcatctcgaatcttccgtattaacccggaccttggggaagctcctccgttgttggacgacgtaagcaaagtcacaccattgctacacaaagtcacgggctggatccacaacaccgcgacagagtccgaaaaaatacgcgaaattgcctgtcgcttagtggcgagttccttctacttcaagcgcataggcgatgctcggaaagcatcgagctcgacatacttgcaactcagtggtgtgattcgctgtcgccttccaaacgacgggcataacataatacagctggggaaatacctcgcctcgggtcatggaccggccgcctttgttatcgtcgaccggcatggcgaagatcaacgagttacaatacatacggaggctatgatcaaaaccggacaatttgcagacgttcccgtgacgattgctattcctgatgcgcagtcactgaccaagatcgctatcgagcttaaaggatttgtcgagcacacccagttgtttgacatcagcgggttccctcgggaactaatgaggcatgactttgcatctcatcagctatga

SEQ ID NO: 19768 - protein, 991 aa, Muscodor strobelii
  misc_feature: SGI Peptide ID NO. 566655
  misc_feature (522)..(741): Pfam Id: PF01734 Pfam Desc: Patatin-like phospholipase
  misc_feature (443)..(988): NCBI GI: 67525721 Blast Desc: AN3318.2 [Aspergillus nidulans FGSC A4] gi|40744106|gb|EAA63286.1| AN3318.2 [Aspergillus nidulans FGSC A4] gi|259485712|tpe|CBF82965.1| TPA: Patatin-like serine FGSC
  misc_feature (444)..(982): NCBI GI: 46127523 Blast Desc: FG08139.1 [Gibberella zeae PH-1]
  misc_feature (17)..(346): NCBI GI: 67525721 Blast Desc: AN3318.2 [Aspergillus nidulans FGSC A4] gi|40744106|gb|EAA63286.1| AN3318.2 [Aspergillus nidulans FGSC A4] gi|259485712|tpe|CBF82965.1| TPA: Patatin-like serine FGSC
  misc_feature (448)..(868): NCBI GI: 116198629 Blast Desc: CHGG_07470 [Chaetomium globosum CBS 148.51] gi|88178749|gb|EAQ86217.1| CHGG_07470 [Chaetomium globosum CBS 148.51]
  misc_feature (11)..(383): NCBI GI: 46127523 Blast Desc: FG08139.1 [Gibberella zeae PH-1]
  misc_feature (443)..(981): NCBI GI: 46114440 Blast Desc: FG03062.1 [Gibberella zeae PH-1]
  misc_feature (448)..(892): NCBI GI: 171689740 Blast Desc: protein product [Podospora anserina] gi|170944832|emb|CAP70944.1| protein product [Podospora anserina]
  misc_feature (444)..(947): NCBI GI: 154280477 Blast Desc: [Ajellomyces capsulatus NAm1] gi|150411230|gb|EDN06618.1| [Ajellomyces capsulatus NAm1]
  misc_feature (448)..(983): NCBI GI: 189211822 Blast Desc: conserved [Pyrenophora tritici-repentis Pt-1C-BFP] gi|187979438|gb|EDU46064.1| conserved [Pyrenophora tritici-repentis Pt-1C-BFP]
  misc_feature (444)..(835): NCBI GI: 159123473 Blast Desc: AFUB_080270 [Aspergillus fumigatus A1163]
MSEFSCETCGKTEGVKFCEGCNDYYCDPHWEARRAHRENRVGPSGIPHSKLDPKIVRQVNEWMAEPANDTEEQIQHEIDEDTLWFGLSKDNYGDPILAEYRRFMTVIMETSEGTSGRRYPGLVSFVGETGAGKSTLIRLLMNLETRDTPVTGPVIGRSTVEVPTSADVHLYLDPKSKFERPILFADCEGFEGGERDPVAQSRAGIDYKDKTNTPAGTFNGKDRIHKLVSYTRRALRWASRDALGHESKSKRQYAISEMYPRIFHVFSDAVVFVLNNPKTMEGVVEKLLLWADSNYSASVNLPSKPHAIIVLNKSSSSTPGDQWSRWRATEEFFKSMDPQVFKNKTFERPPPQSMSDNLSEFVTFIAQKCDAEGQIETLFNKVTNLVASCIMFDSARKQLLGNPQDWFGLLSREDSKARGAAKGSESQQSYESICRPLLQLNCFNNCICLVCLFNPAQYTLQCGHIVCRECMLDFGRSEDGSQIVLEFCPLSDGSKPCSGKEGFTHEPSVIDIEPAYTGLRVLTLDGGGIRGIIELVVLKEIEDRIGIPLQNFFDLVVGTSTGGIVALAFGHSRWPLTECIEMFQRVVRQAFKPRKLQNMKALRHMELMWKKSRYETSSINEVLQSSFGASNLFGASHEKEHETRLKPLRVAVLTASGSGTKTYLASNYNVRQTPRQSPLGRKPVALDYTRHRPSNVDDEFQVWQAARATSSAPGYFKPFNHVGLQFLDGAVLHNDIILSLGTGLQNDYEYEGESHPKATSILTKVPDFNTKLSFIKTLFTIVKYQIKMNLDAEIRWQNWLREIPTKQLASRIFRINPDLGEAPPLLDDVSKVTPLLHKVTGWIHNTATESEKIREIACRLVASSFYFKRIGDARKASSSTYLQLSGVIRCRLPNDGHNIIQLGKYLASGHGPAAFVIVDRHGEDQRVTIHTEAMIKTGQFADVPVTIAIPDAQSLTKIAIELKGFVEHTQLFDISGFPRELMRHDFASHQL

SEQ ID NO: 19769 - DNA, 2706 bp, Muscodor strobelii
  misc_feature: SGI cDNA ID NO. 566656
  misc_feature: Elevated expression when VOC is produced
  misc_feature: Encodes the peptide sequence at SEQ ID NO 19770
atgacgatagaggcggatatcgccaaggttggcgaggttgcaaattctaatgaactaggagaaacaaaatcattgattgcagatatcagatgtctttcctggcccgaatggcgcaaacttcgactatctgaatttgatgtcgaaaaggcgaaaaagaatgccaccagtgatataccaacactgagtcccgaacggcaggaatacgttatcgatgccgtctacgacacgggtgacatgggccctccagcctacaataatacgtctctgccgtcaaaacgttcgcgtatgtttggtcgagttcggattaactcccaacatatcatatcgttccttagcgacatgacaaacgtgtatcttcctcagaggtgtcaactccttcaccctttcaagatcctcatcgacaacttcgacagcatacaggcccacatgagaatgttagaagacagacttgagaatgggaaagctgcgaaggctgctaatacaaaggaccttgaccatggcctccaggaacaatcaattcattttaaatgtcttgtgacgctgctggattcacatctagccctcgaagtgggtgttgccagggccatcaaggagggatcactgcagaaaatcatgttttgccatttgtggcatcttttcccaccaggtgaaacaatattctgtcagaaaatggatcgggatgagccccctcaggcgacccaagtcctaaaagtcagcggcggacgggcaaagctcccgaactcttcgagatgggctgatttggtgttacaaagacacagagataggaagggttatacatttcaaaaagtttctcctttcactattgatgcattccatctggacttcgatggcagcaaataccgacttgttcaagtcaaatatgagatcccgaagtatccaggagagtgttctataacctctctggaggtatttccaatgcggttccttcaagcaccggaaaaggagagaatcacgtcgcttctcattgacagggggctcaattttcgtaatcttgctgcagagaaagctgcacatcgcgaatatcacgctgcgtcgctcgatctggagccagaggaaattgacggacgtgtcattgtggacttccgacaaaatgcagtcattgataacaagcgtcgaaaatcttccagtgatagcaacaacgaagaagacgaaggaagagttttcgggctacgtgctttgagtcagacgagcacctcggaagtatcagaagttatggggaccgaggaagaacctgatattgccttgtgggacgaccacaactacgacatcgacctgaccgaaagactattctcaatcaacaaggtcctacttgcgccatcgcatgcactgaagcctaatgagctagagaacgatgagttgctattgctaccaggtactgtgtacgcatatgtccttcggagccgcaattactgccgatgtgacatcagtcacattaaagaagttgttaccaataaaaaggcattcgatagcctagtactttctaatgagtggaaggacctgcttaggtccttggtggacagtcattcgcgaggatcaagagatcttcgaaacaagtcaaatacaaacaggcccaccgttgatcgaacaaactccgtcatatcctcccaggacgggagcattggcgacacgttgagtgtgggtaagaagaaaggtaaggggcttatcatcttactccatggggtacctggtgtaggcaagacatcaacagccgaaactgttgcagaggctaccggcagaccgcttttgcccgtaacgtctggagatctaggtgagaaggcaagcgacatcgagaagaatttagagcacatttttacacaaagtcatcggtggggttgtgttctactccttgacgaggccgaggtattccttgagagacggagtctagcagaccttacgcgcaacgctatggtatcagttttcctcagggccctcgaattctattcggggattttatttcttacgactaacagagttgggactattgacgaggcattcaagagccgcattgatctcagcttatactacgagccactcgattggaaaacatcaaagcagatatggcaaatccacctgcgcgactgccagaacagcggtgttgaagcagatgagaaggaagtccttcgatttgccaagaaccatttcgttgcctcagaagacgacggtcggtggaacggcaggcaaatctcgaacgcttttaaaatagccaaggcattggccgagtttgagacactagatgaggacagggaccgaaagaaccggactgctgttttaacgaagtctcatcttaagcaagtagcccgagtggctcgggaatttgatgagtacctgcttgatgtccgcgatggcgagacacaggccaagtacaacaaacaatatcgcttaagagcagataaattcaaagtcaaggagcgcgaatctcgcaaagctccaggacggttagctcggtctcagaccatagatcgtgcgattagcgaaatgccatcgtcgtctgaggatgacctcgatgatagtagcagcgactgcagcagtactgagactagtagctcatcggaaccggtgaaaaagtctaagaaaaaaggcgagtcatcaaaaggtctgacagacggcagaaagaaatctcgcagctcgaagtctaagaagtcgtcaaaaagtcgggcgaaacaaagttctgacgagtctacatag

SEQ ID NO: 19770 - protein, 901 aa, Muscodor strobelii
  misc_feature: SGI Peptide ID NO. 566656
  misc_feature (562)..(749): Pfam Id: PF00004 Pfam Desc: ATPase family associated with various cellular activities (AAA)
  misc_feature (562)..(699): Pfam Id: PF00004 Pfam Desc: ATPase family associated with various cellular activities (AAA)
  misc_feature (27)..(886): NCBI GI: 255950188 Blast Desc: Pc22g19580 [Penicillium chrysogenum Wisconsin 54-1255] gi|211592878|emb|CAP99246.1| Pc22g19580 [Penicillium chrysogenum Wisconsin 54-1255]
  misc_feature (175)..(847): NCBI GI: 154279082 Blast Desc: [Ajellomyces capsulatus NAm1] gi|150412297|gb|EDN07684.1| [Ajellomyces capsulatus NAm1]
  misc_feature (175)..(834): NCBI GI: 225562337 Blast Desc: conserved [Ajellomyces capsulatus G186AR]
  misc_feature (99)..(786): NCBI GI: 171690692 Blast Desc: protein product [Podospora anserina] gi|170945294|emb|CAP71406.1| protein product [Podospora anserina]
  misc_feature (99)..(786): NCBI GI: 115402849 Blast Desc: conserved [Aspergillus terreus NIH2624] gi|114189347|gb|EAU31047.1| conserved [Aspergillus terreus NIH2624]
  misc_feature (175)..(749): NCBI GI: 240281176 Blast Desc: conserved [Ajellomyces capsulatus H143]
  misc_feature (99)..(796): NCBI GI: 226282273 Blast Desc: conserved [Paracoccidioides brasiliensis Pb01]
  misc_feature (99)..(796): NCBI GI: 226292566 Blast Desc: conserved [Paracoccidioides brasiliensis Pb18]
  misc_feature (99)..(796): NCBI GI: 225680865 Blast Desc: conserved [Paracoccidioides brasiliensis Pb03]
  misc_feature (174)..(810): NCBI GI: 119467011 Blast Desc: AAA family ATPase, [Neosartorya fischeri NRRL 181] gi|119405464|gb|EAW15415.1| AAA family ATPase, [Neosartorya fischeri NRRL 181]
  misc_feature: Useful for introducing or modulating the production of volatile compounds
MTIEADIAKVGEVANSNELGETKSLIADIRCLSWPEWRKLRLSEFDVEKAKKNATSDIPTLSPERQEYVIDAVYDTGDMGPPAYNNTSLPSKRSRMFGRVRINSQHIISFLSDMTNVYLPQRCQLLHPFKILIDNFDSIQAHMRMLEDRLENGKAAKAANTKDLDHGLQEQSIHFKCLVTLLDSHLALEVGVARAIKEGSLQKIMFCHLWHLFPPGETIFCQKMDRDEPPQATQVLKVSGGRAKLPNSSRWADLVLQRHRDRKGYTFQKVSPFTIDAFHLDFDGSKYRLVQVKYEIPKYPGECSITSLEVFPMRFLQAPEKERITSLLIDRGLNFRNLAAEKAAHREYHAASLDLEPEEIDGRVIVDFRQNAVIDNKRRKSSSDSNNEEDEGRVFGLRALSQTSTSEVSEVMGTEEEPDIALWDDHNYDIDLTERLFSINKVLLAPSHALKPNELENDELLLLPGTVYAYVLRSRNYCRCDISHIKEVVTNKKAFDSLVLSNEWKDLLRSLVDSHSRGSRDLRNKSNTNRPTVDRTNSVISSQDGSIGDTLSVGKKKGKGLIILLHGVPGVGKTSTAETVAEATGRPLLPVTSGDLGEKASDIEKNLEHIFTQSHRWGCVLLLDEAEVFLERRSLADLTRNAMVSVFLRALEFYSGILFLTTNRVGTIDEAFKSRIDLSLYYEPLDWKTSKQIWQIHLRDCQNSGVEADEKEVLRFAKNHFVASEDDGRWNGRQISNAFKIAKALAEFETLDEDRDRKNRTAVLTKSHLKQVARVAREFDEYLLDVRDGETQAKYNKQYRLRADKFKVKERESRKAPGRLARSQTIDRAISEMPSSSEDDLDDSSSDCSSTETSSSSEPVKKSKKKGESSKGLTDGRKKSRSSKSKKSSKSRAKQSSDEST

SEQ ID NO: 19771 - DNA, 3866 bp, Muscodor strobelii
  misc_feature: SGI EST ID NO. CUFF.46259.0
  misc_feature: Variant of the nucleotide sequence at SEQ ID NO 19769
ggggactcccggctgaaactatccggacatctggtttcttacaagatgcgagatctattttcatagtggtttccccattatcagacagaagattcgaccatgacgatagaggcggatatcgccaaggttggcgaggttgcaaattctaatgaactaggagaaacaaaatcattgattgcagatatcagatgtctttcctggcccgaatggcgcaaacttcgactatctgaatttgatgtcgaaaaggcgaaaaagaatgccaccagtgatataccaacactgagtcccgaacggcaggaatacgttatcgatgccgtctacgacacgggtgacatgggccctccagcctacaataatacgtctctgccgtcaaaacgttcgcgtatgtttggtcgagttcggattaactcccaacatatcatatcgttccttagcgacatgacaaacgtgtatcttcctcagaggtgtcaactccttcaccctttcaagatcctcatcgacaacttcgacagcatacaggcccacatgagaatgttagaagacagacttgagaatgggaaagctgcgaaggctgctaatacaaaggaccttgaccatggcctccaggaacaatcaattcattttaaatgtcttgtgacgctgctggattcacatctagccctcgaagtgggtgttgccagggccatcaaggagggatcactgcagaaaatcatgttttgccatttgtggcatcttttcccaccaggtgaaacaatattctgtcagaaaatggatcgggatgagccccctcaggcgacccaagtcctaaaagtcagcggcggacgggcaaagctcccgaactcttcgagatgggctgatttggtgttacaaagacacagagataggaagggttatacatttcaaaaagtttctcctttcactattgatgcattccatctggacttcgatggcagcaaataccgacttgttcaagtcaaatatgagatcccgaagtatccaggagagtgttctataacctctctggaggtatttccaatgcggttccttcaagcaccggaaaaggagagaatcacgtcgcttctcattgacagggggctcaattttcgtaatcttgctgcagagaaagctgcacatcgcgaatatcacgctgcgtcgctcgatctggagccagaggaaattgacggacgtgtcattgtggacttccgacaaaatgcagtcattgataacaagcgtcgaaaatcttccagtgatagcaacaacgaagaagacgaaggaagagttttcgggctacgtgctttgagtcagacgagcacctcggaagtatcagaagttatggggaccgaggaagaacctgatattgccttgtgggacgaccacaactacgacatcgacctgaccgaaagactattctcaatcaacaaggtcctacttgcgccatcgcatgcactgaagcctaatgagctagagaacgatgagttgctattgctaccaggtactgtgtacgcatatgtccttcggagccgcaattactgccgatgtgacatcagtcacattaaagaagttgttaccaataaaaaggcattcgatagcctagtactttctaatgagtggaaggacctgcttaggtccttggtggacagtcattcgcgaggatcaagagatcttcgaaacaagtcaaatacaaacaggcccaccgttgatcgaacaaactccgtcatatcctcccaggacgggagcattggcgacacgttgagtgtgggtaagaagaaaggtaaggggcttatcatcttactccatggggtacctggtgtaggcaagacatcaacagccgaaactgttgcagaggctaccggcagaccgcttttgcccgtaacgtctggagatctaggtgagaaggcaagcgacatcgagaagaatttagagcacatttttacacaaagtcatcggtggggttgtgttctactccttgacgaggccgaggtattccttgagagacggagtctagcagaccttacgcgcaacgctatggtatcagttttcctcagggccctcgaattctattcggggattttatttcttacgactaacagagttgggactattgacgaggcattcaagagccgcattgatctcagcttatactacgagccactcgattggaaaacatcaaagcagatatggcaaatccacctgcgcgactgccagaacagcggtgttgaagcagatgagaaggaagtccttcgatttgccaagaaccatttcgttgcctcagaagacgacggtcggtggaacggcaggcaaatctcgaacgcttttaaaatagccaaggcattggccgagtttgagacactagatgaggacagggaccgaaagaaccggactgctgttttaacgaagtctcatcttaagcaagtagcccgagtggctcgggaatttgatgagtacctgcttgatgtccgcgatggcgagacacaggccaagtacaacaaacaatatcgcttaagagcagataaattcaaagtcaaggagcgcgaatctcgcaaagctccaggacggttagctcggtctcagaccatagatcgtgcgattagcgaaatgccatcgtcgtctgaggatgacctcgatgatagtagcagcgactgcagcagtactgagactagtagctcatcggaaccggtgaaaaagtctaagaaaaaaggcgagtcatcaaaaggtctgacagacggcagaaagaaatctcgcagctcgaagtctaagaagtcgtcaaaaagtcgggcgaaacaaagttctgacgagtctacatagccactgtattgttgggggaaatatcagagtagtgaatttctatatagacttcttattgatatagagcgatttccgatgacttgttgcttctctccagcttcccatattctcgcttcgggtagtaatggtgatctatattccttcagggtctatatatcaacgctgtcatagctgatgagatgcaaagtcatgcctcattagttcccgagggaacccgctgatgtcaaacaactgggtgtgctcgacaaatcctttaagctcgatagcgatcttggtcagtgactgcgcatcaggaatagcaatcgtcacgggaacgtctgcaaattgtccggttttgatcatagcctccgtatgtattgtaactcgttgatcttcgccatgccggtcgacgataacaaaggcggccggtccatgacccgaggcgaggtatttccccagctgtattatgttatgcccgtcgtttggaaggcgacagcgaatcacaccactgagttgcaagtatgtcgagctcgatgctttccgagcatcgcctatgcgcttgaagtagaaggaactcgccactaagcgacaggcaatttcgcgtattttttcggactctgtcgcggtgttgtggatccagcccgtgactttgtgtagcaatggtgtgactttgcttacgtcgtccaacaacggaggagcttccccaaggtccgggttaatacggaagattcgagatgccaattgcttagtcggaatttctcggagccagttctgccatctaatttccgcatcaagattcatcttaatttgatacttgactattgtgaagagtgtcttgatgaaagatagcttggtattgaaatctgggactttggtaaggatgctcgtggctttggggtgtgactctccctcgtattcataatcgttttgtaaaccggtgccaagtgataatatgatgtctggatcattgtgcagattgcaatccatagcgatatttcgcgcgtcttccattgctacttggattggattctgagaatggatatttactgtgtcagtttgtttccgagaatacgacatcagag

SEQ ID NO: 19772 - DNA, 3066 bp, Muscodor strobelii
  misc_feature: SGI cDNA ID NO. 566657
  misc_feature: Elevated expression when VOC is produced
  misc_feature: Encodes the peptide sequence at SEQ ID NO 19773
atgtggcgctttaaaaaagataattcgggtgcggagactgtgaagcttacggatcctgccgatgagttcgtgcaaagtagggtcagtattgcaaacattgattcgataacgaccaagatagatgccaacaggacacccgacgagattttgacagattcaaagcaattttgtatggaaaaccagatcgcgactaataaaggctgcacacaattcgctgaagccttacaatctttcgaagaatctctctctgagaagcacaagacccgatttagccttcacgacttgcacacatgggatgaagtcataagcgaggcaacgattgcagaaatgaagtataacaagaaggctgggcgtatgcagacgttctggggaatgaacgggctattcaggacgcttctgagcaattcattagcagtggaggactggtttggcttgctcccgtcgggaagcgtgtacgggagtttgatatgtggcggtttcaaaatcgttctccgcgccgccacgcgaatggacgaaatcaaggagttcatcataaaggcaatggctgatataccggaggaaatagaaaaagccaaattactcattgagtataacgaagggcaggatccaaaccgccgcctctacaatagcatatctgccttatattgcgccgtctttgatatactcaacagcattatccgatggtatagagagagctcgattagacggaagacgaaagtgcttttccagcagagttcgtacgagagcgagctggaagcaaagggggacacgttcagaaacgccattgaagcggtaaagaacgaggcaacaatatgtggtctcatgcgactgcagaccattgataggaacgtgcagaacatcgagaagaacatggatgaaatggtcagaatgagacacgccgaagagtctgagagatatgagaagcagaagctcgagatgcgcgaaataatggagaaacaagagaagctttatgagctactcgtcgaaatgtgtcgcagcagctcaacgtaccgtgacccgatgaaggatggctattggcaagaactcaacgatgacgagcaccgccattcagggcgcagaaagcccgcaatctcgagaaagacgctcagtggaacttttctacgatacgacaaaacactgccccggagtgaccttgcgaccatacttggtggcagaagtgaacttgatttggtggcgcaggacacaatcatgtacatcatacaaagcgaagctctgaaaacgtggcttcttgccccgaagaacgcaggaattctcgtcagggggatgtcagagcattcggcacatggcgtatcaccaatctcgttcttcgctgctcatttcattcagtcaatccttagctcaaccaatacgtcgcgcttcattggcttgttctggtttgcgaagcagcatgagaatacccgaactgatgcagatgccaacgttcatggggtcatgcgctcgctcatcggtcaactcctgcacgtctatggcaaatttgacctctactttgtcaagaaacgacacggggagagcataatagcaggaaatgacctcgagactctgtgcgatatttttgataacttgctactgcagctccctaagaaaaaggtcatcgtgtgcgtgatagactggttggcctgcttgcagtatgacgaggaagaaaatgttgtgtacgtactgaagaggcttatgtctatcgtgcgacacccaagtgagagcggtagcatgttcaaacttctcgtgacacatactggaggtgcgtttcgagctgcggaaactttggagaggggcggatttgttatagatgtgccccaaggcgggaacgggagtagaatgggtttctctcagcttatgtggcaggaagaagtagatgacaaacttgggaacatcggtcgtagacctgcgattcctatcggggccgccaatacaatcgatgctgaggagcaaatagcgccagtagtcgccttagagccccaaaaagatggcggggtcgtggcctggcttcaggtgctaggcgcattctgtgtctatctcaacacatggggcatgctgaactcattcggcgtctttcagacgtactacgaatcagatgccctaagttcgcagtcttcattcgccatcgggtggatcgggtctacgcagagtgcccttttcttcgttgcgtcgctgattgttggacccttgtttgacttgggctacttccgctctctcctacggattggcaccacgctcctattcatcagcatgttcctcttgagcatatcgagactcgcagttagcatcgcatctatagggagcgctgttgggggtctcatctatcccgcaatatttacccagctcctggcgaccattggctttgggtgggcgactcgtgtgatcgcttttgttctcttggtcacgtcggcatgcattctattgatgaagtctaggactcagcctaccgcatcgagaaagttcattgattgggctgcactcactgacttaccttatatgctgttgaacctcggtctcgtgtttggtttcatgggtctctatattataacaacgtatctccagctctttgctctggcgcgtacagacatctcatccggtctcgccaacaaccttctgattctcatcaatgctggttcactagtcggtaggttgacgcttggatactttgcggataagataggatctgtcaacatgcagacagcagttgcctttgctgggactattttggcgttctctctccttgcggtccataacgcgcctgcgttagttaccattgctgttttattcggtatctcgtcagggactttcctaggactcccagtcgctagtatagcgaggatgtctgacgatccgaccaaaattggcactcgaatagggatgacactggtatttgttggcatcggtgcgctcatcagctatcccattgcgggtgccattcttggtgctgggggtaacggaggtaattgggtcgggcttgtgctgttctccggcgtattgcttagtacatccactgtcattctagcaattagtcgcttaacaaagcttggcaaacaatgggccaacccactatga

SEQ ID NO: 19773 - protein, 1021 aa, Muscodor strobelii
  misc_feature: SGI Peptide ID NO. 566657
  misc_feature (757)..(971): Pfam Id: PF07690 Pfam Desc: Major Facilitator Superfamily
  misc_feature (645)..(1014): NCBI GI: 242817124 Blast Desc: monocarboxylate transporter, [Talaromyces stipitatus ATCC 10500] gi|218713354|gb|EED12778.1| monocarboxylate transporter, [Talaromyces stipitatus ATCC 10500]
  misc_feature (666)..(1014): NCBI GI: 154282011 Blast Desc: [Ajellomyces capsulatus NAm1] gi|150411997|gb|EDN07385.1| [Ajellomyces capsulatus NAm1]
  misc_feature (666)..(1014): NCBI GI: 225563380 Blast Desc: monocarboxylate permease-like protein [Ajellomyces capsulatus G186AR]
  misc_feature (642)..(1016): NCBI GI: 238840867 Blast Desc: monocarboxylate permease-like protein [Microsporum canis CBS 113480]
  misc_feature (655)..(1010): NCBI GI: 116181436 Blast Desc: CHGG_01346 [Chaetomium globosum CBS 148.51] gi|88185643|gb|EAQ93111.1| CHGG_01346 [Chaetomium globosum CBS 148.51]
  misc_feature (657)..(1018): NCBI GI: 145229117 Blast Desc: An01g04400 [Aspergillus niger] gi|134054966|emb|CAK36975.1| protein product [Aspergillus niger]
  misc_feature (657)..(1014): NCBI GI: 121702761 Blast Desc: MFS monocarboxylate transporter, [Aspergillus clavatus NRRL 1] gi|119397788|gb|EAW08219.1| MFS monocarboxylate transporter, [Aspergillus clavatus NRRL 1]
  misc_feature (634)..(1017): NCBI GI: 145245035 Blast Desc: An11g08190 [Aspergillus niger] gi|134079480|emb|CAK46012.1| protein product [Aspergillus niger]
  misc_feature (639)..(1014): NCBI GI: 156048833 Blast Desc: SS1G_08123 [Sclerotinia sclerotiorum 1980] gi|154692522|gb|EDN92260.1| SS1G_08123 [Sclerotinia sclerotiorum 1980]
  misc_feature (637)..(1012): NCBI GI: 116208398 Blast Desc: CHGG_03492 [Chaetomium globosum CBS 148.51] gi|88184089|gb|EAQ91557.1| CHGG_03492 [Chaetomium globosum CBS 148.51]
  misc_feature: Useful for introducing or modulating the production of volatile compounds
MWRFKKDNSGAETVKLTDPADEFVQSRVSIANIDSITTKIDANRTPDEILTDSKQFCMENQIATNKGCTQFAEALQSFEESLSEKHKTRFSLHDLHTWDEVISEATIAEMKYNKKAGRMQTFWGMNGLFRTLLSNSLAVEDWFGLLPSGSVYGSLICGGFKIVLRAATRMDEIKEFIIKAMADIPEEIEKAKLLIEYNEGQDPNRRLYNSISALYCAVFDILNSIIRWYRESSIRRKTKVLFQQSSYESELEAKGDTFRNAIEAVKNEATICGLMRLQTIDRNVQNIEKNMDEMVRMRHAEESERYEKQKLEMREIMEKQEKLYELLVEMCRSSSTYRDPMKDGYWQELNDDEHRHSGRRKPAISRKTLSGTFLRYDKTLPRSDLATILGGRSELDLVAQDTIMYIIQSEALKTWLLAPKNAGILVRGMSEHSAHGVSPISFFAAHFIQSILSSTNTSRFIGLFWFAKQHENTRTDADANVHGVMRSLIGQLLHVYGKFDLYFVKKRHGESIIAGNDLETLCDIFDNLLLQLPKKKVIVCVIDWLACLQYDEEENVVYVLKRLMSIVRHPSESGSMFKLLVTHTGGAFRAAETLERGGFVIDVPQGGNGSRMGFSQLMWQEEVDDKLGNIGRRPAIPIGAANTIDAEEQIAPVVALEPQKDGGVVAWLQVLGAFCVYLNTWGMLNSFGVFQTYYESDALSSQSSFAIGWIGSTQSALFFVASLIVGPLFDLGYFRSLLRIGTTLLFISMFLLSISRLAVSIASIGSAVGGLIYPAIFTQLLATIGFGWATRVIAFVLLVTSACILLMKSRTQPTASRKFIDWAALTDLPYMLLNLGLVFGFMGLYIITTYLQLFALARTDISSGLANNLLILINAGSLVGRLTLGYFADKIGSVNMQTAVAFAGTILAFSLLAVHNAPALVTIAVLFGISSGTFLGLPVASIARMSDDPTKIGTRIGMTLVFVGIGALISYPIAGAILGAGGNGGNWVGLVLFSGVLLSTSTVILAISRLTKLGKQWANPL

SEQ ID NO: 19774 - DNA, 2153 bp, Muscodor strobelii
  misc_feature: SGI EST ID NO. CUFF.46274.0
  misc_feature: Variant of the nucleotide sequence at SEQ ID NO 19772
aattaaattacagtacttatcttagcatcgcatcgaagcatcttttgaatgaagatcacattgtacagtccatatcatgtggcgctttaaaaaagataattcgggtgcggagactgtgaagcttacggatcctgccgatgagttcgtgcaaagtagggtcagtattgcaaacattgattcgataacgaccaagatagatgccaacaggacacccgacgagattttgacagattcaaagcaattttgtatggaaaaccagatcgcgactaataaaggctgcacacaattcgctgaagccttacaatctttcgaagaatctctctctgagaagcacaagacccgatttagccttcacgacttgcacacatgggatgaagtcataagcgaggcaacgattgcagaaatgaagtataacaagaaggctgggcgtatgcagacgttctggggaatgaacgggctattcaggacgcttctgagcaattcattagcagtggaggactggtttggcttgctcccgtcgggaagcgtgtacgggagtttgatatgtggcggtttcaaaatcgttctccgcgccgccacgcgaatggacgaaatcaaggagttcatcataaaggcaatggctgatataccggaggaaatagaaaaagccaaattactcattgagtataacgaagggcaggatccaaaccgccgcctctacaatagcatatctgccttatattgcgccgtctttgatatactcaacagcattatccgatggtatagagagagctcgattagacggaagacgaaagtgcttttccagcagagttcgtacgagagcgagctggaagcaaagggggacacgttcagaaacgccattgaagcggtaaagaacgaggcaacaatatgtggtctcatgcgactgcagaccattgataggaacgtgcagaacatcgagaagaacatggatgaaatggtcagaatgagacacgccgaagagtctgagagatatgagaagcagaagctcgagatgcgcgaaataatggagaaacaagagaagctttatgagctactcgtcgaaatgtgtcgcagcagctcaacgtaccgtgacccgatgaaggatggctattggcaagaactcaacgatgacgagcaccgccattcagggcgcagaaagcccgcaatctcgagaaagacgctcagtggaacttttctacgatacgacaaaacactgccccggagtgaccttgcgaccatacttggtggcagaagtgaacttgatttggtggcgcaggacacaatcatgtacatcatacaaagcgaagctctgaaaacgtggcttcttgccccgaagaacgcaggaattctcgtcagggggatgtcagagcattcggcacatggcgtatcaccaatctcgttcttcgctgctcatttcattcagtcaatccttagctcaaccaatacgtcgcgcttcattggcttgttctggtttgcgaagcagcatgagaatacccgaactgatgcagatgccaacgttcatggggtcatgcgctcgctcatcggtcaactcctgcacgtctatggcaaatttgacctctactttgtcaagaaacgacacggggagagcataatagcaggaaatgacctcgagactctgtgcgatatttttgataacttgctactgcagctccctaagaaaaaggtcatcgtgtgcgtgatagactggttggcctgcttgcagtatgacgaggaagaaaatgttgtgtacgtactgaagaggcttatgtctatcgtgcgacacccaagtgagagcggtagcatgttcaaacttctcgtgacacatactggaggtgcgtttcgagctgcggaaactttggagaggggcggatttgttatagatgtgccccaaggcgggaacgggagtagaatgggtttctctcagcttatgtggcaggaagaagtagatgacaaacttgggaacatcggtcgtaggtctacaaagtaatcaggtgctagccactgcaacatgatggaactggtagcggcaagtgatgatcactgtccgacaaatcgacacgatggtccacttcgctgattattgatataattggcatgtttgttgcctcaataaggaattactgaataaaatcactattgggttgaagaatccg

SEQ ID NO: 19775 - DNA, 1869 bp, Muscodor strobelii
  misc_feature: SGI cDNA ID NO. 566658
  misc_feature: Encodes the peptide sequence at SEQ ID NO 19776
atgccatttgggggcagaaaagaggcatatcccacagcggcgtctcgtgatgctgctgaaatacgcagtcccaacaaggaaacagattctccggaggctgtcgatgcctctacgtcaattcctaccctagggatctgtctggaacaggacgtcaagcttccagaagagagtagggagttctggaaatgcctggatgccgaaatgcagacaatttgggaccacatgaaccgtgatgaaccgacgttcacccaggaactcgagagataccgtgtccaggagttcaatttgaatttgctgaataagcccccgagggaggaacccaacattgcagctctccggaaaggtgtcgcactacgagttgctcggcaatgggataccactacaacccattcaagtgaacgattctttgcccgtctccaagcaatcgacgacggcttgatgcgagaggaaagtcttctttgtatcgatctagagttcgcctccacgagtggtatggtgtacgaaatagcaatctcgacgcttcgatctgaagtcatcttactccacaagtttgttgctgacggagacaaggcaccgaagctgaatgctcgaaagacgaactggacacatccattagcaaacgagatcgaactttggagcggcaaacaagtcaaaaagcggcaagctcaaaatccacatcgcgtgcttgacgtcagacagattgcagataagctgggaactttcttgaacccagagaccatcattctgagctggcataccagcgtcgaggacgtcaggaccttgagacgatttttggaagccaacggccaagacatgcgcaagatagtaccagctgacaataattgcattccagtagtgcccctcttctcgcgaaacctgggcaagctttccgtctggcaaatatttcagctattaatggtccttgcctttttggaattgctcaagcccttgaacgagcgcagtctcaggtggcagcctccagagctgtaccataaagaacgaaggtcaatcatcgactatctacgcccgcttgtgggggatgccgcggagccgaccgtaataaggatacacaataccccgactgactccgattgcgaggggggccaggcttcagatgatgattccgtctctaccggtgcggaacataattcgacagatgatgataccgatgccgaattcttcgaggatacatacctcttattcgaagccgaccgcaaccacaaagcgcgaaagcctgctaaaacccccgaggaagatgataccccgaaaaggcaagagccgagctcgggaagcgcggtacggccgacccaaaacttagtacaatccgacctccgggatttcatcggtggttgcaatactcaaagggattatagtcatgtagacgaggataatgatgccacgctgggacgaaggtcctggagaagcacctctgacagcaagaagaataagagtacaaaaggggcaaagccggccaggcaacgccatacgcggggtaaaggaaaggctaggcgtgtggcaaaactagcgactggccacgggcagagggagaagactaaagagcgtcgagtggcaagcggcatatccaagacgtctcacaaaacgcgaagcaaaccgggcacagcgaaacacagcgctacattagatgtctggttgagagatcgctccgacccggtcgcggtctcccggcggcagactgagttgcccgtggaccagggcagtgaaaagagccagggcgcagctcatggcacaggaggaagctctgatcatatggttattggcactgattttaccgatgatgaaactgtggacgaggattggggagcaataggagccgcagcattgcgctcaggcaactacacccttgggtaa

SEQ ID NO: 19776 - protein, 622 aa, Muscodor strobelii
  misc_feature: SGI Peptide ID NO. 566658
MPFGGRKEAYPTAASRDAAEIRSPNKETDSPEAVDASTSIPTLGICLEQDVKLPEESREFWKCLDAEMQTIWDHMNRDEPTFTQELERYRVQEFNLNLLNKPPREEPNIAALRKGVALRVARQWDTTTTHSSERFFARLQAIDDGLMREESLLCIDLEFASTSGMVYEIAISTLRSEVILLHKFVADGDKAPKLNARKTNWTHPLANEIELWSGKQVKKRQAQNPHRVLDVRQIADKLGTFLNPETIILSWHTSVEDVRTLRRFLEANGQDMRKIVPADNNCIPVVPLFSRNLGKLSVWQIFQLLMVLAFLELLKPLNERSLRWQPPELYHKERRSIIDYLRPLVGDAAEPTVIRIHNTPTDSDCEGGQASDDDSVSTGAEHNSTDDDTDAEFFEDTYLLFEADRNHKARKPAKTPEEDDTPKRQEPSSGSAVRPTQNLVQSDLRDFIGGCNTQRDYSHVDEDNDATLGRRSWRSTSDSKKNKSTKGAKPARQRHTRGKGKARRVAKLATGHGQREKTKERRVASGISKTSHKTRSKPGTAKHSATLDVWLRDRSDPVAVSRRQTELPVDQGSEKSQGAAHGTGGSSDHMVIGTDFTDDETVDEDWGAIGAAALRSGNYTLG

SEQ ID NO: 19777 - DNA, 3019 bp, Muscodor strobelii
  misc_feature: SGI EST ID NO. CUFF.46373.0
  misc_feature: Variant of the nucleotide sequence at SEQ ID NO 19775
attgtgttttctcacaccctcagtgaacacagatcgtcttcacataaatattattggattgttttggagcttgtctatcgtgctaaatgccaaagaatcgtaaataccgcagaaacgaagatggatccatcccttgcccagttctggagtgcccccgtgtgtttgttaagacggtccctatcccgactcatctccgtacggaccacgggctagacattccaaagctgcctcgacgcagacttcatttttcgaggaatcgcaatggtcgttatatgtgtcctcattgtggtcggacttataaattgcagaagcaagtcaattgtcatatcaaagctgctcatatcaacggcaggccatatcaacatctggctacttgggtgtgcactgtgccaaattgctcaatggcgctttcgagacaccgttgtacaagagcagtgatgaagacacacatgagacttcacaagaaacatggtcatttcacaacttttcagagcataccaaaggcacaaaagctcccaccttactccaaactcgatgacatcaacaaattttggtccagaatcctttcctgtagagagctgatgccatttgggggcagaaaagaggcatatcccacagcggcgtctcgtgatgctgctgaaatacgcagtcccaacaaggaaacagattctccggaggctgtcgatgcctctacgtcaattcctaccctagggatctgtctggaacaggacgtcaagcttccagaagagagtagggagttctggaaatgcctggatgccgaaatgcagacaatttgggaccacatgaaccgtgatgaaccgacgttcacccaggaactcgagagataccgtgtccaggagttcaatttgaatttgctgagtatgtaccagaaattcctccattctagttattctccaaagataacaatcattagacagtaccaaagccccgctccaacagcgattctttcgatcattcgatcgccgatgtattgggccaggttttttcaccgatagtagtcattctcttattgaaggggcgtgtccatcgcagacttcgataactccagactcggcctatctctttctacgcattgttcaaaagacggggacggcggttatagccatacagcggagatgtgccccatgtatgagcaaatttcgttggatgcggaccttcagagagcacgaccttgacaagaaagctgatcagatctactgccggcacgggtcttgtctcaaaaaaacctggaatggaacagggctatgccaaatgcacgtgaaggtagataagcccccgagggaggaacccaacattgcagctctccggaaaggtgtcgcactacgagttgctcggcaatgggataccactacaacccattcaagtgaacgattctttgcccgtctccaagcaatcgacgacggcttgatgcgagaggaaagtcttctttgtatcgatctagagttcgcctccacgagtggtatggtgtacgaaatagcaatctcgacgcttcgatctgaagtcatcttactccacaagtttgttgctgacggagacaaggcaccgaagctgaatgctcgaaagacgaactggacacatccattagcaaacgagatcgaactttggagcggcaaacaagtcaaaaagcggcaagctcaaaatccacatcgcgtgcttgacgtcagacagattgcagataagctgggaactttcttgaacccagagaccatcattctgagctggcataccagcgtcgaggacgtcaggaccttgagacgatttttggaagccaacggccaagacatgcgcaagatagtaccagctgacaataattgcattccagtagtgcccctcttctcgcgaaacctgggcaagctttccgtctggcaaatatttcagctattaatggtccttgcctttttggaattgctcaagcccttgaacgagcgcagtctcaggtggcagcctccagagctgtaccataaagaacgaaggtcaatcatcgactatctacgcccgcttgtgggggatgccgcggagccgaccgtaataaggatacacaataccccgactgactccgattgcgaggggggccaggcttcagatgatgattccgtctctaccggtgcggaacataattcgacagatgatgataccgatgccgaattcttcgaggatacatacctcttattcgaagccgaccgcaaccacaaagcgcgaaagcctgctaaaacccccgaggaagatgataccccgaaaaggcaagagccgagctcgggaagcgcggtacggccgacccaaaacttagtacaatccgacctccgggatttcatcggtggttgcaatactcaaagggattatagtcatgtagacgaggataatgatgccacgctgggacgaaggtcctggagaagcacctctgacagcaagaagaataagagtacaaaaggggcaaagccggccaggcaacgccatacgcggggtaaaggaaaggctaggcgtgtggcaaaactagcgactggccacgggcagagggagaagactaaagagcgtcgagtggcaagcggcatatccaagacgtctcacaaaacgcgaagcaaaccgggcacagcgaaacacagcgctacattagatgtctggttgagagatcgctccgacccggtcgcggtctcccggcggcagactgagttgcccgtggaccagggcagtgaaaagagccagggcgcagctcatggcacaggaggaagctctgatcatatggttattggcactgattttaccgatgatgaaactgtggacgaggattggggagcaataggagccgcagcattgcgctcaggcaactacacccttgggtaaatgatggcgttgttgtgtcacttcacgattcgaacatgcttgagaatcaggaactaattatctgtgttttggcctcagacacctcacgaggcatctatgaggctacggttctgagaagagtacggttctcaaggcacgcgcctaccagcgcgcatactag

SEQ ID NO: 19778 - DNA, 429 bp, Muscodor strobelii
  misc_feature: SGI cDNA ID NO. 566659
  misc_feature: Encodes the peptide sequence at SEQ ID NO 19779
atgcgtatgcttcatactgaaactttgcaattcgaaagcttcgcaaacgtaggtcgaacgccttatgaagatcgcttgcttcaatctgaatatgcgattctgtcacacgtctggggagatgacgaggtgctcttcgaggacattcggcatcgaaaagattcttggaggaacaagactggtgcggccaaagtgatcaatgctgctcgaatcgccgcagataaaggctacagctacatttggatagacacttgctgcatcgataagactagtagtgcagagttggccgaaacgatcaactctatgtacagattgtaccagcagtctgcagtttgtatcacatttttatcagacgttcgaaccgcaaatgcggaagcatttgaagagagccgatggttcaccagaggctggacagtacgcgacctactttga

SEQ ID NO: 19779 - protein, 142 aa, Muscodor strobelii
  misc_feature: SGI Peptide ID NO. 566659
  misc_feature (31)..(140): Pfam Id: PF06985 Pfam Desc: Heterokaryon incompatibility protein (HET)
  misc_feature (31)..(116): Pfam Id: PF06985 Pfam Desc: Heterokaryon incompatibility protein (HET)
  misc_feature (1)..(142): NCBI GI: 256733325 Blast Desc: NECHADRAFT_77285 [Nectria haematococca mpVI 77-13-4]
  misc_feature (1)..(142): NCBI GI: 256722181 Blast Desc: NECHADRAFT_17698 [Nectria haematococca mpVI 77-13-4]
  misc_feature (1)..(142): NCBI GI: 256733553 Blast Desc: [Nectria haematococca mpVI 77-13-4]
  misc_feature (1)..(142): NCBI GI: 238492441 Blast Desc: ankyrin repeat-containing protein, [Aspergillus flavus NRRL3357] gi|220695951|gb|EED52293.1| ankyrin repeat-containing protein, [Aspergillus flavus NRRL3357]
  misc_feature (1)..(142): NCBI GI: 169782792 Blast Desc: [Aspergillus oryzae RIB40] gi|83774602|dbj|BAE64725.1| protein product [Aspergillus oryzae]
  misc_feature (1)..(142): NCBI GI: 171680418 Blast Desc: protein product [Podospora anserina] gi|170939836|emb|CAP65061.1| protein product [Podospora anserina]
  misc_feature (1)..(142): NCBI GI: 169770123 Blast Desc: [Aspergillus oryzae RIB40] gi|83767390|dbj|BAE57529.1| protein product [Aspergillus oryzae]
  misc_feature (1)..(142): NCBI GI: 238487504 Blast Desc: thermophilic desulfurizing enzyme family protein [Aspergillus flavus NRRL3357] gi|220699869|gb|EED56208.1| thermophilic desulfurizing enzyme family protein [Aspergillus
  misc_feature (1)..(142): NCBI GI: 256732223 Blast Desc: NECHADRAFT_93752 [Nectria haematococca mpVI 77-13-4]
  misc_feature (1)..(142): NCBI GI: 256732895 Blast Desc: NECHADRAFT_18070 [Nectria haematococca mpVI 77-13-4]
MRMLHTETLQFESFANVGRTPYEDRLLQSEYAILSHVWGDDEVLFEDIRHRKDSWRNKTGAAKVINAARIAADKGYSYIWIDTCCIDKTSSAELAETINSMYRLYQQSAVCITFLSDVRTANAEAFEESRWFTRGWTVRDLL

SEQ ID NO: 19780 - DNA, 288 bp, Muscodor strobelii
  misc_feature: SGI EST ID NO. CUFF.46277.0
  misc_feature: Variant of the nucleotide sequence at SEQ ID NO 19778
gcgattcatgtcttcgtcttgttttatctatctagacattacgataattattctatgcaataggatcgcatatcttatacatcaggtgccatctcagctagcctattgtctgcgatgcgtatgcttcatactgaaactttgcaattcgaaagcttcgcaaacgtaggtcgaacgccttatgaagatcgcttgcttcaatctgaatatgcgattctgtcacacgtctggggagatgacgaggtgctcttcgaggacattcggcatcgaaaagattcttggaggaacaag

SEQ ID NO: 19781 - DNA, 1422 bp, Muscodor strobelii
  misc_feature: SGI cDNA ID NO. 566660
  misc_feature: Encodes the peptide sequence at SEQ ID NO 19782
atggcggatagcgtccccaccaccgaagtcgcatcagccagtgcctattttaccaacacacaaccttccatcgacaagaatggcaccgccccaagcaacccctcccgagagatcagtgcgtgtatggccaacagtccctcgaccaacaacacggtcaatctagccaaatatcagacctctgtgagtcatcagtccctcgcctccgccctagatagaagctcgatgaccagtcaccatcgagacttcagcgctgccgcagtgtgtcatcctcagggaagctacatcgaaggcacctccgccgttcaggccgctgctgcctctgaaaaaaccgatcagccggaccttagtgtcgacgtcactaacgctacacctgaattatacaagaaatactttggtccaggggtcgtgggggttcacgagaccccagcttacagccaaggtatcgctatcaacacagatcttgctgagagcatgctgccgagctacgagacgctccgcgttcccaatatgtctcagaaaccgtctatcaatcacaaccagtacatgtttaatagcaacgctgtcgacatgcatgatagtaccggccagtccgtccttggcaccgagtccggtggcggatctggttgtccctcgccggccccctccaacagcttgttcgagcttggccatacacttagtgatgctgacctcgacttcttccaaggagtttgggacttaacagcactccagctcgaccgtgccacgcccttcgtgaagattccgatcgagacataccgtagtctagggcctgaaggagctgcttatatcaagcagcgatttcgtttgactactggcaaggctggtggtgaattcttcaatgacacgagcaacccggctcgggtctatctcggagtctctgaacagcttgagtccaaattaggcgttgctattgagttcagagacgagcagacaattcgctgccttaatctcgaggcctcgcagcagcgtcggaccaatgatacagagacagctacgtcagcactcggacacggaagtaccacgccgtctttgacgtcggaaacagccgcttttcccgctcaacagaactccacgtcgtcctatattccaaagacacccgcccaaccgactcaaaagattcgagttccaaagcctatgaacagcttcatgtcctggagccagacaatggggccgattctcaaagcccagaaccctggcgtacctaacggtcaaatttctaccatgctcagtaacatctggaaaggagttcctcgtgaaaaaaaagctcgtcaggaggctctctctcaccaagtaaacccagaatgggcccgtacccatccaattgtcaatggcaagcgaaccgaaactaagaagaggaagctatcgcacgatgagcaagacaacaagagagttagaaagttctaa

SEQ ID NO: 19782 - protein, 473 aa, Muscodor strobelii
  misc_feature: SGI Peptide ID NO. 566660
  misc_feature (381)..(442): Pfam Id: PF00505 Pfam Desc: HMG (high mobility group) box
  misc_feature (381)..(429): Pfam Id: PF00505 Pfam Desc: HMG (high mobility group) box
  misc_feature (349)..(446): NCBI GI: 119493741 Blast Desc: mating-type protein MAT1-2 [Neosartorya fischeri NRRL 181] gi|119412118|gb|EAW22060.1| mating-type protein MAT1-2 [Neosartorya fischeri NRRL 181]
  misc_feature (376)..(461): NCBI GI: 70671460 Blast Desc: mating-type protein MAT1-2-1 [Xanthoria elegans]
  misc_feature (376)..(466): NCBI GI: 70671406 Blast Desc: mating-type protein MAT1-2-1 [Xanthoria polycarpa]
  misc_feature (380)..(458): NCBI GI: 225685283 Blast Desc: mating-type protein-1 [Paracoccidioides brasiliensis Pb03]
  misc_feature (380)..(458): NCBI GI: 226294619 Blast Desc: mating locus 1-2-1 [Paracoccidioides brasiliensis Pb18]
  misc_feature (369)..(461): NCBI GI: 70671421 Blast Desc: mating-type protein MAT1-2-1 [Xanthoria flammea]
  misc_feature (336)..(461): NCBI GI: 34392217 Blast Desc: HMG box protein [Rhynchosporium secalis]
  misc_feature (380)..(458): NCBI GI: 256860928 Blast Desc: HMG domain protein MAT1-2 [Paracoccidioides brasiliensis]
  misc_feature (380)..(458): NCBI GI: 256860924 Blast Desc: HMG domain protein MAT1-2 [Paracoccidioides brasiliensis]
  misc_feature (380)..(459): NCBI GI: 256860926 Blast Desc: HMG domain protein MAT1-2 [Paracoccidioides brasiliensis]
MADSVPTTEVASASAYFTNTQPSIDKNGTAPSNPSREISACMANSPSTNNTVNLAKYQTSVSHQSLASALDRSSMTSHHRDFSAAAVCHPQGSYIEGTSAVQAAAASEKTDQPDLSVDVTNATPELYKKYFGPGVVGVHETPAYSQGIAINTDLAESMLPSYETLRVPNMSQKPSINHNQYMFNSNAVDMHDSTGQSVLGTESGGGSGCPSPAPSNSLFELGHTLSDADLDFFQGVWDLTALQLDRATPFVKIPIETYRSLGPEGAAYIKQRFRLTTGKAGGEFFNDTSNPARVYLGVSEQLESKLGVAIEFRDEQTIRCLNLEASQQRRTNDTETATSALGHGSTTPSLTSETAAFPAQQNSTSSYIPKTPAQPTQKIRVPKPMNSFMSWSQTMGPILKAQNPGVPNGQISTMLSNIWKGVPREKKARQEALSHQVNPEWARTHPIVNGKRTETKKRKLSHDEQDNKRVRKF

SEQ ID NO: 19783 - DNA, 483 bp, Muscodor strobelii
  misc_feature: SGI EST ID NO. CUFF.46289.0
  misc_feature: Variant of the nucleotide sequence at SEQ ID NO 19781
cgattctcaaagcccagaaccctggcgtacctaacggtcaaatttctaccatgctcagtaacatctggaaaggagttcctcgtgaaaaaaaagctcgtcaggaggctctctctcaccaagtaaacccagaatgggcccgtacccatccaattgtcaatggcaagcgaaccgaaactaagaagaggaagctatcgcacgatgagcaagacaacaagagagttagaaagttctaaatctatgaatttggcctatttctggtcctatttccgcgatgagaccttatgccaggatctagtaaaattgtctgagctagtatgagacaggggcatatattgtgaagggtagcagacaggcctgggttgcttcacaagaagtttgtagtgaagaattacggaatctagttcttgtatcatatatcacttgtcaatcacatttaacccatctgatgttgtgatcgctatcgaggccgacatcgtatgcccg

SEQ ID NO: 19784 - DNA, 1356 bp, Muscodor strobelii
  misc_feature: SGI cDNA ID NO. 566661
  misc_feature: Encodes the peptide sequence at SEQ ID NO 19785
atggcctatgaagaagtgccactatgtctcgacattgttgtcgtcggagctggtctaagtggcttggcggcagcaatatctagtgctttgtctggtcacaaggtcacagttctcgaagctgcgcccagactacaggaaatcggtgcgggcatacaaatcacaccgaactcctcacgacttcttaagaaatggggactaccggacagcttttgggaaacgacgtgcgagcctagctatgttgctgttcaccgatattccgatgggaagatactggcactagaggaagggtttcacgaaaacatgcgaacgaagtacggtgcacctttcatggacgtgcacagaatcgatcttcatttctcgctcgccgctcgagctaaggatcttggggtcgatatcaggacgaataatcgagttactgacatagacttttctgcgccgtcaatcaagactacggctggaattacctttgagccggatttgattgttgctgcggatggaatttggtccacatgtcgacacctgtacatggagaatcccgatcggccgctttccaccggcgacaatgcatttagaataacactcacaattgatcaaatcgatgaccccgagcttcgcgacatcgtgcaaaaaccggggctgaatttttggattggcccttacggccatgttgtcgcttactcggtccgagctggcactgtgttgaacatggtgcttacagttccagaggacgcccatgtagaagaaaccaaatctataacatcaaacaaaaaggaaaacgtgaccattgaagacataaaggcctcctcaaagaagcgcatacaagagcctgtcgaggaaatgagagccctgtttgaggaatgggatccaatactaactcgattcctcgacttggtcaagggggttcgcaaatgggagctcatgcatcgcgcggaactcgagtcttgggtgaataaagacgcaacatgtgtcttcttaggcgattcttgccaccctatgctgccgtaccttgcgcaaggtgccaattcggcgcttgaagatggagcagtactgggacttctactcggtgcgatgaaatcgagagaacaactaccaaaggcgctggatatgtatcaatcgcttcgaaaagctcgcggtgatgcaattgccaaggaggctttcaagcagcgagctgcattccatatgcctaatggtcccgaacaggaagcccgcgatgaactgttcctatctcaattagggcaagaagttaaagggccatttcctagtcgttggacgtgtcctgtggtgcagccttggctttatgggtatgatgcgtatcgtgaggtggaagaagcggttaagagggatccttttcagtag

SEQ ID NO: 19785 - protein, 451 aa, Muscodor strobelii
  misc_feature: SGI Peptide ID NO. 566661
  misc_feature (11)..(234): Pfam Id: PF01266 Pfam Desc: FAD dependent oxidoreductase
  misc_feature (9)..(385): Pfam Id: PF01494 Pfam Desc: FAD binding domain
  misc_feature (11)..(44): Pfam Id: PF01266 Pfam Desc: FAD dependent oxidoreductase
  misc_feature (11)..(43): Pfam Id: PF00890 Pfam Desc: FAD binding domain
  misc_feature (11)..(39): Pfam Id: PF01134 Pfam Desc: Glucose inhibited division protein A
  misc_feature (10)..(44): Pfam Id: PF03486 Pfam Desc: HI0933-like protein
  misc_feature (11)..(44): Pfam Id: PF00070 Pfam Desc: Pyridine nucleotide-disulphide oxidoreductase
  misc_feature (11)..(40): Pfam Id: PF07992 Pfam Desc: Pyridine nucleotide-disulphide oxidoreductase
  misc_feature (5)..(450): NCBI GI: 261353542 Blast Desc: FAD binding domain-containing protein [Verticillium albo-atrum VaMs.102]
  misc_feature (10)..(450): NCBI GI: 46138257 Blast Desc: FG10643.1 [Gibberella zeae PH-1]
  misc_feature (10)..(450): NCBI GI: 256723059 Blast Desc: NECHADRAFT_42474 [Nectria haematococca mpVI 77-13-4]
  misc_feature (10)..(447): NCBI GI: 256722806 Blast Desc: NECHADRAFT_97501 [Nectria haematococca mpVI 77-13-4]
  misc_feature (26)..(449): NCBI GI: 119497947 Blast Desc: FAD binding domain protein [Neosartorya fischeri NRRL 181] gi|119413895|gb|EAW23834.1| FAD binding domain protein [Neosartorya fischeri NRRL 181]
  misc_feature (10)..(449): NCBI GI: 115433408 Blast Desc: conserved [Aspergillus terreus NIH2624] gi|114189693|gb|EAU31393.1| conserved [Aspergillus terreus NIH2624]
  misc_feature (10)..(447): NCBI GI: 189202824 Blast Desc: FAD binding domain containing protein [Pyrenophora tritici-repentis Pt-1C-BFP] gi|187984847|gb|EDU50335.1| FAD binding domain containing protein [Pyrenophora tritici-repentis
  misc_feature (10)..(450): NCBI GI: 159124822 Blast Desc: monooxygenase, [Aspergillus fumigatus A1163]
  misc_feature (10)..(450): NCBI GI: 169773821 Blast Desc: [Aspergillus oryzae RIB40] gi|83769240|dbj|BAE59377.1| protein product [Aspergillus oryzae]
  misc_feature (10)..(449): NCBI GI: 145235415 Blast Desc: An03g04750 [Aspergillus niger] gi|134058038|emb|CAK38267.1| protein product [Aspergillus niger]
  misc_feature (35)..(436): SWISSPROT Homolog: EC 1.14.13.24 3-hydroxybenzoate 6-monooxygenase
MAYEEVPLCLDIVVVGAGLSGLAAAISSALSGHKVTVLEAAPRLQEIGAGIQITPNSSRLLKKWGLPDSFWETTCEPSYVAVHRYSDGKILALEEGFHENMRTKYGAPFMDVHRIDLHFSLAARAKDLGVDIRTNNRVTDIDFSAPSIKTTAGITFEPDLIVAADGIWSTCRHLYMENPDRPLSTGDNAFRITLTIDQIDDPELRDIVQKPGLNFWIGPYGHVVAYSVRAGTVLNMVLTVPEDAHVEETKSITSNKKENVTIEDIKASSKKRIQEPVEEMRALFEEWDPILTRFLDLVKGVRKWELMHRAELESWVNKDATCVFLGDSCHPMLPYLAQGANSALEDGAVLGLLLGAMKSREQLPKALDMYQSLRKARGDAIAKEAFKQRAAFHMPNGPEQEARDELFLSQLGQEVKGPFPSRWTCPVVQPWLYGYDAYREVEEAVKRDPFQ

SEQ ID NO: 19786 - DNA, 1737 bp, Muscodor strobelii
  misc_feature: SGI EST ID NO. CUFF.46299.0
  misc_feature: Variant of the nucleotide sequence at SEQ ID NO 19784
cgcgattccgcattttgatctcttagtcacggttatgctcactcctcgctgcgtttcataagcattgatgacatattattatcaatgcatagaatagaaacgcaatgaagtcgtccgtggtgacaacatctcgaattgtagacaggggagctcacctcatgatcgctttccccgcgatatgacggcaaaatgggacgggacaccgggcgggggatcacccgcatcacggacagtcaccgacgatttaagcaaggacatgttacaccgtaggcagtggacatgaccgataagccaatctgctagagagaacattgagaaagatggcctatgaagaagtgccactatgtctcgacattgttgtcgtcggagctggtctaagtggcttggcggcagcaatatctagtgctttgtctggtcacaaggtcacagttctcgaagctgcgcccagactacaggaaatcggtgcgggcatacaaatcacaccgaactcctcacgacttcttaagaaatggggactaccggacagcttttgggaaacgacgtgcgagcctagctatgttgctgttcaccgatattccgatgggaagatactggcactagaggaagggtttcacgaaaacatgcgaacgaagtacggtgcacctttcatggacgtgcacagaatcgatcttcatttctcgctcgccgctcgagctaaggatcttggggtcgatatcaggacgaataatcgagttactgacatagacttttctgcgccgtcaatcaagactacggctggaattacctttgagccggatttgattgttgctgcggatggaatttggtccacatgtcgacacctgtacatggagaatcccgatcggccgctttccaccggcgacaatgcatttagaataacactcacaattgatcaaatcgatgaccccgagcttcgcgacatcgtgcaaaaaccggggctgaatttttggattggcccttacggccatgttgtcgcttactcggtccgagctggcactgtgttgaacatggtgcttacagttccagaggacgcccatgtagaagaaaccaaatctataacatcaaacaaaaaggaaaacgtgaccattgaagacataaaggcctcctcaaagaagcgcatacaagagcctgtcgaggaaatgagagccctgtttgaggaatgggatccaatactaactcgattcctcgacttggtcaagggggttcgcaaatgggagctcatgcatcgcgcggaactcgagtcttgggtgaataaagacgcaacatgtgtcttcttaggcgattcttgccaccctatgctgccgtaccttgcgcaaggtgccaattcggcgcttgaagatggagcagtactgggacttctactcggtgcgatgaaatcgagagaacaactaccaaaggcgctggatatgtatcaatcgcttcgaaaagctcgcggtgatgcaattgccaaggaggctttcaagcagcgagctgcattccatatgcctaatggtcccgaacaggaagcccgcgatgaactgttcctatctcaattagggcaagaagttaaagggccatttcctagtcgttggacgtgtcctgtggtgcagccttggctttatgggtatgatgcgtatcgtgaggtggaagaagcggttaagagggatccttttcagtaggcctcaatggcgtaaattgatcatgggtaagagaggactactcaacgataaagaaaattcg

SEQ ID NO: 19787 - DNA, 480 bp, Muscodor strobelii
  misc_feature: SGI cDNA ID NO. 566662
  misc_feature: Encodes the peptide sequence at SEQ ID NO 19788
atgttgttcagaaaatcaaagagcaacaataagggcaagcgtagccacaaacgcatcagtatatcatccccgatcgtcaacagcaccacctcttccgtctcgtctcgctccccatccccggagccacaacctcacaagccaacacgcagccgcacaaaccgcgacggcatcgtttttaatttgccttccaactttgcacttgcgcccgatgatgttcaccccttgcgctgccatcccaatgatcccgaccgcgactttcgcgccgagatagaggtctacatcgagcaccgagtctctcggctaggtcgcaaggagtgcggaattgtcgctgatcgggtgtactcttcgctagcgcttgagggaagtcctattcttgacttcttcaagctcagtgataagaagggtctaggacatttgccggtgaagttgatgacggagttggatggagctgttgagcattattcgagatctcttcggtaa

SEQ ID NO: 19788 - protein, 159 aa, Muscodor strobelii
  misc_feature: SGI Peptide ID NO. 566662
MLFRKSKSNNKGKRSHKRISISSPIVNSTTSSVSSRSPSPEPQPHKPTRSRTNRDGIVFNLPSNFALAPDDVHPLRCHPNDPDRDFRAEIEVYIEHRVSRLGRKECGIVADRVYSSLALEGSPILDFFKLSDKKGLGHLPVKLMTELDGAVEHYSRSLR

SEQ ID NO: 19789 - DNA, 1042 bp, Muscodor strobelii
  misc_feature: SGI EST ID NO. CUFF.46301.0
  misc_feature: Variant of the nucleotide sequence at SEQ ID NO 19787
aaagaaactaccatacaagactattatcagaactccaagcatgagatagatcagaattttcaagtcctgattatcacttcgtctttagtctcagtccccctgcataccatcctctttcccctgaccacatttcaagatctgcaatgctaccctacactctttctaccaaaagtcataacctcaaagacatctcaaagaaagtaaacagcgcagcaactcaacaattacattgttcccacgcctcgcacctagtgtaattataaacaagcgccatccgccaccatggcgcctggctgaagaaatttagacaatcaacagaaaccaaggaaagacaatctagacacagtgagaaactggagcttccaagcaaagctcacagtgcagctagtctcactcaacagctttgcaaggcgcgcccggcctcaattgtcagagttagtctcccacctttcaattcaaaacggtaaattttcaatccttcgggaagtcctcgtttcgattagacgaagtgtcacaaaaaaaggtaagtcaagatgttgttcagaaaatcaaagagcaacaataagggcaagcgtagccacaaacgcatcagtatatcatccccgatcgtcaacagcaccacctcttccgtctcgtctcgctccccatccccggagccacaacctcacaagccaacacgcagccgcacaaaccgcgacggcatcgtttttaatttgccttccaactttgcacttgcgcccgatgatgttcaccccttgcgctgccatcccaatgatcccgaccgcgactttcgcgccgagatagaggtctacatcgagcaccgagtctctcggctaggtcgcaaggagtgcggaattgtcgctgatcgggtgtactcttcgctagcgcttgagggaagtcctattcttgacttcttcaagctcagtgataagaagggtctaggacatttgccggtgaagttgatgacggagttggatggagctgttgagcattattcgagatctcttcggtaagtgcggcgcaaagaagaagaagaagaaga

SEQ ID NO: 19790 - DNA, 561 bp, Muscodor strobelii
  misc_feature: SGI cDNA ID NO. 566663
  misc_feature: Elevated expression when VOC is produced
  misc_feature: Encodes the peptide sequence at SEQ ID NO 19791
atggctttccgtgctttgcgtcgtgcccccaccgccttctcccggcccttggccgctactcggcagttccatgccacaccgcgcgctttcgtccaggttggcgatgccgttccagacatcgaactgcacgaagactctccagcaaacaaagtgagcatcgccaaggagttcgaaaagactattccgaacggcgtcatcattggcgtaccggcagctttttcggggacttgcagccagaagcacatcccgagctacatctcacaccctaagatcgccgatgctggtcaggtcttcgttgtcagtgtcaacgacgctttcgtcatgaaggcctggagcgatcagcttgatcctaccaaagaatccggtatccgattcctcgccgatcccaccggcgcattcaccaaagcactagacctaggctttgatgcgattcccgtgtttggacacacacgggctaagcgttacgccctcgtcatcgaggacagcaaggtcaagtccacttttatcgagcccgacaacaccggaactgatgtttcgatggccgagaacgtgcttggttaa

SEQ ID NO: 19791 - protein, 186 aa, Muscodor strobelii
  misc_feature: SGI Peptide ID NO. 566663
  misc_feature (32)..(185): Pfam Id: PF08534 Pfam Desc: Redoxin
  misc_feature (33)..(167): Pfam Id: PF00578 Pfam Desc: AhpC/TSA family
  misc_feature (1)..(185): NCBI GI: 46105450 Blast Desc: FG00353.1 [Gibberella zeae PH-1]
  misc_feature (1)..(186): NCBI GI: 261355008 Blast Desc: AhpC/TSA family protein [Verticillium albo-atrum VaMs.102]
  misc_feature (23)..(186): NCBI GI: 145610855 Blast Desc: MGG_00860 [Magnaporthe grisea 70-15] gi|145018196|gb|EDK02475.1| MGG_00860 [Magnaporthe grisea 70-15]
  misc_feature (5)..(185): NCBI GI: 212534358 Blast Desc: AhpC/TSA family protein [Penicillium marneffei ATCC 18224] gi|210069734|gb|EEA23824.1| AhpC/TSA family protein [Penicillium marneffei ATCC 18224]
  misc_feature (2)..(186): NCBI GI: 70992559 Blast Desc: AhpC/TSA family protein [Aspergillus fumigatus Af293] gi|66848761|gb|EAL89090.1| AhpC/TSA family protein [Aspergillus fumigatus Af293] gi|159124700|gb|EDP49818.1| AhpC/TSA family
  misc_feature (5)..(186): NCBI GI: 259481772 Blast Desc: TPA: thioredoxin peroxidase/alkyl hydroperoxide reductase (Eurofung) [Aspergillus nidulans FGSC A4]
  misc_feature (23)..(185): NCBI GI: 242790054 Blast Desc: AhpC/TSA family protein [Talaromyces stipitatus ATCC 10500] gi|218718075|gb|EED17495.1| AhpC/TSA family protein [Talaromyces stipitatus ATCC 10500]
  misc_feature (9)..(186): NCBI GI: 261203765 Blast Desc: AhpC/TSA family protein [Ajellomyces dermatitidis SLH14081] gi|239586881|gb|EEQ69524.1| AhpC/TSA family protein [Ajellomyces dermatitidis SLH14081]
  misc_feature (9)..(186): NCBI GI: 239608088 Blast Desc: AhpC/TSA family protein [Ajellomyces dermatitidis ER-3]
  misc_feature (1)..(186): NCBI GI: 121700080 Blast Desc: AhpC/TSA family protein [Aspergillus clavatus NRRL 1] gi|119396447|gb|EAW06879.1| AhpC/TSA family protein [Aspergillus clavatus NRRL 1]
  misc_feature (12)..(185): SWISSPROT Homolog: EC 1.11.1.15 Peroxiredoxin
  misc_feature: Useful for introducing or modulating the production of volatile compounds
MAFRALRRAPTAFSRPLAATRQFHATPRAFVQVGDAVPDIELHEDSPANKVSIAKEFEKTIPNGVIIGVPAAFSGTCSQKHIPSYISHPKIADAGQVFVVSVNDAFVMKAWSDQLDPTKESGIRFLADPTGAFTKALDLGFDAIPVFGHTRAKRYALVIEDSKVKSTFIEPDNTGTDVSMAENVLG

SEQ ID NO: 19792 - DNA, 884 bp, Muscodor strobelii
  misc_feature: SGI EST ID NO. CUFF.46304.0
  misc_feature: Variant of the nucleotide sequence at SEQ ID NO 19790
tggacctccaatcccaagactcaattcgccccattcccaccttctacaaaggtaatctcatacaccaccgtgataatggctttccgtgctttgcgtcgtgcccccaccgccttctcccggcccttggccgctactcggcagttccatgccacaccgcgcgctttcgtccaggttggcgatgccgttccagacatcgaactgcacgaagactctccagcaaacaaagtgagcatcgccaaggagttcgaaaagactattccgaacggcgtcatcattggcgtaccggcagctttttcggggacttgcagccagaagcacatcccgagctacatctcacaccctaagatcgccgatgctggtcaggtcttcgttgtcagtgtcaacgacgctttcgtcatgaaggcctggagcgatcagcttgatcctaccaaagaatccggtatccgattcctcgccgatcccaccggcgcattcaccaaagcactagacctaggctttgatgcgattcccgtgtttggacacacacgggctaagcgttacgccctcgtcatcgaggacagcaaggtcaagtccacttttatcgagcccgacaacaccggaactgatgtttcgatggccgagaacgtgcttggttaaatgagttaaacaacttgaaatggacagagtgagacttaaagaccggaccatcagctagattaagatagcaaagctcgcttgtattatacactatggaaatagaaaataaaatgtgtcaatatttcatcacgatgtgatgtggtgtatattaacatacattatgttgaagaaacggactataaaatgttaaatctcggatcaatatgacggcctcggcggagagagaatatagagcgagatggcggctg

SEQ ID NO: 19793 - DNA, 1584 bp, Muscodor strobelii
  misc_feature: SGI cDNA ID NO. 566664
  misc_feature: Encodes the peptide sequence at SEQ ID NO 19794
atggattccgacgacgacttcgtgtccaacatgtccagcgacgacgacctgttgcaggatgacaccgacaatgacatgtcgggcggagaaggcttcgatgtctttgacgaggcacccgatgacgatcccagcgtgccataccacaagtcggacaagaaaaagggcgtcacgttcgacgtcagttacaaggtctacaagccagaagatatccaacacgagcaagatgagatgattgatgaagtcaacatgatcctagagatgcggaaagaagatgctgccatcatgttgcggtatttccggtggaacaaagaacgtctcatcgaggactacatggataaccccaacaaagtcttgacagccgccggcctcggctccggcccagacaaagcccccaagataggagcgatacctggttttacatgcgagatctgctttgaggacgaagatggcctgcagagctttgcactaaaatgcggccatcgctactgtttagattgctaccgacagtatctgacacagaagatccgcgaggaaggcgaagcagcgaggatccaatgcccgtcggaaggatgttctcgaatcatcgattctcgctccctcgaccttctcgtaaccccagagttgattgatcgatatcgcgaattgcttaacaggactttcgtggaagacaacgacacgttgaagtggtgtcctgcacccgactgtaccaatgccgtggagtgcgccattaagaagaaggatttagacaaggtcgtgcccacggtcgcctgcgcctgcgcacatcgattctgcttcgggtgcacactgaacgaccacctcccggccccttgcgaacttgtcagaaagtggctcaagaaatgtgcagatgacagtgaaacagcgaactggatatcagccaacaccaaggagtgccccaagtgtaactcgacgatcgagaagaacggcggctgcaatcacatgacctgcaggaaatgcaggcatgagttctgctggatgtgtatgggcttgtggtcggagcatggcacgagctggtacaactgcaaccgattcgaagagaaaagcggcacggatgctagggacgcccaggccaaatctcgagtttctttggagcggtacctgcattactacaatcgctatgccaaccacgagcaatcagcacgcctggacaaagatatctatcagaagacagagaagaagatggtgcagctgcagacagcatctggcatgtcctggatcgaggtgcaatacctaagcgtagcctccgtagccctccaggagtgtcggcagacactgaagtggacttatgcattcgcgttctatctcgcacgaaacaacctaacggagatatttgaggacaaccagaaggacttggagatggcggtagaagcgctctcggaaatgttcgagaagcccatcgcagaccttgcagactccaaaaacaaggtgaacatcatggacaaaactgcctactgcaacaagcgtcgaaagattcttcttgaggacacggcggataaccttgctaatggccgctggactttcaccatagaccccaaagtgcctacgcccgccgctacccgccgctga

SEQ ID NO: 19794 - protein, 527 aa, Muscodor strobelii
  misc_feature: SGI Peptide ID NO. 566664
  misc_feature (141)..(191): Pfam Id: PF00097 Pfam Desc: Zinc finger, C3HC4 type (RING finger)
  misc_feature (210)..(277): Pfam Id: PF01485 Pfam Desc: IBR domain
  misc_feature (1)..(524): NCBI GI: 171679387 Blast Desc: protein product [Podospora anserina] gi|170939319|emb|CAP64547.1| protein product [Podospora anserina]
  misc_feature (1)..(524): NCBI GI: 46125333 Blast Desc: FG07044.1 [Gibberella zeae PH-1]
  misc_feature (1)..(526): NCBI GI: 145610857 Blast Desc: MGG_00859 [Magnaporthe grisea 70-15] gi|145018197|gb|EDK02476.1| MGG_00859 [Magnaporthe grisea 70-15]
  misc_feature (1)..(524): NCBI GI: 110617782 Blast Desc: RING-5 [Gibberella zeae]
  misc_feature (25)..(522): NCBI GI: 116203713 Blast Desc: conserved [Chaetomium globosum CBS 148.51] gi|88175868|gb|EAQ83336.1| conserved [Chaetomium globosum CBS 148.51]
  misc_feature (1)..(525): NCBI GI: 164424670 Blast Desc: NCU06882 [Neurospora crassa OR74A] gi|157070612|gb|EAA29993.2| NCU06882 [Neurospora crassa OR74A]
  misc_feature (1)..(514): NCBI GI: 156039407 Blast Desc: SS1G_11840 [Sclerotinia sclerotiorum 1980] gi|154697577|gb|EDN97315.1| SS1G_11840 [Sclerotinia sclerotiorum 1980]
  misc_feature (35)..(527): NCBI GI: 256733044 Blast Desc: [Nectria haematococca mpVI 77-13-4]
  misc_feature (1)..(516): NCBI GI: 154294327 Blast Desc: BC1G_13936 [Botryotinia fuckeliana B05.10] gi|150844775|gb|EDN19968.1| BC1G_13936 [Botryotinia fuckeliana B05.10]
  misc_feature (1)..(516): NCBI GI: 238487448 Blast Desc: RING finger protein [Aspergillus flavus NRRL3357] gi|220699841|gb|EED56180.1| RING finger protein [Aspergillus flavus NRRL3357]
MDSDDDFVSNMSSDDDLLQDDTDNDMSGGEGFDVFDEAPDDDPSVPYHKSDKKKGVTFDVSYKVYKPEDIQHEQDEMIDEVNMILEMRKEDAAIMLRYFRWNKERLIEDYMDNPNKVLTAAGLGSGPDKAPKIGAIPGFTCEICFEDEDGLQSFALKCGHRYCLDCYRQYLTQKIREEGEAARIQCPSEGCSRIIDSRSLDLLVTPELIDRYRELLNRTFVEDNDTLKWCPAPDCTNAVECAIKKKDLDKVVPTVACACAHRFCFGCTLNDHLPAPCELVRKWLKKCADDSETANWISANTKECPKCNSTIEKNGGCNHMTCRKCRHEFCWMCMGLWSEHGTSWYNCNRFEEKSGTDARDAQAKSRVSLERYLHYYNRYANHEQSARLDKDIYQKTEKKMVQLQTASGMSWIEVQYLSVASVALQECRQTLKWTYAFAFYLARNNLTEIFEDNQKDLEMAVEALSEMFEKPIADLADSKNKVNIMDKTAYCNKRRKILLEDTADNLANGRWTFTIDPKVPTPAATRR

SEQ ID NO: 19795 - DNA, 2837 bp, Muscodor strobelii
  misc_feature: SGI EST ID NO. CUFF.46446.0
  misc_feature: Variant of the nucleotide sequence at SEQ ID NO 19793
caacttctgactctctaacccacgaatctccaacaaccgtgcctcctgttgttggttgtggtcagcgaagcgttattgggtttgaatttttatctcctagtcgtttggtgctatagagaacttctacgaccctacgaccctacgaccctacgaccctacgaccctacgaccctacgaccctaactgtaccatacaatccactcagctcagcctgacctcactgttgtcatcatcaccaccgtcattcaatccttgcctcgctaccgttgctcctgcacgttccatcccatctcttccgagtcttttgttttcctcaactgccacaacagcagcatctgagactgcatcttcgacacatcgacacccccacacattgccgtcatcgccgtcttcacgagcacaggtcgcttgctgagtctgaacatcaccactgcacgctgctcaacgaacatatctccgcaactgtagatgactggtgccccaagacgttgttgctagcctagaactatatccgctaggcactgccaccaaactttctccgtctctgcctgggactgtagataaatagtagcccgcccgctgcctttccagagccttagtcatagagtcttctgaggctcgctcacggcgagcatcccgccaaccaacaccccgagcgggcagaattcctcccaccacgagaaaacggaaggccgctgaggcgacgacatccccctccacagacacactgcccccaaacaagcgagtactcgctcaagcggcagcctcgacctcagcagcacccctcaccccaaccacaggcatggattccgacgacgacttcgtgtccaacatgtccagcgacgacgacctgttgcaggatgacaccgacaatgacatgtcgggcggagaaggcttcgatgtctttgacgaggcacccgatgacgatcccagcgtgccataccacaagtcggacaagaaaaagggcgtcacgttcgacgtcagttacaaggtctacaagccagaagatatccaacacgagcaagatgagatgattgatgaagtcaacatgatcctagagatgcggaaagaagatgctgccatcatgttgcggtatttccggtggaacaaagaacgtctcatcgaggactacatggataaccccaacaaagtcttgacagccgccggcctcggctccggcccagacaaagcccccaagataggagcgatacctggttttacatgcgagatctgctttgaggacgaagatggcctgcagagctttgcactaaaatgcggccatcgctactgtttagattgctaccgacagtatctgacacagaagatccgcgaggaaggcgaagcagcgaggatccaatgcccgtcggaaggatgttctcgaatcatcgattctcgctccctcgaccttctcgtaaccccagagttgattgatcgatatcgcgaattgcttaacaggactttcgtggaagacaacgacacgttgaagtggtgtcctgcacccgactgtaccaatgccgtggagtgcgccattaagaagaaggatttagacaaggtcgtgcccacggtcgcctgcgcctgcgcacatcgattctgcttcgggtgcacactgaacgaccacctcccggccccttgcgaacttgtcagaaagtggctcaagaaatgtgcagatgacagtgaaacagcgaactggatatcagccaacaccaaggagtgccccaagtgtaactcgacgatcgagaagaacggcggctgcaatcacatgacctgcaggaaatgcaggcatgagttctgctggatgtgtatgggcttgtggtcggagcatggcacgagctggtacaactgcaaccgattcgaagagaaaagcggcacggatgctagggacgcccaggccaaatctcgagtttctttggagcggtacctgcattactacaatcgctatgccaaccacgagcaatcagcacgcctggacaaagatatctatcagaagacagagaagaagatggtgcagctgcagacagcatctggcatgtcctggatcgaggtgcaatacctaagcgtagcctccgtagccctccaggagtgtcggcagacactgaagtggacttatgcattcgcgttctatctcgcacgaaacaacctaacggagatatttgaggacaaccagaaggacttggagatggcggtagaagcgctctcggaaatgttcgagaagcccatcgcagaccttgcagactccaaaaacaaggtgaacatcatggacaaaactgcctactgcaacaagcgtcgaaagattcttcttgaggacacggcggataaccttgctaatggccgctggactttcaccatagaccccaaagtgcctacgcccgccgctacccgccgctgacgtcccgttgatgtgtattgtaacgacttgattagatagactccttttctggcagcattgaaaagaaacggcgtatgatgcatggaagcaatcaagcatacctttcacattacatttgcctgccttgctttttgtctgattactgggctgcgtccagactatacttcggccggatgggatgagatcatgggatcaggggatgataactgggctgctctgctccagttaccctgggtatcttctgtctattgtgtatgtagtagtaaattgcgctggcttaggcaaacccattgtggtctgaaaatgaagtggtagttcatgaatgctgacaggcccttttgaaactgtgttgtgctgtgcaaagacgtgactagcaggctatgagcaaaaaggatgatacaccggatagatacgaaacaagatttcggatagctagtaagctgcatttagg

SEQ ID NO: 19796 - DNA, 2331 bp, Muscodor strobelii
  misc_feature: SGI cDNA ID NO. 566665
  misc_feature: Encodes the peptide sequence at SEQ ID NO 19797
atgcgatcccccttcaccgcgtccttaacgacattccttcatttgacactgtcaatgacacgacggaaaagagcaggactgttgccgctattgaaatcaatacatcgacctgcacaattaaagaagttctcaggcgagacatttggtgtagacgcatatggctggcttcatcgaggcgctatctcttgcgccatcgagcttgctgaaggcaagcctactcgaggatatgtcgactttgccatgaaaatagtgcggatggtgatgcactttggtgtcaccccgtacatggtttttgatggcgatttcttaccaagcaaagcttcaacggaagcctcccgcttagagagtcgagagaaaaggagagcccttggtatggacctgttaaaagccgggaagccctctcaagctcaccaagaactacaaaaagccattgatgtgactcccgagatggctcgacatctaattgaagctttgaaacaggcgggtgttccgtatgtggtagcgccgtatgaagcagatgctcaaatggtatacttggaacgccaaggcataatcagcggcattatttcggaggactcagatctgctaattttcggcgccaaacgacttataacgaagctcaatcatcaaggcgaatgtgttgaaatcaaccgtcgagactttggggcttgtcgcgaagtgtctctcactagttggagtgatgaatcctttagacatatgggcattctaagtggttgcgactatctcagcggtttacctggaatgggcctcaggactgcacatcgaatgctgcgcaaacatagatcgcctgagcgagtgatacgcatggttcaattcgaaggcaaacaccctgttccggcggactatttgactcgcttcaagcaagcagagcagacatttctataccaatgggtattctgcccaaccgccagaaagctcgtgaacctcactccgctcccagacggtatggatctggagcaacttcccttcattggacgttacgtagagccggaacttgctcagaaggtcgcgtcaggagagtacaacccgatgacaaaacagttgatttccatcgaatctctaccgccaccaagaaaaaggaccgcatcagcagccgatcgtagtgtggttaggccaatgcaacgtactcaagaaccgccgaagaaaccgatagatgcttactttaaaggccacaaacggatagccttaggggaaatggatcccaactgtttcgtgccagatcccaacaggtcatccaccgcaagtgaaggggctcgcccgattgtatttccacttccaagaccgtacatagatagcaccgatccacgtccttcggggacgtctcgcacctatgttcagagggatgagaccggccgcattttacgtcgacgaacagaaccaatctccaatctactagctaatggcggacggtcgttggcccctgaatcgcgtcggcgaccggctggacacgaaatcacaacaccctcacagccagagagcccttctgttccaagtgggcatcgtccccttaagaaagcccgcctttgcgaggacgctgcctctgggctcagccctcgaaaagaacgaagcaaatttttctcaccaaagggcatccaatctccacgcaagatgaaacgagacggatacttaatgtcagatgactcgatcgaagaggcgctgaaggatcttcctgacgttgatgaatggagttcaagcacaaccgtccgcaagagcataaccgtctacgaggagcctacacaggctagcttgtcgaacggtccaccggatcatgacggtgtagtacccgacacaccgccgaaatcatccctcaatcgattcgcgtatacccctagtgccaagccggagacttcacaaccaacgaggcggtcacatagaccgagctcaatgtcgtctacacgaagttcaatagtgacgtcaactcccatgtcgacgaccagtcaaagtcaaccgtcgacagccaagaccacacccgcaacaccacggctttcgcctctagaacggctaggcatacaggccctctcccgaagcaagccctctccgacgccgacatttgtgaagccccgacagcccaaacgttctagtctgggccggatgagtctggatgcgattcctgtcaacccggcgtttgtgccacttccgccggtcgacaaggcagagagagcagcactgaaggagccggtgggcagcgaagactttcttgtgccggatactagtgagagcgaggacgtcgaaaacagccctccagccgttgcacgtcatagtattaagacaggcttggacctgtctcgatttcgtttgagttatgcatag

SEQ ID NO: 19797 - protein, 776 aa, Muscodor strobelii
  misc_feature: SGI Peptide ID NO. 566665
  misc_feature (159)..(251): Pfam Id: PF00867 Pfam Desc: XPG I-region
  misc_feature (26)..(120): Pfam Id: PF00752 Pfam Desc: XPG N-terminal domain
  misc_feature (25)..(742): NCBI GI: 116203679 Blast Desc: CHGG_09723 [Chaetomium globosum CBS 148.51] gi|88175851|gb|EAQ83319.1| CHGG_09723 [Chaetomium globosum CBS 148.51]
  misc_feature (26)..(742): NCBI GI: 256732601 Blast Desc: [Nectria haematococca mpVI 77-13-4]
  misc_feature (26)..(771): NCBI GI: 39974025 Blast Desc: MGG_00841 [Magnaporthe grisea 70-15] gi|145018218|gb|EDK02497.1| MGG_00841 [Magnaporthe grisea 70-15]
  misc_feature (25)..(742): NCBI GI: 46125331 Blast Desc: FG07043.1 [Gibberella zeae PH-1]
  misc_feature (26)..(774): NCBI GI: 171679457 Blast Desc: protein product [Podospora anserina] gi|170939354|emb|CAP64582.1| protein product [Podospora anserina]
  misc_feature (26)..(744): NCBI GI: 85092799 Blast Desc: NCU06089 [Neurospora crassa OR74A] gi|28920991|gb|EAA30315.1| conserved [Neurospora crassa OR74A]
  misc_feature (25)..(771): NCBI GI: 154294321 Blast Desc: BC1G_13933 [Botryotinia fuckeliana B05.10] gi|150844772|gb|EDN19965.1| BC1G_13933 [Botryotinia fuckeliana B05.10]
  misc_feature (26)..(744): NCBI GI: 119492135 Blast Desc: exonuclease, [Neosartorya fischeri NRRL 181] gi|119411698|gb|EAW21641.1| exonuclease, [Neosartorya fischeri NRRL 181]
  misc_feature (26)..(684): NCBI GI: 154281289 Blast Desc: conserved [Ajellomyces capsulatus NAm1] gi|150411636|gb|EDN07024.1| conserved [Ajellomyces capsulatus NAm1]
  misc_feature (26)..(744): NCBI GI: 159127722 Blast Desc: exonuclease, [Aspergillus fumigatus A1163]
MRSPFTASLTTFLHLTLSMTRRKRAGLLPLLKSIHRPAQLKKFSGETFGVDAYGWLHRGAISCAIELAEGKPTRGYVDFAMKIVRMVMHFGVTPYMVFDGDFLPSKASTEASRLESREKRRALGMDLLKAGKPSQAHQELQKAIDVTPEMARHLIEALKQAGVPYVVAPYEADAQMVYLERQGIISGIISEDSDLLIFGAKRLITKLNHQGECVEINRRDFGACREVSLTSWSDESFRHMGILSGCDYLSGLPGMGLRTAHRMLRKHRSPERVIRMVQFEGKHPVPADYLTRFKQAEQTFLYQWVFCPTARKLVNLTPLPDGMDLEQLPFIGRYVEPELAQKVASGEYNPMTKQLISIESLPPPRKRTASAADRSVVRPMQRTQEPPKKPIDAYFKGHKRIALGEMDPNCFVPDPNRSSTASEGARPIVFPLPRPYIDSTDPRPSGTSRTYVQRDETGRILRRRTEPISNLLANGGRSLAPESRRRPAGHEITTPSQPESPSVPSGHRPLKKARLCEDAASGLSPRKERSKFFSPKGIQSPRKMKRDGYLMSDDSIEEALKDLPDVDEWSSSTTVRKSITVYEEPTQASLSNGPPDHDGVVPDTPPKSSLNRFAYTPSAKPETSQPTRRSHRPSSMSSTRSSIVTSTPMSTTSQSQPSTAKTTPATPRLSPLERLGIQALSRSKPSPTPTFVKPRQPKRSSLGRMSLDAIPVNPAFVPLPPVDKAERAALKEPVGSEDFLVPDTSESEDVENSPPAVARHSIKTGLDLSRFRLSYA

SEQ ID NO: 19798 - DNA, 2986 bp, Muscodor strobelii
  misc_feature: SGI EST ID NO. CUFF.46321.0
  misc_feature: Variant of the nucleotide sequence at SEQ ID NO 19796
atcgaccgtaggttgcggagtgaaattcgtttgaaacgagatgggtatcaaaggtaggttgttcatctgttttgtcttcgttctgttcgcacactgataaagagcaggactgttgccgctattgaaatcaatacatcgacctgcacaattaaagaagttctcaggcgagacatttggtgtagacgcatatggctggcttcatcgaggcgctatctcttgcgccatcgagcttgctgaaggcaagcctactcgaggatatgtcgactttgccatgaaaatagtgcggatggtgatgcactttggtgtcaccccgtacatggtttttgatggcgatttcttaccaagcaaagcttcaacggaagcctcccgcttagagagtcgagagaaaaggagagcccttggtatggacctgttaaaagccgggaagccctctcaagctcaccaagaactacaaaaagccattgatgtgactcccgagatggctcgacatctaattgaagctttgaaacaggcgggtgttccgtatgtggtagcgccgtatgaagcagatgctcaaatggtatacttggaacgccaaggcataatcagcggcattatttcggaggactcagatctgctaattttcggcgccaaacgacttataacgaagctcaatcatcaaggcgaatgtgttgaaatcaaccgtcgagactttggggcttgtcgcgaagtgtctctcactagttggagtgatgaatcctttagacatatgggcattctaagtggttgcgactatctcagcggtttacctggaatgggcctcaggactgcacatcgaatgctgcgcaaacatagatcgcctgagcgagtgatacgcatggttcaattcgaaggcaaacaccctgttccggcggactatttgactcgcttcaagcaagcagagcagacatttctataccaatgggtattctgcccaaccgccagaaagctcgtgaacctcactccgctcccagacggtatggatctggagcaacttcccttcattggacgttacgtagagccggaacttgctcagaaggtcgcgtcaggagagtacaacccgatgacaaaacagttgatttccatcgaatctctaccgccaccaagaaaaaggaccgcatcagcagccgatcgtagtgtggttaggccaatgcaacgtactcaagaaccgccgaagaaaccgatagatgcttactttaaaggccacaaacggatagccttaggggaaatggatcccaactgtttcgtgccagatcccaacaggtcatccaccgcaagtgaaggggctcgcccgattgtatttccacttccaagaccgtacatagatagcaccgatccacgtccttcggggacgtctcgcacctatgttcagagggatgagaccggccgcattttacgtcgacgaacagaaccaatctccaatctactagctaatggcggacggtcgttggcccctgaatcgcgtcggcgaccggctggacacgaaatcacaacaccctcacagccagagagcccttctgttccaagtgggcatcgtccccttaagaaagcccgcctttgcgaggacgctgcctctgggctcagccctcgaaaagaacgaagcaaatttttctcaccaaagggcatccaatctccacgcaagatgaaacgagacggatacttaatgtcagatgactcgatcgaagaggcgctgaaggatcttcctgacgttgatgaatggagttcaagcacaaccgtccgcaagagcataaccgtctacgaggagcctacacaggctagcttgtcgaacggtccaccggatcatgacggtgtagtacccgacacaccgccgaaatcatccctcaatcgattcgcgtatacccctagtgccaagccggagacttcacaaccaacgaggcggtcacatagaccgagctcaatgtcgtctacacgaagttcaatagtgacgtcaactcccatgtcgacgaccagtcaaagtcaaccgtcgacagccaagaccacacccgcaacaccacggctttcgcctctagaacggctaggcatacaggccctctcccgaagcaagccctctccgacgccgacatttgtgaagccccgacagcccaaacgttctagtctgggccggatgagtctggatgcgattcctgtcaacccggcgtttgtgccacttccgccggtcgacaaggcagagagagcagcactgaaggagccggtgggcagcgaagactttcttgtgccggatactagtgagagcgaggacgtcgaaaacagccctccagccgttgcacgtcatagtattaagacaggcttggacctgtctcgatttcgtttgagttatgcataggcgcaaatgatacgggctctagtatattcatgtgtatggagtttataggcagcatagcgaggggcgttcctcccgtgttttaaataggatggcgttagggccataatgaatggactattgatgtggcatcttgacactgcacggacttagggactatacctcaatctttaatatgatgcctctcccgtgttatgaagcaatgcctgatttggcacttgcttttagtgcaaaggcttgtcttcaactcaaaggcagttagtttagtctatgccaagcacaaacaaacttcagcatccaccttcagtctttataagcaattaattttcaaagctaaccgaacacaaaaggatagccatagccttaaagatggcagaatagtcattcttaaatagaatcactaatgctttggtacagcactgaaaccatcgatggtcaactgtcttggatattggacacacaagttgttgcatgtgccgatacgagctatatcagtaaattggtagactggctcatgttcaatttggtctagactatggaaacaaacagcgctaaaaaaggcccacaagccgcttactacaatacattatactagatgtagatctcagaatatgagtaggaaactag

SEQ ID NO: 19799 - DNA, 540 bp, Muscodor strobelii
  misc_feature: SGI cDNA ID NO. 566666
  misc_feature: Encodes the peptide sequence at SEQ ID NO 19800
atgccgaagacactggagcgcatacgcaaggctattgcgaaaaagaaggggacggtcgaagctctacaccagtattctcgagactctaaaaggatgcatcgagcccaggtcagagatgaaaaactagagaaaattgctgcagccagaaaaaagcaggatcagccatacattgaacgcactgctttctttcaagaagctttgaagcagaatggcagccaaccactcaatctcgatgcaattcaagatctcatcaaaacctatgttcatcaatatgatgaagaactcgataccgtgaaaaaggcccgtaggcctggtcagcctgccaaggcaaaggaggacctgctcaaaatgaagattgctcagttgcaaaaagagtaccaacacggatttttgcttccagtgcttgatgccgaggagaacaccgccattgtcgaaaagtgggaaggttcatggtcctacttgacgacattcaagtgggtgagaatatcggcggatggcaaggttcaacctgcgatattcccacccaaagggaaccactga

SEQ ID NO: 19800 - protein, 179 aa, Muscodor strobelii
  misc_feature: SGI Peptide ID NO. 566666
  misc_feature (1)..(175): NCBI GI: 261354717 Blast Desc: conserved [Verticillium albo-atrum VaMs.102]
  misc_feature (1)..(178): NCBI GI: 85092797 Blast Desc: NCU06088 [Neurospora crassa OR74A] gi|28920990|gb|EAA30314.1| [Neurospora crassa OR74A]
  misc_feature (1)..(178): NCBI GI: 154294323 Blast Desc: BC1G_13934 [Botryotinia fuckeliana B05.10] gi|150844773|gb|EDN19966.1| BC1G_13934 [Botryotinia fuckeliana B05.10]
  misc_feature (1)..(178): NCBI GI: 156039403 Blast Desc: SS1G_11838 [Sclerotinia sclerotiorum 1980] gi|154697575|gb|EDN97313.1| SS1G_11838 [Sclerotinia sclerotiorum 1980]
  misc_feature (1)..(174): NCBI GI: 256733043 Blast Desc: NECHADRAFT_78952 [Nectria haematococca mpVI 77-13-4]
  misc_feature (1)..(179): NCBI GI: 46125329 Blast Desc: FG07042.1 [Gibberella zeae PH-1]
  misc_feature (1)..(175): NCBI GI: 145610881 Blast Desc: MGG_00842 [Magnaporthe grisea 70-15] gi|145018217|gb|EDK02496.1| MGG_00842 [Magnaporthe grisea 70-15]
  misc_feature (57)..(177): NCBI GI: 116203677 Blast Desc: CHGG_09722 [Chaetomium globosum CBS 148.51] gi|88175850|gb|EAQ83318.1| CHGG_09722 [Chaetomium globosum CBS 148.51]
  misc_feature (1)..(177): NCBI GI: 121705314 Blast Desc: conserved [Aspergillus clavatus NRRL 1] gi|119399066|gb|EAW09494.1| conserved [Aspergillus clavatus NRRL 1]
  misc_feature (1)..(177): NCBI GI: 226285458 Blast Desc: conserved [Paracoccidioides brasiliensis Pb01]
MPKTLERIRKAIAKKKGTVEALHQYSRDSKRMHRAQVRDEKLEKIAAARKKQDQPYIERTAFFQEALKQNGSQPLNLDAIQDLIKTYVHQYDEELDTVKKARRPGQPAKAKEDLLKMKIAQLQKEYQHGFLLPVLDAEENTAIVEKWEGSWSYLTTFKWVRISADGKVQPAIFPPKGNH

SEQ ID NO: 19801 - DNA, 1492 bp, Muscodor strobelii
  misc_feature: SGI EST ID NO. CUFF.46330.0
  misc_feature: Variant of the nucleotide sequence at SEQ ID NO 19799
aaaaaaagtacaccaagtttggttgacttaagcattctcatcgatatctctctgcacaacacgatattactgccaactgtctctaattgaaactctctactatatcagtagctatgccgaagacactggagcgcatacgcaaggctattgcgaaaaagaaggggacggtcgaagctctacaccagtattctcgagactctaaaaggatgcatcgagcccaggtcagagatgaaaaactagagaaaattgctgcagccagaaaaaagcaggatcagccatacattgaacgcactgctttctttcaagaagctttgaagcagaatggcagccaaccactcaatctcgatgcaattcaagatctcatcaaaacctatgttcatcaatatgatgaagaactcgataccgtgaaaaaggcccgtaggcctggtcagcctgccaaggcaaaggaggacctgctcaaaatgaagattgctcagttgcaaaaagagtaccaacacggatttttgcttccagtgcttgatgccgaggagaacaccgccattgtcgaaaagtgggaaggttcatggtcctacttgacgacattcaagtgggtgagaatatcggcggatggcaaggttcaacctgcgatattcccacccaaagggaaccactgagctccaacactagccataggtatctctcctaattggttcttcatctgtgaactatgtataactcgagactgtcgatttgatactgctagactcaccgtatggccactacatatcaatgcctgtcgcattttgagcttgacccattggtcctcacgctcggcagatctttctacatcttctggtacggcgggtcgactacgccccggcgcagggagccgcttcgatatggcacggactcgacgccattctgcccattcacagtgacggactctcggctgaccgcatcagcgcatcactccaaagcggcagcttgcaccatcatcaggctgacacatggttttcgatccactcgattttccgacttgagacatctcttgcatgccatgcggggtcgctcttgggcctgttctagatatgctagccagtggattgtatgagtgaagagagggaggcttcgagaaatttacacacactgtagaattgctgcagatgggtttcgccagcgtacgtccagcggtgagttggtgcacccccaatcacgcagaaagcatcacgtgggcattcgccagtgtctactcaagccatccatatgccgttcgacttagggtggtagtcatgtcctagatccgggacgatactttgtacaccgaacgacgcacaaagttcagatctttcggtttcgtccagatccctggtgtctcccacaagccgctgggctaggaacgacgggcagatagattagattgctagaccaataaacacccctcgtcgtcgcttaagcgcatctcgatcgaccaaacgcatctcgccatttcttaagtctgcccgatcggatatgc

SEQ ID NO: 19802 - DNA, 672 bp, Muscodor strobelii
  misc_feature: SGI cDNA ID NO. 566667
  misc_feature: Elevated expression when VOC is produced
  misc_feature: Encodes the peptide sequence at SEQ ID NO 19803
atgtatgctactgagcttatcgttctcgccttgtcggccgccagtctggtaacagcacatggcaaggtgcaggtcgtaacaggcgatcaaggtggaaatggcaccgctcttggtatccagggtgactccgtaccaagattcggtgagaacgctgcaacggaagcagacactaccgttttcggtggcagagccaagaaccctatgcaagatggtcttggtgagaccactgacagcggagacctcgcggtatctgacctggcagccacaatgaaaattgctggtgacactctgccacaagtttctgatgacggctccggcacggtctccggcacctggcgcatcgtcaccagtgacggcacagcgaacgacgcggacgggaacctcttcgctgttcttgacgagtcaggcaccggtactttctctcaagtgcagcgtgccctcagagccctaggcaagagggccaccaacgtcggtgcagatgcacaattctctgttaagatccctgctggcactaagtgcactggatccgattccggaagtggacaggataacttttgcttgttgaaggttgcgaacaacaacaatgctggcccattcggcggcactgttgctttccagatcgctggctctggcaaagccgccgccaagcgccaagagaaattccgtgcctaa

SEQ ID NO: 19803 - protein, 223 aa, Muscodor strobelii
  misc_feature: SGI Peptide ID NO. 566667
  misc_feature (16)..(210): NCBI GI: 154305273 Blast Desc: BC1G_08931 [Botryotinia fuckeliana B05.10] gi|150853673|gb|EDN28865.1| BC1G_08931 [Botryotinia fuckeliana B05.10]
  misc_feature (1)..(206): NCBI GI: 156055166 Blast Desc: SS1G_04934 [Sclerotinia sclerotiorum 1980] gi|154702719|gb|EDO02458.1| SS1G_04934 [Sclerotinia sclerotiorum 1980]
  misc_feature (1)..(222): NCBI GI: 154292179 Blast Desc: [Botryotinia fuckeliana B05.10] gi|150846262|gb|EDN21455.1| [Botryotinia fuckeliana B05.10]
  misc_feature (7)..(207): NCBI GI: 156040980 Blast Desc: SS1G_11468 [Sclerotinia sclerotiorum 1980] gi|154695852|gb|EDN95590.1| SS1G_11468 [Sclerotinia sclerotiorum 1980]
  misc_feature (6)..(142): NCBI GI: 116192571 Blast Desc: [Chaetomium globosum CBS 148.51] gi|88181916|gb|EAQ89384.1| [Chaetomium globosum CBS 148.51]
  misc_feature (1)..(207): NCBI GI: 169615026 Blast Desc: SNOG_10667 [Phaeosphaeria nodorum SN15] gi|111060941|gb|EAT82061.1| SNOG_10667 [Phaeosphaeria nodorum SN15]
  misc_feature (4)..(207): NCBI GI: 51556853 Blast Desc: Gas1-like protein [Dactylellina haptotyla]
  misc_feature (11)..(223): NCBI GI: 261354656 Blast Desc: CAS1 [Verticillium albo-atrum VaMs.102]
  misc_feature (1)..(218): NCBI GI: 14029698 Blast Desc: AF363065_1 MAS3 protein [Magnaporthe grisea] gi|16755848|gb|AAL28112.1|AF433133_1 ASG1 [Magnaporthe grisea]
  misc_feature (20)..(210): NCBI GI: 240110513 Blast Desc: CPC735_039350 [Coccidioides posadasii C735 delta SOWgp]
  misc_feature: Useful for introducing or modulating the production of volatile compounds
MYATELIVLALSAASLVTAHGKVQVVTGDQGGNGTALGIQGDSVPRFGENAATEADTTVFGGRAKNPMQDGLGETTDSGDLAVSDLAATMKIAGDTLPQVSDDGSGTVSGTWRIVTSDGTANDADGNLFAVLDESGTGTFSQVQRALRALGKRATNVGADAQFSVKIPAGTKCTGSDSGSGQDNFCLLKVANNNNAGPFGGTVAFQIAGSGKAAAKRQEKFRA

SEQ ID NO: 19804 - DNA, 1300 bp, Muscodor strobelii
  misc_feature: SGI EST ID NO. CUFF.46348.0
  misc_feature: Variant of the nucleotide sequence at SEQ ID NO 19802
gcgatggttcgatgatacagcacaaagcatcacgaccatcgccaacatggcgaatatataaacactgatctttcggcgtaaattcttgatgtattctctatcacagcatcaacaagccttctcacacttctcttcttcctttcttaccttgttctaaaccgactggttcggtctgtcatctgttcgtcttttcgcctttaattccagtcatttcatcgtttttttcgacctttatctcttcgatacgccaataccatcttttcatcatgtatgctactgagcttatcgttctcgccttgtcggccgccagtctggtaacagcacatggcaaggtgcaggtcgtaacaggcgatcaaggtggaaatggcaccgctcttggtatccagggtgactccgtaccaagattcggtgagaacgctgcaacggaagcagacactaccgttttcggtggcagagccaagaaccctatgcaagatggtcttggtgagaccactgacagcggagacctcgcggtatctgacctggcagccacaatgaaaattgctggtgacactctgccacaagtttctgatgacggctccggcacggtctccggcacctggcgcatcgtcaccagtgacggcacagcgaacgacgcggacgggaacctcttcgctgttcttgacgagtcaggcaccggtactttctctcaaggtacacaactcggttgctacgtcggatatggtgggcaagaagggcaacgtagtgcagcgtgccctcagagccctaggcaagagggccaccaacgtcggtgcagatgcacaattctctgttaagatccctgctggcactaagtgcactggatccgattccggaagtggacaggataacttttgcttgttgaaggttgcgaacaacaacaatgctggcccattcggcggcactgttgctttccagatcgctggctctggcaaagccgccgccaagcgccaagagaaattccgtgcctaaggtcaaggattggatgcaattgatcatctcttagatggaacaatctcccggcttcctacatcgattgtaccggagaggggacttgggtatcagcagtagaacacgggatcatgtgtagtagaaggaggacagaattggagctatcgcgattgtatgtgttgggcctacgggggagactagttgaaatgcgcatgtcttgtaaatagttctatcaacacacttctacagtgaatctcaggaaaatcatatccacgaagatcgcacaagaatatgttcaatgaataagtgaatgtgatgagagcgaatagcc

SEQ ID NO: 19805 - DNA, 837 bp, Muscodor strobelii
  misc_feature: SGI cDNA ID NO. 566668
  misc_feature: Encodes the peptide sequence at SEQ ID NO 19806
atggcggcctcgcatgaaacatcttttccagagcgaaatcgagggtggctccagaaccagctcactgaagtcaaccaaccaatccgacacttactggaaggatactccaaaattgctccatctgacgtagtcgcacatgttaatagcatacgagataaggggtttgccgcgaatccctacccttgcatcgggctgtaccgattcactaggcttacactgcttgaccatccattatacggcacgattgtgcagcgcctcaagcagccaaacgcaacctatctcgacatcggctgttgtttcggtcaggatcttcgcaagttggcatttgacggcgttccgtcgcagcatctgaccggtcttgatgttgcagagccattgatggacctaggctatgatttatttcgtgaccgatatacactccagtctgacttccttgttgccgatgttttcttaggatctacgcaaacagcatgggcaaggctgaaggagcgtggtatggatgtcgtgcattgcagcgccttttttcatcttttcccgctcgaacagcaaatgcttgccgcacagaagatcgcaaaacttctcaaaaagggaggtgtcattgtcgggcgccaaattggtagcatcaagcctggtgatgtttcagctattcaagaaaactcgcacagctaccgacatgatgtgtctacttttgaagctatgtggcgcgaggttggggagaaaacacagacaaagtgggaagttgagggcaccttggacatggtaggaattaatccagatagcccggtcgagaatgagtatagccgtcgactgcttttcacagtcaccagagtacgttga

SEQ ID NO: 19806 - protein, 278 aa, Muscodor strobelii
  misc_feature: SGI Peptide ID NO. 566668
  misc_feature (94)..(202): Pfam Id: PF08241 Pfam Desc: Methyltransferase domain
  misc_feature (94)..(200): Pfam Id: PF08242 Pfam Desc: Methyltransferase domain
  misc_feature (16)..(277): NCBI GI: 169615148 Blast Desc: SNOG_10728 [Phaeosphaeria nodorum SN15] gi|111061002|gb|EAT82122.1| SNOG_10728 [Phaeosphaeria nodorum SN15]
  misc_feature (16)..(252): NCBI GI: 255936301 Blast Desc: Pc13g07470 [Penicillium chrysogenum Wisconsin 54-1255] gi|211583797|emb|CAP91816.1| Pc13g07470 [Penicillium chrysogenum Wisconsin 54-1255]
  misc_feature (12)..(250): NCBI GI: 145246226 Blast Desc: An12g02830 [Aspergillus niger] gi|134080076|emb|CAK41122.1| protein product [Aspergillus niger]
  misc_feature (11)..(248): NCBI GI: 242809401 Blast Desc: conserved [Talaromyces stipitatus ATCC 10500] gi|218715986|gb|EED15408.1| conserved [Talaromyces stipitatus ATCC 10500]
  misc_feature (16)..(277): NCBI GI: 189207667 Blast Desc: conserved [Pyrenophora tritici-repentis Pt-1C-BFP] gi|187976260|gb|EDU42886.1| conserved [Pyrenophora tritici-repentis Pt-1C-BFP]
  misc_feature (18)..(251): NCBI GI: 238501122 Blast Desc: conserved [Aspergillus flavus NRRL3357] gi|220692032|gb|EED48379.1| conserved [Aspergillus flavus NRRL3357]
  misc_feature (1)..(277): NCBI GI: 212546783 Blast Desc: conserved [Penicillium marneffei ATCC 18224] gi|210065065|gb|EEA19160.1| conserved [Penicillium marneffei ATCC 18224]
  misc_feature (16)..(251): NCBI GI: 238483841 Blast Desc: conserved [Aspergillus flavus NRRL3357] gi|220701209|gb|EED57547.1| conserved [Aspergillus flavus NRRL3357]
  misc_feature (21)..(248): NCBI GI: 115385673 Blast Desc: conserved [Aspergillus terreus NIH2624] gi|114187830|gb|EAU29530.1| conserved [Aspergillus terreus NIH2624]
  misc_feature (7)..(257): NCBI GI: 169596538 Blast Desc: SNOG_01034 [Phaeosphaeria nodorum SN15] gi|111071409|gb|EAT92529.1| SNOG_01034 [Phaeosphaeria nodorum SN15]
MAASHETSFPERNRGWLQNQLTEVNQPIRHLLEGYSKIAPSDVVAHVNSIRDKGFAANPYPCIGLYRFTRLTLLDHPLYGTIVQRLKQPNATYLDIGCCFGQDLRKLAFDGVPSQHLTGLDVAEPLMDLGYDLFRDRYTLQSDFLVADVFLGSTQTAWARLKERGMDVVHCSAFFHLFPLEQQMLAAQKIAKLLKKGGVIVGRQIGSIKPGDVSAIQENSHSYRHDVSTFEAMWREVGEKTQTKWEVEGTLDMVGINPDSPVENEYSRRLLFTVTRVR

SEQ ID NO: 19807 - DNA, 1149 bp, Muscodor strobelii
  misc_feature: SGI cDNA ID NO. 566669
  misc_feature: Elevated expression when VOC is produced
  misc_feature: Encodes the peptide sequence at SEQ ID NO 19808
atgccggccaggaagaggaagcggcaggcaatgaagccggcatacccacacacggggccttgctatttgttcacaatccctcccgaacttcgcagccttatatattcgaaagttttctccagcactagattatcttacggccgaagatgcagaggcgaagagtgcggtatccatttgcatgacactgtcgtacccgcccgcaattcgatcgcccttttgaggacatgccgaaggatcacaagtgatatcggagatcgatggctgggccaagtattgttcaacttcgaagacattgtttcaatgctggataaacttagtgctatctctaagacgctcctgtcaaagatccgtcatttacgtgtccggagcgagaagctactcttctatttcccgggcggatcagaaaatagtcctttcatccaaatactaaagttcttaccaggtttaaggctagatactctcactatccttcaaagattcgagagcagaaacacttatgcggcaatcggcgacctcgtggacctaggacaagggtggaaagaactgcgtgtgatttcgaagacctcaaggctacttggatataacgatcagccctggcgtgagcctcaaccagaggactggctgcggaggatagaacatcgtgacgggcctgatcgtcgcccgtctgtgacaatctatcgatcaaagagagtcggctcaatactgaaagagtcgtctcgtgttgaatacgtccaagactcaccccaaacgccagaagaacaatcggcctatcaaatatcggagaattctgaacttatgtcaagtgccaggcaaatgatggtggtggtaaggcgtggctcgggagtcgactacgaggagcaaggtgaattgcttgacaacgatattcggaagagaaaccacgaacacaatagatcgtgggcagacataaagcaggattacattactagaccatcacgacaccactggaaggaacctgaagttatcctggaagacagatattcgagagtcgacgattacaagtggcccttatttgacggctctccaagttatgttgctggcgggagcggtagaaccgatcctgaatggacatcattcatacacttggactgtgaagggcttgtcgatatagatggcgatgatgatctttag

SEQ ID NO: 19808 - protein, 382 aa, Muscodor strobelii
  misc_feature: SGI Peptide ID NO. 566669
  misc_feature (1)..(341): NCBI GI: 242789599 Blast Desc: conserved [Talaromyces stipitatus ATCC 10500] gi|218717983|gb|EED17403.1| conserved [Talaromyces stipitatus ATCC 10500]
  misc_feature (15)..(341): NCBI GI: 171691238 Blast Desc: protein product [Podospora anserina] gi|170945567|emb|CAP71680.1| protein product [Podospora anserina]
  misc_feature (23)..(310): NCBI GI: 171688030 Blast Desc: protein product [Podospora anserina] gi|170943977|emb|CAP70087.1| protein product [Podospora anserina]
  misc_feature (23)..(287): NCBI GI: 189194966 Blast Desc: conserved [Pyrenophora tritici-repentis Pt-1C-BFP] gi|187979700|gb|EDU46326.1| conserved [Pyrenophora tritici-repentis Pt-1C-BFP]
  misc_feature (1)..(310): NCBI GI: 256725356 Blast Desc: NECHADRAFT_83142 [Nectria haematococca mpVI 77-13-4]
  misc_feature (39)..(288): NCBI GI: 226287908 Blast Desc: PADG_08346 [Paracoccidioides brasiliensis Pb18]
  misc_feature (26)..(348): NCBI GI: 116204469 Blast Desc: [Chaetomium globosum CBS 148.51] gi|88176246|gb|EAQ83714.1| [Chaetomium globosum CBS 148.51]
  misc_feature (23)..(290): NCBI GI: 258573061 Blast Desc: [Uncinocarpus reesii 1704] gi|237900978|gb|EEP75379.1| [Uncinocarpus reesii 1704]
  misc_feature (143)..(316): NCBI GI: 256720174 Blast Desc: NECHADRAFT_19117 [Nectria haematococca mpVI 77-13-4]
  misc_feature (119)..(317): NCBI GI: 116192675 Blast Desc: [Chaetomium globosum CBS 148.51] gi|88181968|gb|EAQ89436.1| [Chaetomium globosum CBS 148.51]
  misc_feature: Useful for introducing or modulating the production of volatile compounds
MPARKRKRQAMKPAYPHTGPCYLFTIPPELRSLIYSKVFSSTRLSYGRRCRGEECGIHLHDTVVPARNSIALLRTCRRITSDIGDRWLGQVLFNFEDIVSMLDKLSAISKTLLSKIRHLRVRSEKLLFYFPGGSENSPFIQILKFLPGLRLDTLTILQRFESRNTYAAIGDLVDLGQGWKELRVISKTSRLLGYNDQPWREPQPEDWLRRIEHRDGPDRRPSVTIYRSKRVGSILKESSRVEYVQDSPQTPEEQSAYQISENSELMSSARQMMVVVRRGSGVDYEEQGELLDNDIRKRNHEHNRSWADIKQDYITRPSRHHWKEPEVILEDRYSRVDDYKWPLFDGSPSYVAGGSGRTDPEWTSFIHLDCEGLVDIDGDDDL

SEQ ID NO: 19809 - DNA, 2059 bp, Muscodor strobelii
  misc_feature: SGI EST ID NO. CUFF.46351.0
  misc_feature: Variant of the nucleotide sequence at SEQ ID NO 19807
catgtttctggtagccggctggaggttggtaagtacctaggtaggtattgtgcttggcgtttgcctgcatcatgcatgggttgtcaagccccgcactcccacgctgacgatgcagcgatttagaacaacgacttcaatctttttcattacagtagtatcaagctacttagacggcttcttctctgcagcagaatattccccgttttttgtcccgcttatacgtcgtgagcatgccggccaggaagaggaagcggcaggcaatgaagccggcatacccacacacggggccttgctatttgttcacaatccctcccgaacttcgcagccttatatattcgaaagttttctccagcactagattatcttacggccgaagatgcagaggcgaagagtgcggtatccatttgcatgacactgtcgtacccgcccgcaattcgatcgcccttttgaggacatgccgaaggatcacaagtgatatcggagatcgatggctgggccaagtattgttcaacttcgaagacattgtttcaatgctggataaacttagtgctatctctaagacgctcctgtcaaagatccgtcatttacgtgtccggagcgagaagctactcttctatttcccgggcggatcagaaaatagtcctttcatccaaatactaaagttcttaccaggtttaaggctagatactctcactatccttcaaagattcgagagcagaaacacttatgcggcaatcggcgacctcgtggacctaggacaagggtggaaagaactgcgtgtgatttcgaagacctcaaggctacttggatataacgatcagccctggcgtgagcctcaaccagaggactggctgcggaggatagaacatcgtgacgggcctgatcgtcgcccgtctgtgacaatctatcgatcaaagagagtcggctcaatactgaaagagtcgtctcgtgttgaatacgtccaagactcaccccaaacgccagaagaacaatcggcctatcaaatatcggagaattctgaacttatgtcaagtgccaggcaaatgatggtggtggtaaggcgtggctcgggagtcgactacgaggagcaaggtgaattgcttgacaacgatattcggaagagaaaccacgaacacaatagatcgtgggcagacataaagcaggattacattactagaccatcacgacaccactggaaggaacctgaagttatcctggaagacagatattcgagagtcgacgattacaagtggcccttatttgacggctctccaagttatgttgctggcgggagcggtagaaccgatcctgaatggacatcattcatacacttggactgtgaagggcttgtcgatatagatggcgatgatgatctttagcttgataaaaaatcaagttgaagggtctaaatacaatcattcacttcagcgacaagatcgaaaccaaacacccaaggcataaaaatcaatcagcctagagaatactcacgattaaaaacaattttgagaccaaatcgccgtgatcgactcattgcggctaaacttgctgagctgatacacagcatttcgttacactaaagttgtaagactcggattactttgaaagagaaaggtgccacagaaagatccaaatataaacattttcaacgacagacttcggtcaaaacttgggttcttggataagagcaaaagaacgcatttttcgacgactacagcttcgatttgcactgcgacgagagttgtcgacgcaccccatgtgcggctcaagctatgacacaaatgctagcttcagcgtagaaacacggcatggatcaagtaacatcgccaaagccgggaattaaagtattttcgccgaaaacttagttgaccttgtggtatggagtatgacttgtcacagctcagagatgagggctcattggttagagaattatccctgcatacatccctagtttagaaaacacaaatgtgtgaaggtactctatgacacttagctctgcaatactcttacaaatttcatatcttgttctggcttcttatgtccatagagtacagacatggcg

SEQ ID NO: 19810 - DNA, 1026 bp, Muscodor strobelii
  misc_feature: SGI cDNA ID NO. 566670
  misc_feature: Encodes the peptide sequence at SEQ ID NO 19811
atggcttcacacgccgctacaacctccaaaaattcgaggtgggaggcatcaaaacaggccgtctccctggtttacgtgaatagcacgactcaactcgacaaacacggcaatcttcatactatatttgatagacatagtgatctccagcttgttgtctatggccctactagcaaagttactgttgacaacggaaacagcaatggcaaaacctgtcaacctaatgataacaagcgcacctttcatgtgtgctcacgtttcctagcacgcgcttctctggtatttgagcggatgctatacggctatttcgttgagtcaaggaagggcgacacatggactgtcccgctacacgacgacaagatcggccctatgtataatcttcttgatcttatgcacggtggtgattccgaagctgtgaaacagcttttagaatacgatttcactttgcgcactgtcaaacggtaccgacacaatgaggatgaaattaccgattggcattatgacatggaacgcagattcagcgaggtttacgagcttgccgtcgtgacagacaaatatgatgcgacgagcctccttcgcccatggatctttcaactggttagacaactcgacagttgcctgtcacactacaccaagaacattggggcatatggcagtgatttgctgccaaaattcctctggattttctgggaaattgggtatcttgattcatttatgagcgtgctccgggaaatggcgaaacggactgtgataaacgactccggcttgctctcgtaccgcaacccaaggtcgacaacatcgacaccctggtttgcccatacgcttgaaccaggaacagcatctagtcagtttgccctaattccaaacgtcacatacatgcgttcaattctgacccaaacccgaaagcttttatcagtgacgagcgcatccggctcctcagcaaaattattaaagatatcgactctaatatctgtttctattgctaccgtgagatatatcacacacttcacggagaaggtcaatggctag

SEQ ID NO: 19811 - protein, 341 aa, Muscodor strobelii
  misc_feature: SGI Peptide ID NO. 566670
  misc_feature (50)..(237): NCBI GI: 256724501 Blast Desc: NECHADRAFT_88143 [Nectria haematococca mpVI 77-13-4]
  misc_feature (50)..(261): NCBI GI: 261353831 Blast Desc: conserved [Verticillium albo-atrum VaMs.102]
  misc_feature (73)..(244): NCBI GI: 154296228 Blast Desc: BC1G_12941 [Botryotinia fuckeliana B05.10] gi|150843505|gb|EDN18698.1| BC1G_12941 [Botryotinia fuckeliana B05.10]
  misc_feature (41)..(264): NCBI GI: 116182756 Blast Desc: CHGG_02006 [Chaetomium globosum CBS 148.51] gi|88186303|gb|EAQ93771.1| CHGG_02006 [Chaetomium globosum CBS 148.51]
  misc_feature (34)..(256): NCBI GI: 85085459 Blast Desc: NCU04437 [Neurospora crassa OR74A] gi|28918606|gb|EAA28278.1| [Neurospora crassa OR74A] gi|40882183|emb|CAF06009.1| related to nuclear pore protein
  misc_feature (76)..(132): NCBI GI: 145612037 Blast Desc: MGG_08044 [Magnaporthe grisea 70-15] gi|145019280|gb|EDK03508.1| MGG_08044 [Magnaporthe grisea 70-15]
  misc_feature (74)..(199): NCBI GI: 170940282 Blast Desc: protein product [Podospora anserina]
MASHAATTSKNSRWEASKQAVSLVYVNSTTQLDKHGNLHTIFDRHSDLQLVVYGPTSKVTVDNGNSNGKTCQPNDNKRTFHVCSRFLARASLVFERMLYGYFVESRKGDTWTVPLHDDKIGPMYNLLDLMHGGDSEAVKQLLEYDFTLRTVKRYRHNEDEITDWHYDMERRFSEVYELAVVTDKYDATSLLRPWIFQLVRQLDSCLSHYTKNIGAYGSDLLPKFLWIFWEIGYLDSFMSVLREMAKRTVINDSGLLSYRNPRSTTSTPWFAHTLEPGTASSQFALIPNVTYMRSILTQTRKLLSVTSASGSSAKLLKISTLISVSIATVRYITHFTEKVNG

SEQ ID NO: 19812 - DNA, 226 bp, Muscodor strobelii
  misc_feature: SGI EST ID NO. CUFF.46360.0
  misc_feature: Variant of the nucleotide sequence at SEQ ID NO 19810
gtgatttgctgccaaaattcctctggattttctgggaaattgggtatcttgattcatttatgagcgtgctccgggaaatggcgaaacggactgtgataaacgactccggcttgctctcgtaccgcaacccaaggtcgacaacatcgacaccctggtttgcccatacgcttgaaccaggaacagcatctagtcagtttgccctaattccaaacgtcacatacatgcg

SEQ ID NO: 19813 - DNA, 3012 bp, Muscodor strobelii
  misc_feature: SGI cDNA ID NO. 566671
  misc_feature: Encodes the peptide sequence at SEQ ID NO 19814
atgagtacagcgatgaaacgaagtggccgtaatggatcgtctaagcccaagagaccactctctggctttctcagccgaatactacccagccaccggccggaacaaggcggcacgaccaggatcacgaatctgccgagagatgatgagtctagctacctcgatcttggcatggatcccaatgatctgacagattggaatctccccaaagaccggccgtcaccggtggtcacaacggatgccgaaagcgtatctaggagaggccgtagcgcgagccgacatcttcagagagataggaatagagatgataggcagcttcgccaaaaatctcaacctccggagcgacggccacgaccgtccagtctgaacatcgcggatacctttagcggacacactacatcccaaggtattagactcggaaaagcacagaccatgaccaaggaggaagtttctgatgctctcaagacaaaggaggatgctcgacgacggcgtagaagtctcaaggaaagcggagactggttaggcgtccagggagcagatccatattcaggtcaacatactgtccttacgcccacagataccgtcagcagcgatatgaccacgccatcgactaaatcacgactgcgcagtctcagccagaagaaaaaggctgctaaactagcttatgaccaggcaatattggaagaagagactgagagagagaagaatctagtactaaaggaacgcctgaagctggagaaaatggaaagggccaaagaggaattgagacaacagtcagagcagatgtctaaatggagtcaacataaacgtcagtggtcttctgctgctgagccaaatctaagcccaattgcacagtccttgaacagctatcagctgatgaatagctcggatgaagttccacctatcggcgttcgcaacttttctcgtcctggagaaagtcgatctcgagctgaatccatcgctgggcattcccctccgccaacggcactaattggtagtttcgaaaacaaggaacccccgaggcaaagtcggaatagaaattattcgacagacactattgttcataatgcctcaccatatacggagatttctcccagactcgcaccagagggacatccacatcgtccagtcttatcccctaatcaggaggatgacctggtaactcctcaactccagaagcaatggaacaaatcggaaaagcattttttatggcgtcgccgccgaagaatgacggaaccaggaaaggatagaggcccgatactccaggccctgaagtcttcggcggtggtgacagacggaagccccgtgtccgatttggaggaagtcccaccagtaccagcgttaccgcccctatatttccagaagaattcagcagatctcttccccgatctgtgtctactggaggacaacctacaagcagtccccgaagaaagccagtcccgcagccaatcaactacgccaatgcgcagcctcaagcgccctggcttgacgataacaacaaactttcagagcccaaaagatcagaaaaaaccgagaaggctctattcggaaaccgcagctacagcgatcttatccctgtggaaatcgaaagggaacacggggcagcaatccattcccaagagtttcgtccccgagcgggggtcgtcactccggggggacatactggagcatatcccattgcgcgacaagaattcgaatcgggaactcgacgacgaccatacggacttccggaaagtacatcaatcgctggacctccccaagaaagcccgaagcaagagtctgggacggatggggcgcctgtccaaggacagggacatggcgaagaacacctcagacgtagtcaaacaatttgcgtccacacgcaccaccatcactactggcttcgagccggggacgccgacccgcatagacggcaccgtgtctcacacgagggaccccgacagactcagcggcaccacgacagtcgtggacagcaacggaaacatgacgagctccaccacacattcgcaacagagcgggaacggcaaacacctttcggaggaggacgtgggttctggcccggagacggatcacagcacgatgtcttcccacgccgccacgccaccgagctcctcggcgagcttagggcgaagtctaaggatagttcagagagatggtgtgttgccccgcggccttgcgatggacgagccgatgaaacaggatctgatgcccaaatgcctcaaactcggggagatgaaggtactcagagcgagcaagagtctagaagagtcgcttatgaaagcccggagtgtgagggacaagcacgaccgcgacatgggagacgaggcgaaaaacgcaataccaagattatttcctctccggccgaagaacacgacaaggcagggaatggacggacaagtagatgtgaagtcccccggcgagctcaagcaggctatgattcaggaggcggctcgcatcgcgctgttgaagagcagggcgaaagatgtggttccaatgcgcagcctgagtcctcagggaggcgaaccgactccgcccgagagtgtgagcgtgagcgtagtcaccaagttggtagatcgtatgccaggggcttgggagagcaccaccgaggtccacgagatgggtatagacgagggggccgtggatcggagtggtcggaagctgtggctcactccgagacgggacggaggaaagcttgatcacaagcaggtcgaaaaagacgatgacaaacacgatcacggtaacaacacaaaacactccaaaaccccagacgcagtcatgacgctacttactatgttcactgcggtcttcaacctagtgtatggactcctggagatgtggtgggagtttgtgagtcctgtgtttgataagcagagtgagctctggaagaggagacagagacagagtagcacatggagcgatatgggtgtttttcttgctgctgggttgtttctgggggttggagtcggtgtcctgtggtttggggcttgggttgggaggagggttttgggtcgttga

SEQ ID NO: 19814 - protein, 1003 aa, Muscodor strobelii
  misc_feature: SGI Peptide ID NO. 566671
  misc_feature (20)..(296): NCBI GI: 171688422 Blast Desc: protein product [Podospora anserina] gi|170944173|emb|CAP70283.1| protein product [Podospora anserina]
  misc_feature (156)..(285): NCBI GI: 85085239 Blast Desc: NCU04384 [Neurospora crassa OR74A] gi|28918553|gb|EAA28225.1| [Neurospora crassa OR74A] gi|40882239|emb|CAF06064.1| [Neurospora crassa]
  misc_feature (163)..(285): NCBI GI: 46136145 Blast Desc: FG09588.1 [Gibberella zeae PH-1]
MSTAMKRSGRNGSSKPKRPLSGFLSRILPSHRPEQGGTTRITNLPRDDESSYLDLGMDPNDLTDWNLPKDRPSPVVTTDAESVSRRGRSASRHLQRDRNRDDRQLRQKSQPPERRPRPSSLNIADTFSGHTTSQGIRLGKAQTMTKEEVSDALKTKEDARRRRRSLKESGDWLGVQGADPYSGQHTVLTPTDTVSSDMTTPSTKSRLRSLSQKKKAAKLAYDQAILEEETEREKNLVLKERLKLEKMERAKEELRQQSEQMSKWSQHKRQWSSAAEPNLSPIAQSLNSYQLMNSSDEVPPIGVRNFSRPGESRSRAESIAGHSPPPTALIGSFENKEPPRQSRNRNYSTDTIVHNASPYTEISPRLAPEGHPHRPVLSPNQEDDLVTPQLQKQWNKSEKHFLWRRRRRMTEPGKDRGPILQALKSSAVVTDGSPVSDLEEVPPVPALPPLYFQKNSADLFPDLCLLEDNLQAVPEESQSRSQSTTPMRSLKRPGLTITTNFQSPKDQKKPRRLYSETAATAILSLWKSKGNTGQQSIPKSFVPERGSSLRGDILEHIPLRDKNSNRELDDDHTDFRKVHQSLDLPKKARSKSLGRMGRLSKDRDMAKNTSDVVKQFASTRTTITTGFEPGTPTRIDGTVSHTRDPDRLSGTTTVVDSNGNMTSSTTHSQQSGNGKHLSEEDVGSGPETDHSTMSSHAATPPSSSASLGRSLRIVQRDGVLPRGLAMDEPMKQDLMPKCLKLGEMKVLRASKSLEESLMKARSVRDKHDRDMGDEAKNAIPRLFPLRPKNTTRQGMDGQVDVKSPGELKQAMIQEAARIALLKSRAKDVVPMRSLSPQGGEPTPPESVSVSVVTKLVDRMPGAWESTTEVHEMGIDEGAVDRSGRKLWLTPRRDGGKLDHKQVEKDDDKHDHGNNTKHSKTPDAVMTLLTMFTAVFNLVYGLLEMWWEFVSPVFDKQSELWKRRQRQSSTWSDMGVFLAAGLFLGVGVGVLWFGAWVGRRVLGR

SEQ ID NO: 19815 - DNA, 1398 bp, Muscodor strobelii
  misc_feature: SGI cDNA ID NO. 566672
  misc_feature: Encodes the peptide sequence at SEQ ID NO 19816
atgccgcgccttgtgaggagacggccgcttatggagcgcgtcaaggccatgctcaacccgatggacttcttgttgtggctgtccgaggagatcgagacgcgcgattgggactcgaagctggtcggcacacagttgggtctgctcatgaacttcagtttcttaattgcacgtgccaatagtggaggcacccgcgtcgcagatccagtattcgatgactatggcggaggcacctcaggctggatcgcatacttggttgagctaattatgtggatcatgatcacggtgtcgtgttccaatgcggtcttcacggtgtatagatcacgcaagtaccgtctgttcgaagcaaacgttgaagtcaagccagaaaccccttctgcccgcagggtccgagtccagtcatctcctgcctcgtcgtcgccgctacgccttctcgcagatattatcagcactgaaagtgccgaatcgagagcacacccagacagcactcgcgacgtatgggaaatctccatgtgggacccgttgcccatatctttgagtctcgtgtgcatattcagccctgtacatatcttgatttacatgatgttcctgcccctggcacccatggacgtccgaccaagcgtcacggtcttcaactgcttgcttttgcaagtcatcatctcggcgcagctcatgctatttcagtcccgattctcccaacaaaacaaggactcggccgtcatacaaaaagaggtcatgcatgaatatgacacaaaatttgttcatcccaatctctacccaacggttagggatgtcggcacccagttcactagagatgactttgggaacgatcaagaattcgttgaagttggtacgccggccgtccagcttcgccgaggatttaaaacacacccgaatcctaactatacgaaacatatcgaccccgatagcactggtgtcaactatatgaatagcgtcatggcgagccccagcgttttcacgcctacacagccagctcgcaagtcagaccagtatgtcaacgccaatgagttacgaagtagggctatagcacagtcggcgcgacgaagtacggctggcccaacaccgttgcgagagagcattagtcgaccagtagctaatgcgtccacgggtacgggaggtggtggttatatgggaatctacaaccatcccagctctccgctgaaaaaggcgcccagtctgggcgaattacaatatcggtcacctcgaaataatagcgagatggcaaatctggagcagtaccaatcacttcagaaacaacgcagccctagcccgttcaagagtgctagaaagagcaccggtagtgcgccaatgcctgcggctaacaacccgtggggcaggccatcaggtccgagagagagatacccctcaatgttccagtag

SEQ ID NO: 19816 - protein, 465 aa, Muscodor strobelii
  misc_feature: SGI Peptide ID NO. 566672
  misc_feature (1)..(459): NCBI GI: 256727022 Blast Desc: NECHADRAFT_32998 [Nectria haematococca mpVI 77-13-4]
  misc_feature (16)..(418): NCBI GI: 46136145 Blast Desc: FG09588.1 [Gibberella zeae PH-1]
  misc_feature (21)..(464): NCBI GI: 261352415 Blast Desc: conserved [Verticillium albo-atrum VaMs.102]
  misc_feature (3)..(439): NCBI GI: 116196566 Blast Desc: CHGG_04881 [Chaetomium globosum CBS 148.51] gi|88180794|gb|EAQ88262.1| CHGG_04881 [Chaetomium globosum CBS 148.51]
  misc_feature (12)..(433): NCBI GI: 85085247 Blast Desc: NCU04386 [Neurospora crassa OR74A] gi|28918555|gb|EAA28227.1| [Neurospora crassa OR74A] gi|40882237|emb|CAF06062.1| conserved [Neurospora crassa]
  misc_feature (1)..(459): NCBI GI: 145231997 Blast Desc: An02g03290 [Aspergillus niger] gi|134056375|emb|CAK47609.1| protein product [Aspergillus niger]
  misc_feature (1)..(443): NCBI GI: 115384526 Blast Desc: conserved [Aspergillus terreus NIH2624] gi|114196502|gb|EAU38202.1| conserved [Aspergillus terreus NIH2624]
  misc_feature (3)..(351): NCBI GI: 145613538 Blast Desc: MGG_01555 [Magnaporthe grisea 70-15] gi|145020602|gb|EDK04731.1| MGG_01555 [Magnaporthe grisea 70-15]
  misc_feature (3)..(438): NCBI GI: 171688460 Blast Desc: protein product [Podospora anserina] gi|170944192|emb|CAP70302.1| protein product [Podospora anserina]
  misc_feature (1)..(396): NCBI GI: 67539422 Blast Desc: AN5881.2 [Aspergillus nidulans FGSC A4] gi|40739200|gb|EAA58390.1| AN5881.2 [Aspergillus nidulans FGSC A4] gi|259479953|tpe|CBF70646.1| TPA: conserved [Aspergillus FGSC
MPRLVRRRPLMERVKAMLNPMDFLLWLSEEIETRDWDSKLVGTQLGLLMNFSFLIARANSGGTRVADPVFDDYGGGTSGWIAYLVELIMWIMITVSCSNAVFTVYRSRKYRLFEANVEVKPETPSARRVRVQSSPASSSPLRLLADIISTESAESRAHPDSTRDVWEISMWDPLPISLSLVCIFSPVHILIYMMFLPLAPMDVRPSVTVFNCLLLQVIISAQLMLFQSRFSQQNKDSAVIQKEVMHEYDTKFVHPNLYPTVRDVGTQFTRDDFGNDQEFVEVGTPAVQLRRGFKTHPNPNYTKHIDPDSTGVNYMNSVMASPSVFTPTQPARKSDQYVNANELRSRAIAQSARRSTAGPTPLRESISRPVANASTGTGGGGYMGIYNHPSSPLKKAPSLGELQYRSPRNNSEMANLEQYQSLQKQRSPSPFKSARKSTGSAPMPAANNPWGRPSGPRERYPSMFQ

SEQ ID NO: 19817 - DNA, 2199 bp, Muscodor strobelii
  misc_feature: SGI EST ID NO. CUFF.46376.0
  misc_feature: Variant of the nucleotide sequence at SEQ ID NO 19815
acgaccacctggcacctgctcagctgcaaacagtggttccaggattgggaaggaatggcccgctgcactgggaccctacctaaaaacgttaacaggacacagtgggattagaacccacccatgcctgcaccttttgtctatagcaaccacaacccctgtactattgttgttttccttttagatggccgcccgtcttgtgcaaacttgtatctgacgaacctttcttgtcaagggcattgcggagcccgaaaccatcgccaaccaagacgccacgggagccttcgtcggccgcagctacggcctagctcgccagagccctcaagatcctgtccattgttgctaccttggcttcaggtctggcatcttagggtgtttccgactaccagacgacacgatgccgcgccttgtgaggagacggccgcttatggagcgcgtcaaggccatgctcaacccgatggacttcttgttgtggctgtccgaggagatcgagacgcgcgattgggactcgaagctggtcggcacacagttgggtctgctcatgaacttcagtttcttaattgcacgtgccaatagtggaggcacccgcgtcgcagatccagtattcgatgactatggcggaggcacctcaggctggatcgcatacttggttgagctaattatgtggatcatgatcacggtgtcgtgttccaatgcggtcttcacggtgtatagatcacgcaagtaccgtctgttcgaagcaaacgttgaagtcaagccagaaaccccttctgcccgcagggtccgagtccagtcatctcctgcctcgtcgtcgccgctacgccttctcgcagatattatcagcactgaaagtgccgaatcgagagcacacccagacagcactcgcgacgtatgggaaatctccatgtgggacccgttgcccatatctttgagtctcgtgtgcatattcagccctgtacatatcttgatttacatgatgttcctgcccctggcacccatggacgtccgaccaagcgtcacggtcttcaactgcttgcttttgcaagtcatcatctcggcgcagctcatgctatttcagtcccgattctcccaacaaaacaaggactcggccgtcatacaaaaagaggtcatgcatgaatatgacacaaaatttgttcatcccaatctctacccaacggttagggatgtcggcacccagttcactagagatgactttgggaacgatcaagaattcgttgaagttggtacgccggccgtccagcttcgccgaggatttaaaacacacccgaatcctaactatacgaaacatatcgaccccgatagcactggtgtcaactatatgaatagcgtcatggcgagccccagcgttttcacgcctacacagccagctcgcaagtcagaccagtatgtcaacgccaatgagttacgaagtagggctatagcacagtcggcgcgacgaagtacggctggcccaacaccgttgcgagagagcattagtcgaccagtagctaatgcgtccacgggtacgggaggtggtggttatatgggaatctacaaccatcccagctctccgctgaaaaaggcgcccagtctgggcgaattacaatatcggtcacctcgaaataatagcgagatggcaaatctggagcagtaccaatcacttcagaaacaacgcagccctagcccgttcaagagtgctagaaagagcaccggtagtgcgccaatgcctgcggctaacaacccgtggggcaggccatcaggtccgagagagagatacccctcaatgttccagtagttctgttgtgttctgacgatttatcggcgcggatggggatgtttcaagcgggccgacttgtaccttaattgttccgcattggccacatacactcatcacttgtgtgtgaggcctacatcgcattttctggcgtttcgtttgtgtccattgggagaggggttttgttcattagcgaagtggtgattcttcgggtgaaacctagactgtgtctcgagagaagactatatggccacctcgacgcttgctctgatgacgatgcgggtctaactaaaccttctacaccacagattagaccatagatctcaacggtgagatctcaaacttaatcacatttgttgatgcctgcacctcttttcttctggtactttcagctgcgtgattgatgtcagtatccttataacctggca

SEQ ID NO: 19818 - DNA, 375 bp, Muscodor strobelii
  misc_feature: SGI cDNA ID NO. 566673
  misc_feature: Encodes the peptide sequence at SEQ ID NO 19819
atggcggcaacacaagcagactacaaggatcggcagttcttagccgtcatcggtgacgaggactcagtcacaggcctgctgctagccggcatagggcacgtaacaagccctcccgactcgcaaaagaatttcctagtagtcgacgcaaagacagagacctcggccatcgagtccgcattcgactccttcacacagcagcggaaagacatcggcatcgtgctgatcaaccaacatgtagcagacaaaatccgccatcgcatcgacacctataccgcagccttccctaccgtccttgagatcccaagtaaagagcacccttatgacccggagaaagacagtgtactgcggagagtgcgcaggttgtttggcgaataa

SEQ ID NO: 19819 - protein, 124 aa, Muscodor strobelii
  misc_feature: SGI Peptide ID NO. 566673
  misc_feature (14)..(117): Pfam Id: PF01990 Pfam Desc: ATP synthase (F/14-kDa) subunit
  misc_feature (3)..(124): NCBI GI: 171688458 Blast Desc: protein product [Podospora anserina] gi|170944191|emb|CAP70301.1| protein product [Podospora anserina]
  misc_feature (1)..(124): NCBI GI: 85085251 Blast Desc: vacuolar ATP synthase subunit F [Neurospora crassa OR74A] gi|12585520|sp|Q9Y756.1|VATF_NEUCR RecName: Full=V-type proton ATPase subunit F; Short=V-ATPase subunit F; AltName: pump
  misc_feature (3)..(124): NCBI GI: 261352414 Blast Desc: vacuolar ATP synthase subunit F [Verticillium albo-atrum VaMs.102]
  misc_feature (3)..(124): NCBI GI: 46136143 Blast Desc: VATF_NEUCR Vacuolar ATP synthase subunit F (V-ATPase F subunit) (Vacuolar proton pump F subunit) (V-ATPase 14 kDa subunit) [Gibberella zeae PH-1]
  misc_feature (3)..(124): NCBI GI: 256727595 Blast Desc: [Nectria haematococca mpVI 77-13-4]
  misc_feature (1)..(124): NCBI GI: 154318008 Blast Desc: vacuolar ATP synthase subunit F [Botryotinia fuckeliana B05.10] gi|150843645|gb|EDN18838.1| vacuolar ATP synthase subunit F [Botryotinia fuckeliana B05.10]
  misc_feature (1)..(124): NCBI GI: 189210249 Blast Desc: vacuolar ATP synthase subunit F [Pyrenophora tritici-repentis Pt-1C-BFP] gi|187977549|gb|EDU44175.1| vacuolar ATP synthase subunit F [Pyrenophora tritici-repentis Pt-1C-BFP]
  misc_feature (3)..(124): NCBI GI: 39951827 Blast Desc: vacuolar ATP synthase subunit F [Magnaporthe grisea 70-15] gi|145020601|gb|EDK04730.1| vacuolar ATP synthase subunit F [Magnaporthe grisea 70-15]
  misc_feature (1)..(124): NCBI GI: 239614316 Blast Desc: V-type ATPase F subunit [Ajellomyces dermatitidis ER-3]
  misc_feature (1)..(124): NCBI GI: 67539420 Blast Desc: AN5880.2 [Aspergillus nidulans FGSC A4] gi|40739199|gb|EAA58389.1| AN5880.2 [Aspergillus nidulans FGSC A4] gi|259479954|tpe|CBF70647.1| TPA: V-type ATPase F subunit,
MAATQADYKDRQFLAVIGDEDSVTGLLLAGIGHVTSPPDSQKNFLVVDAKTETSAIESAFDSFTQQRKDIGIVLINQHVADKIRHRIDTYTAAFPTVLEIPSKEHPYDPEKDSVLRRVRRLFGE

SEQ ID NO: 19820 - DNA, 1156 bp, Muscodor strobelii
  misc_feature: SGI EST ID NO. CUFF.46533.0
  misc_feature: Variant of the nucleotide sequence at SEQ ID NO 19818
gggcagcgtggtctggtaggctggtgttagctgaacttgtcggacgctaaaatcaggaagtacgacccgattgttactgtaagtgttaccgtgtcacaaatggccagagctcctgccgcccgcattcgatccagtagctacatcatcccgagccaaagctcccgccagcgttatcacccatacagcatccctcgttcattaccacatacctccctgatcttcgccgcgtctggtctctgaacaccaacatggcggcaacacaagcagactacaaggatcggcagttcttagccgtcatcggtgacgaggcacggctcccctcagctctcgaacttcttgcatcacaggcagcaagcaagctaacgatatgctcaggactcagtcacaggcctgctgctagccggcatagggcacgtaacaagccctcccgactcgcaaaagaatttcctagtagtcgacgcaaagacagagacctcggccatcgagtccgcattcgactccttcacacagcagcggaaagacatcggcatcgtgctgatcaaccaacatgtagcagacaaaatccgccatcgcatcgacacctataccgcagccttccctaccgtccttgagatcccaagtaaagagcacccttatgacccggagaaagacagtgtactgcggagagtgcgcaggttgtttggcgaataaggtgcctggttttcgggctggagtgggagcagtgtgtgcaagaaagggagtaatcagcttcacatgggagactacgagtacttcgcaaagctgtcggcagctatgaagatctcgggataacgggctgaaagccgtacagatagcgacaagaggcacgcaaagtgtatatatcagcgcatcatcattatacggatcccaggcgccagcatcgtgggcatggagactaagcatgactataggaggcaatgaaacgagttttgcaaatcatgaacaggagtctgttctgctctttgtcggtttgtagagtggtatctcggtcaagtcttataataaggcacctacttatacacactgcaagcatggtaatgtgtccttgcgtgtcaacatatacaatttctgcaacataccaaaaacaggttctgtctaatagtgtgtaaacacctactgtatacgcaaggagggtcga

SEQ ID NO: 19821 - DNA, 534 bp, Muscodor strobelii
  misc_feature: SGI cDNA ID NO. 566674
  misc_feature: Encodes the peptide sequence at SEQ ID NO 19822
atgcggttcttctccgttgcctgcgtggcagccctgtccgccagcaacctggtgtctgccggtagctggttcagcagcgatgccagcaccaaggacgccgagaaggtccccggcgactctcccctcgagctctgcgacagggaccactccaacgacatcgtctccatcgagaaggtcgacctcgcacccaacccacctgaggctggctctgagctcctgattcaggccacgggcaccgtctacgagaccatcgaggacggcgccaaggtccacctcgtcgtcaagtacggccttatcagaatcctcagcaccacattagacctctgcgagcagaccgccaatgtcgacgaggagtgccccatcgagaagggtgtcctgtccatcaccaagtctgtcgagctccccaaggaaatcccgcccggaacctacacggtcagcgccgacgtggtcacgaatgatgacaagcctatcacatgtctccaggctgctgtgaagtttggtgccaagaagcaagactcgcctaatgatttgtag

SEQ ID NO: 19822 - protein, 177 aa, Muscodor strobelii
  misc_feature: SGI Peptide ID NO. 566674
  misc_feature (38)..(166): Pfam Id: PF02221 Pfam Desc: ML domain
  misc_feature (1)..(166): NCBI GI: 261352413 Blast Desc: phosphatidylglycerol/phosphatidylinositol transfer protein [Verticillium albo-atrum VaMs.102]
  misc_feature (1)..(169): NCBI GI: 171688456 Blast Desc: protein product [Podospora anserina] gi|170944190|emb|CAP70300.1| protein product [Podospora anserina]
  misc_feature (1)..(166): NCBI GI: 256727021 Blast Desc: phosphatidylinositol/phosphatidylglycerol transfer protein [Nectria haematococca mpVI 77-13-4]
  misc_feature (1)..(166): NCBI GI: 46136141 Blast Desc: FG09586.1 [Gibberella zeae PH-1]
  misc_feature (1)..(166): NCBI GI: 145613536 Blast Desc: MGG_01557 [Magnaporthe grisea 70-15] gi|73621325|sp|Q52FS9.2|NPC2_MAGGR RecName: Full=Phosphatidylglycerol/phosphatidylinositol transfer protein;
  misc_feature (7)..(177): NCBI GI: 85085255 Blast Desc: phosphatidylglycerol/phosphatidylinositol transfer protein precursor [Neurospora crassa OR74A] gi|73621326|sp|Q7RZ85.1|NPC2_NEUCR RecName: transfer protein;
  misc_feature (4)..(166): NCBI GI: 154318006 Blast Desc: phosphatidylglycerol / phosphatidylinositol transfer protein [Botryotinia fuckeliana B05.10] gi|150843644|gb|EDN18837.1| phosphatidylglycerol / transfer
  misc_feature (1)..(168): NCBI GI: 145232002 Blast Desc: An02g03310 [Aspergillus niger] gi|134056377|emb|CAK47611.1| protein product [Aspergillus niger]
  misc_feature (36)..(166): NCBI GI: 240104719 Blast Desc: phosphatidylglycerol/phosphatidylinositol transfer protein, [Coccidioides posadasii C735 delta SOWgp]
  misc_feature (36)..(166): NCBI GI: 119178795 Blast Desc: CIMG_08198 [Coccidioides immitis RS]
MRFFSVACVAALSASNLVSAGSWFSSDASTKDAEKVPGDSPLELCDRDHSNDIVSIEKVDLAPNPPEAGSELLIQATGTVYETIEDGAKVHLVVKYGLIRILSTTLDLCEQTANVDEECPIEKGVLSITKSVELPKEIPPGTYTVSADVVTNDDKPITCLQAAVKFGAKKQDSPNDL

SEQ ID NO: 19823 - DNA, 981 bp, Muscodor strobelii
  misc_feature: SGI EST ID NO. CUFF.46422.0
  misc_feature: Variant of the nucleotide sequence at SEQ ID NO 19821
acgccactccccagcagcgcctttcccccatccgtttgaacgtaacgtactgcaagcaactcactgagggcaccgcctcctcctccaaccttcctctacgtacattacgcagcttcacactcacaacatcgcacgcatcatcgcacgcattcctacgagcatacatcaccacatccacatacgctcacaaaagaacgaacaaacgactgatcgaccacgggaagaagagcagcgatgcggttcttctccgttgcctgcgtggcagccctgtccgccagcaacctggtgtctgccggtagctggttcagcagcgatgccagcaccaaggacgccgagaaggtccccggcgactctcccctcgagctctgcgacagggaccactccaacgacatcgtctccatcgagaaggtcgacctcgcacccaacccacctgaggctggctctgagctcctgattcaggccacgggcaccgtctacgagaccatcgaggacggcgccaaggtccacctcgtcgtcaagtacggccttatcagaatcctcagcaccacattagacctctgcgagcagaccgccaatgtcgacgaggagtgccccatcgagaagggtgtcctgtccatcaccaagtctgtcgagctccccaaggaaatcccgcccggaacctacacggtcagcgccgacgtggtcacgaatgatgacaagcctatcacatgtctccaggctgctgtgaagtttggtgccaagaagcaagactcgcctaatgatttgtagaggaggacgctgtggttttgattcggttgatttgggaagaacggaggattgtcacggtgtacagtaattagttgaccatacccgcatgattagcaacgtcggcgttcgtatacactcggaatgaatatctgtccaggcttccggctatttctgtctgtatttctagatgttcatcggatgtgacttttgagtaaacatttattgtgaagtaac

SEQ ID NO: 19824 - DNA, 2568 bp, Muscodor strobelii
  misc_feature: SGI cDNA ID NO. 566675
  misc_feature: Reduced expression when VOC is produced
  misc_feature: Encodes the peptide sequence at SEQ ID NO 19825
atgagcaaccaaggcgaagctcgcgacgccccaaactcagccgctgggctctacctgactctagctcccgtcgccgtctcggctgccgtatatttctccattttcttgatattgcggaagagtcaacgtcgcttttatgctccgagaacctatcttggaagcttacgcgagagtgagagaacaccagccctaccaaatggcttagtaaactggttgggggctttttggaagatatcggattaccatccgttacagcaccagtcccttgattcataccttttcctccgcttcatgaaagttttgattgtcatctgctttgtcggagcttgcatcacgtggccagtcctgtttcccgtcgatatcacaggtggtggcggccaaacccagcttaatcttctttcgtacgcgaatattgacaaagaaactcagtacaaccgatactatgcccacgttttcatttcctgggtgtactacggattcgtcatgtacatggtcttgcgagagtcgatcatgtatatcaatcttcgacaggcttttctcttatcaccactgtacgccaaccgaatctcttcgagaaccgtgctttttgtctctgtgccggatgagtacttggatcatgctaggctgcgcaagactttcggtgacgcagttaggaacatctggattgctggagaaacaaaggagctggatgatcttgtgaaggaacgcgataaggtggccatgaagctggagaaggctgaggtcaagcttatcaaacttgccaacaagaatcgactgaaagcaatcaagaaaggtgcttctgatgagcaaaccgagctcgccgcagatgctgagccaggaagcctggcagccagatgggtagcaccgaagaagcgaccctctcacagacttggaccgctgggactcgttggcaagaaagtggacacaatcacttggtgccgcactgaactcgaacgtctcatccccgaaaccgaaaaggcccaagacgtgttccgtgatggtaattacaagaagattaacagtgtcttcatcgaattcgccacacaatcggatgccgaatctgcataccaaatgctggcgcatcaccaagcattgcagatgactcccaagtatatcggtgtcactccaggtgaggtagtgtggagcgcattgaaggtatcttggtggcagagagtcattcgcagattcgccgtgattgggttcatcgcggccctaatcatcttctgggctattcctgttggtgttgttggtatcatttccaacgtcaaagccctctccaatcaggtcttctttctccattggctcaattctcttcccagtcaagtcattggtcttatccagggactcctgccatctatccttttgtctatacttatgtcgcttgtccctgttatcatgagattgtgcgctaagttggcaggcgagccgtcgttatcgcgtgtcgaattgtttacgcagaacgcatacttcgcctttcaggttgttcaggtcttcctcatttcgacattgacttccgctgcgtcatctgcggtatcatcaattatcgaggatccgcaatcggtcacttcgctgctgtcagagaacctcccaaaggcttccaattattacatttcgtacttcattttgcaaggtcttggcattgcggcgagcgttctctcccaggtggtgggcttcgccatcttcaccgtgctctataaattcttgtctggcacgcctcgggccatgtacaagaaatgggccaatctgagtgctatatcttggggaagcgtgctgccagtctatacaaacatcgcagtaatcagcatcacctatgcgggcattgcgccacttatgttgggtttctcgactatcggcatgtcgctcttctatctcgcgtggcgatacaacgtcttctttgtcacggataccaagatagatacgcgtggtctcatatacccgcgtgctttgaagcagctcttcactggtatatacattgcagagctcagcatgattggtcttttcggtacttcagctgccatcggccccgctatcctccagctcgttttcttcatcttcaccatactgttccaactcaccattaatagtgcacttgatccactcctgtacaacctaccccgcacgttagcagaggaggagattgagcgtctcaggattgcgaagattgaaaatggggagaaggacggccatggccagctgaagaatggatccgcgcctaacaggacagcggatggcaagaaggtgaacttcttcaccaagttcttaaagccatggacttactgcgactacgagactctgcgccggcttgtgcccatcaacagcatcgatgtggacaatctgtacgacgagcgaacagtgcgggacgcgtattacccgccatctgtatccagcggggcaccactgctctggattcccgaggactcgatgggcatctcaaagcaggagatccgggataccaatgagatcatctccattacagatgagggttgtactctcacagataagaataagctcgagtgggacactgaatctgtgcggccgcctgtctgggaagaaaagatttactactaa

SEQ ID NO: 19825 - protein, 855 aa, Muscodor strobelii
  misc_feature: SGI Peptide ID NO. 566675
  misc_feature (326)..(745): Pfam Id: PF02714 Pfam Desc: Domain of function DUF221
  misc_feature (326)..(700): Pfam Id: PF02714 Pfam Desc: Domain of function DUF221
  misc_feature (11)..(855): NCBI GI: 116194746 Blast Desc: CHGG_03971 [Chaetomium globosum CBS 148.51] gi|88179884|gb|EAQ87352.1| CHGG_03971 [Chaetomium globosum CBS 148.51]
  misc_feature (2)..(855): NCBI GI: 85108702 Blast Desc: NCU06986 [Neurospora crassa OR74A] gi|28924236|gb|EAA33390.1| conserved [Neurospora crassa OR74A]
  misc_feature (2)..(855): NCBI GI: 171683371 Blast Desc: protein product [Podospora anserina] gi|170941645|emb|CAP67299.1| protein product [Podospora anserina]
  misc_feature (3)..(855): NCBI GI: 256729815 Blast Desc: [Nectria haematococca mpVI 77-13-4]
  misc_feature (12)..(855): NCBI GI: 39951641 Blast Desc: MGG_01463 [Magnaporthe grisea 70-15] gi|145020699|gb|EDK04828.1| MGG_01463 [Magnaporthe grisea 70-15]
  misc_feature (20)..(855): NCBI GI: 154317505 Blast Desc: BC1G_03104 [Botryotinia fuckeliana B05.10] gi|150844278|gb|EDN19471.1| BC1G_03104 [Botryotinia fuckeliana B05.10]
  misc_feature (20)..(855): NCBI GI: 156049423 Blast Desc: SS1G_08418 [Sclerotinia sclerotiorum 1980] gi|154692817|gb|EDN92555.1| SS1G_08418 [Sclerotinia sclerotiorum 1980]
  misc_feature (3)..(855): NCBI GI: 46122551 Blast Desc: FG05653.1 [Gibberella zeae PH-1]
  misc_feature (3)..(855): NCBI GI: 261352475 Blast Desc: phosphate metabolism protein [Verticillium albo-atrum VaMs.102]
  misc_feature (2)..(855): NCBI GI: 258573977 Blast Desc: conserved [Uncinocarpus reesii 1704] gi|237901436|gb|EEP75837.1| conserved [Uncinocarpus reesii 1704]
  misc_feature: Useful for introducing or modulating the production of volatile compounds
MSNQGEARDAPNSAAGLYLTLAPVAVSAAVYFSIFLILRKSQRRFYAPRTYLGSLRESERTPALPNGLVNWLGAFWKISDYHPLQHQSLDSYLFLRFMKVLIVICFVGACITWPVLFPVDITGGGGQTQLNLLSYANIDKETQYNRYYAHVFISWVYYGFVMYMVLRESIMYINLRQAFLLSPLYANRISSRTVLFVSVPDEYLDHARLRKTFGDAVRNIWIAGETKELDDLVKERDKVAMKLEKAEVKLIKLANKNRLKAIKKGASDEQTELAADAEPGSLAARWVAPKKRPSHRLGPLGLVGKKVDTITWCRTELERLIPETEKAQDVFRDGNYKKINSVFIEFATQSDAESAYQMLAHHQALQMTPKYIGVTPGEVVWSALKVSWWQRVIRRFAVIGFIAALIIFWAIPVGVVGIISNVKALSNQVFFLHWLNSLPSQVIGLIQGLLPSILLSILMSLVPVIMRLCAKLAGEPSLSRVELFTQNAYFAFQVVQVFLISTLTSAASSAVSSIIEDPQSVTSLLSENLPKASNYYISYFILQGLGIAASVLSQVVGFAIFTVLYKFLSGTPRAMYKKWANLSAISWGSVLPVYTNIAVISITYAGIAPLMLGFSTIGMSLFYLAWRYNVFFVTDTKIDTRGLIYPRALKQLFTGIYIAELSMIGLFGTSAAIGPAILQLVFFIFTILFQLTINSALDPLLYNLPRTLAEEEIERLRIAKIENGEKDGHGQLKNGSAPNRTADGKKVNFFTKFLKPWTYCDYETLRRLVPINSIDVDNLYDERTVRDAYYPPSVSSGAPLLWIPEDSMGISKQEIRDTNEIISITDEGCTLTDKNKLEWDTESVRPPVWEEKIYY

SEQ ID NO: 19826 - DNA, 3374 bp, Muscodor strobelii
  misc_feature: SGI EST ID NO. CUFF.46887.0
  misc_feature: Variant of the nucleotide sequence at SEQ ID NO 19824
ctgcagctcagctcgtttttctacgtcttcttggatccagacatattgaggcttcgacatctctccttaccatcagtcgagcttttgttgcgctaaggcctccagttggactaaggtgtgatggttgttttctgatcgacgttgtctacctagtgcagagctatccgatctggtcacgacgatccctgacgtccatcggtacatgcaagaggtgcagcaatccacgtacgtacgtaccaattattggatgatagcgcattcattttttctttgtaatttactttgcgtccacccccccaccaagtgttccccttcctgtacagcgctgcttcttgtatatatcaagatccccgactccttggacgtctgccgatgttgattgcttcctcagcagtccacagcactgaccctcctaggccgtgtgagtgttgacttcgactctcgaaccgcaacccatattcaacggtgccgatagcatcgttaccaccgacaagatgagcaaccaaggcgaagctcgcgacgccccaaactcagccgctgggctctacctgactctagctcccgtcgccgtctcggctgccgtatatttctccattttcttgatattgcggaagagtcaacgtcgcttttatgctccgagaacctatcttggaagcttacgcgagagtgagagaacaccagccctaccaaatggcttagtaaactggttgggggctttttggaagatatcggattaccatccgttacagcaccagtcccttgattcataccttttcctccgcttcatgaaagttttgattgtcatctgctttgtcggagcttgcatcacgtggccagtcctgtttcccgtcgatatcacaggtggtggcggccaaacccagcttaatcttctttcgtacgcgaatattgacaaagaaactcagtacaaccgatactatgcccacgttttcatttcctgggtgtactacggattcgtcatgtacatggtcttgcgagagtcgatcatgtatatcaatcttcgacaggcttttctcttatcaccactgtacgccaaccgaatctcttcgagaaccgtgctttttgtctctgtgccggatgagtacttggatcatgctaggctgcgcaagactttcggtgacgcagttaggaacatctggattgctggagaaacaaaggagctggatgatcttgtgaaggaacgcgataaggtggccatgaagctggagaaggctgaggtcaagcttatcaaacttgccaacaagaatcgactgaaagcaatcaagaaaggtgcttctgatgagcaaaccgagctcgccgcagatgctgagccaggaagcctggcagccagatgggtagcaccgaagaagcgaccctctcacagacttggaccgctgggactcgttggcaagaaagtggacacaatcacttggtgccgcactgaactcgaacgtctcatccccgaaaccgaaaaggcccaagacgtgttccgtgatggtaattacaagaagattaacagtgtcttcatcgaattcgccacacaatcggatgccgaatctgcataccaaatgctggcgcatcaccaagcattgcagatgactcccaagtatatcggtgtcactccaggtgaggtagtgtggagcgcattgaaggtatcttggtggcagagagtcattcgcagattcgccgtgattgggttcatcgcggccctaatcatcttctgggctattcctgttggtgttgttggtatcatttccaacgtcaaagccctctccaatcaggtcttctttctccattggctcaattctcttcccagtcaagtcattggtcttatccagggactcctgccatctatccttttgtctatacttatgtcgcttgtccctgttatcatgagatgtaagtcgatagtgaccctcgtacgatttggaaccatggacttaccttttcaacagtgtgcgctaagttggcaggcgagccgtcgttatcgcgtgtcgaattgtttacgcagaacgcatacttcgcctttcaggttgttcaggtcttcctcatttcgacattgacttccgctgcgtcatctgcggtatcatcaattatcgaggatccgcaatcggtcacttcgctgctgtcagagaacctcccaaaggcttccaattattacatttcgtacttcattttgcaaggtcttggcattgcggcgagcgttctctcccaggtggtgggcttcgccatcttcaccgtgctctataaattcttgtctggcacgcctcgggccatgtacaagaaatgggccaatctgagtgctatatcttggggaagcgtgctgccagtctatacaaacatcgcagtaatcagcatcacctatgcgggcattgcgccacttatgttgggtttctcgactatcggcatgtcgctcttctatctcgcgtggcgatacaacgtcttctttgtcacggataccaagatagatacgcgtggtctcatatacccgcgtgctttgaagcagctcttcactggtatatacattgcagagctcagcatgattggtcttttcggtacttcagctgccatcggccccgctatcctccagctcgttttcttcatcttcaccatactgttccaactcaccattaatagtgcacttgatccactcctgtacaacctaccccgcacgttagcagaggaggagattgagcgtctcaggattgcgaagattgaaaatggggagaaggacggccatggccagctgaagaatggatccgcgcctaacaggacagcggatggcaagaaggtgaacttcttcaccaagttcttaaagccatggacttactgcgactacgagactctgcgccggcttgtgcccatcaacagcatcgatgtggacaatctgtacgacgagcgaacagtgcgggacgcgtattacccgccatctgtatccagcggggcaccactgctctggattcccgaggactcgatgggcatctcaaagcaggagatccgggataccaatgagatcatctccattacagatgagggttgtactctcacagataagaataagctcgagtgggacactgaatctgtgcggccgcctgtctgggaagaaaagatttactactaaacggagcaccatgagagttatagctgatcggtggccgtatacccttcgcatccttgttagaggactgcgtctggcctgatcatgttgaccttggaccaacctttaatgtttctgcttttgcaaaatggatgataccaaactaattgtgtaatgggggtggtttgttggagtagttttcaatgttgaatatagcgttctgtaaatgcatgaagtcgcaagccataataataaataacgtttgaaacaaatgtcgaca

SEQ ID NO: 19827 - DNA, 5331 bp, Muscodor strobelii
  misc_feature: SGI cDNA ID NO. 566676
  misc_feature: Encodes the peptide sequence at SEQ ID NO 19828
atggctgacgacggcaagatgaagccttcgtcccaggtgacggaggtttttgataaaatgagtggttttcttaaagccactcactggtcgaaaccatactatagctctctcattcacaataacccagatctccccttccacttgctcgagcatgtcaactgcacgtatatgtcgacacccggccgcgcgccgactctacttgccctgaagcaacacgcacaatcactggctgtactgatctcattattggccccatcgcagcgaggaggtactattgggtcttcacaagatggcgagatacaaggcgatgagccttttgcaatggaacaagccttcgactggttgaataaccttcagcagcattatcacaccgaagataaatcccatcgcatgcctctcaacgctcttacgaacttaatcaagagcaatagcgacaccgagggtccgaaatttcattgtcctatggacaataaggctatagagcttccggagaagcatccttttcaacaataccgtccctatgagactcatatgacgctgctcatgcacgcaaacgaaatcttggaacgcctagatcacgaatactcggcgatgggtggtattctctccatcattccccttgacagcgagaacgtggatgagcaaagggctctaaagcaagcgaagaccacactggtaggccagtggatcttatatacgcagcatctcgtagtccgtatgcacgaactcgagatcgcctatggcaattgtcttgatctccttgccaacgaagccgttgtgcctatgcagcacatcagcattcacggaccagatggccgatctggtcgagagattgtcttcccacaagataggtggattctagctaacgcaggcgaagacgtttttagtttcatccatcaaatgctcgaccgagcggaggctcatcaaaatagccaggatgacgtattcgccgagcagaacgtactgggcgatgctgcttttgctggcaatagtgacaacaaatatcgtggtatcgtgaaggttgatttgaatactcgtttttaccgcctcagaaatagcggccacggacctgtcttcgtcctacctgcattcgcggaccgttcgaataccgaacatacaagggatatggaaaataggcccaccgtgatcgcgatcccgcaaccatcgatgaaggaatcaatcagtgcgtgggaggaaaagaataaggattgccatgacgcagtccttaagcttacaatccagaactccaatcttgctgggcgcaaatcagagcttgaggcattcaacgcaatgctgcagagagaggtgggaagacttgaagctttgattaaggtgctgaccggccatgacataaacggtaactcgaacaagttgcaaaaggaccaatggacagttcatctgcaagaaacaattgacattcttcgaaagaatctggccgatagcgaggcacacgagacagacctccaaaatagcctggatctcttcaaaaaagccaatttatatgttcagaacggccaagatcctctcacacccatggtcaccaaaatcgatgaactctcaaaatacatcagaaaattacatggggatctcaagtcccaagaggagaaatacaaagaggtggaagtcaattacaatacgctcaggctgttttctaatcaaaaggatcaccctgctccgacgcctgcgccggtcgcaggtctgccccaagcgcagcaggattacgtcgacaatctgcacaaactctggcaacatgagaaacaagaacgggagaagcttgagaaacagctccgtgagcgcagcagcgttcctgaagacgctcaagaccaaacaccggtacaagaccaaagcgccgaagttgagaaactaaagaaacaactccaagacgagaggatcctgcgttataagctaaggagtgaaaataacgagctcaagcagagcaggttacttcaaggccacgtgcacaatttcgaccaagacacgattgaatttggaacgagtgtcgatgattcagaaaagaaaatctcggttgtctctactgactatttgaaatacctcaaggatggcaaaacggaagccattgcgatccagcaaagctacgaggagagcaaagaggcccaaaaggaattgcaaagtcagttagaacagagtaagaaagatgccatgggctaccagaaggagcttgcgcgtgttaagaaaacgaacaaggaaacaaaggctgtccagacgacaccaacaggcaaaataatcaacttgcccaatggaatggcattgaatcagtcaagcgtttggcgtgatgacaaacaacaacttgcagttataaacacagagtggtacgacgagctaataacccaacaccgacgccaaactcataccgccgaagagattacaaaccttaggatgcaggtcaaacgactccagaaaccgcaacctgtggacttgtcgacagtatattccaggattacaggacaaaacccgccatcggacggagtattcgagactttcagggacaggaaatccaacctcgttctcatgactattgcacgccacgacgagctcatcgcgactgaggatgcctgggtggaccaacaagattctgcaagcggttctgctaatgagcaaatcttgcgagaccaggcagaagattacaagaaacagctgcatgctgtggaacaacagaacaaggaccttgctgagcaactcgcccatgcagtgccagatgacattcagaaattgaaagacgaaatagagaatgggaatgcaaaggcagccatattgcaagacatcattaccaaattcaccacccagcaattgagcccacctgattctccagttctgaactccccggaggatgccaatccagacgatctccaagcgacgaagatatctgatctgactaataaactcaccagctaccaggaaaccatgaagaatctcaaattaagcaacagcataatgaccctgaccaagaggattcgtgagctagaagaggccaacagaaacctcagaaggcaaaacgctgccgtgcataagctcttggacgactgtggcaaagcaccacgctcatctcagcctaatgcggagatgattgagcttaagagtcaattggctgttgcaaaggagcagtatatgactctcaagcgaaattcagagctcggggctcagggcgaagagttagcggcacaaatagagtcaagcattgccagagtaggcgataaagatatcgaaattagcgagctccagcgacagatcaacgatctcaaagtacagttgaagacccttctcaaaacgtcagcgcaacaagtcaaagatggagaggacgtagtgaaccaattgaagataaggctatcagctgccaacgatcgattaggcgccatgacctttgaccttgaggcggtaaaggcagaattaattatctcacagcaacagactcaagctgctcgcaaggctcgcaatacggctcagaagactattgacgatctcgttaagcctgatgatgaaagcgattgcgctgatatagtcaaattggggaagagggaaatcctccatttgagaggacaggttgcagatgcggagcgcagattcgtagagatgtggaggtgggcagctgaagagatctctagggttcagatggctcatgctcttcaaaatgaggaacatcaacgagacagacaggctttagcagagctcaggtcgcagtcgcaaagcaagttactcaccgacgctgaaacggatgacgcccaagcgcgactactcgaagaatatcggatcctaaaggagcaactggagacggagcggaaacaagcagtgagggacctgcgcgagtgtcatgacacccagaatcagttaaggtcgagcctcgaagaagctgcaacgaatgccaatcctgatgctggagatatcattgccgacctcaattcacagctagctcgatctcaagaccaagttgagcaactccgagaggaaatcaaccgcgggaacgacgcgctgagcagggagcaggaccaggtgaacgcgatggatcgaggtctaaggtcatctcaggacgaattaaaacaaactagatcggaactgtatcggctccaacaacaaattcaggatcttgaaacccaattagagaataacccagactcaacggaacagaccacagatctcgaggaccgtgccagagacctcgatctcgagctacggcgcgcacgccagcagtatcagaacgccgcatctaacgtgcaagagctacagaatcgggtcaaggaattgactgaagtgaatgaggcgaatgataagcagattgaagagctcaacagatcggcacaagcacaaaatgatccagggcaccacatcggtagcgagggtttccgactgatgaacgagcgcataactttgcgcgagaacagaatagcagagcttgaggcgcaagaggtgttactcagggagcaactagtagaggttgagaccgagcttggtgtggttatggtagagaacgacaacagagctggcgatgagaatgcttccagcagggagcttgaagatctacggaacgagataacactctggcaacgtgagttcgaaatacaacgaaacgtcgttcaggctcagatccaaactataactgagctagaggccgatgtcgccgctcgcgcgcagcaactaagggattgtgaagaacacggccgtaatctatcgacacagattgcgcagttgaacttacagatagcggagaatgagggcgcgaatggtaaccaagaggagcttgctgcgcttgaacaaaggctaagggagtgtgaggaccatagacgcaaggcagtaagggattatgacaatctcgtgaaggagcacaacaacacagtagcactacttgagggtagcgagcacgaggagcagattgcggaccttcagcagcagcttaaagattgtcaggagcatggccgggagcttgaaaagaaggtcatcatgaatcctcacacagtcaacgactacatcatcagcgtcgaagcccgtcgacagacggccctccaggacgtgagacgactacgggaagaattgaaaaatcagaagaaacactgcgcagcggagaaggcgaggctgcgtggtcttcttgccaatgaaatggacgcggtgtcgcaaatggaaaatcggctgcacaatcagcgacgagtattgcaggagaatatgaagggtgaaactactagcgaagaggagagtggcgtggattcggtcgaaacggaaactgaggacttccccgttgttcgtttggatgtccgaacccgaacgataaccggactggtcaaagacgaagatgtagaagaggatgatgatgacgaggatctttga

SEQ ID NO: 19828 - protein, 1776 aa, Muscodor strobelii
  misc_feature: SGI Peptide ID NO. 566676
  misc_feature (20)..(400): NCBI GI: 164424428 Blast Desc: NCU06985 [Neurospora crassa OR74A] gi|157070508|gb|EAA33389.2| NCU06985 [Neurospora crassa OR74A]
  misc_feature (17)..(400): NCBI GI: 171683373 Blast Desc: protein product [Podospora anserina] gi|170941646|emb|CAP67300.1| protein product [Podospora anserina]
  misc_feature (23)..(438): NCBI GI: 256729635 Blast Desc: NECHADRAFT_46568 [Nectria haematococca mpVI 77-13-4]
  misc_feature (48)..(458): NCBI GI: 46122549 Blast Desc: FG05652.1 [Gibberella zeae PH-1]
  misc_feature (21)..(400): NCBI GI: 145613648 Blast Desc: MGG_01464 [Magnaporthe grisea 70-15] gi|145020698|gb|EDK04827.1| MGG_01464 [Magnaporthe grisea 70-15]
  misc_feature (22)..(392): NCBI GI: 116194744 Blast Desc: CHGG_03970 [Chaetomium globosum CBS 148.51] gi|88179883|gb|EAQ87351.1| CHGG_03970 [Chaetomium globosum CBS 148.51]
  misc_feature (5)..(418): NCBI GI: 154317501 Blast Desc: BC1G_03102 [Botryotinia fuckeliana B05.10] gi|150844276|gb|EDN19469.1| BC1G_03102 [Botryotinia fuckeliana B05.10]
  misc_feature (3)..(418): NCBI GI: 156049419 Blast Desc: SS1G_08416 [Sclerotinia sclerotiorum 1980] gi|154692815|gb|EDN92553.1| SS1G_08416 [Sclerotinia sclerotiorum 1980]
  misc_feature (202)..(440): NCBI GI: 261352474 Blast Desc: conserved [Verticillium albo-atrum VaMs.102]
  misc_feature (735)..(1683): NCBI GI: 134062078 Blast Desc: , function [Leishmania braziliensis]
MADDGKMKPSSQVTEVFDKMSGFLKATHWSKPYYSSLIHNNPDLPFHLLEHVNCTYMSTPGRAPTLLALKQHAQSLAVLISLLAPSQRGGTIGSSQDGEIQGDEPFAMEQAFDWLNNLQQHYHTEDKSHRMPLNALTNLIKSNSDTEGPKFHCPMDNKAIELPEKHPFQQYRPYETHMTLLMHANEILERLDHEYSAMGGILSIIPLDSENVDEQRALKQAKTTLVGQWILYTQHLVVRMHELEIAYGNCLDLLANEAVVPMQHISIHGPDGRSGREIVFPQDRWILANAGEDVFSFIHQMLDRAEAHQNSQDDVFAEQNVLGDAAFAGNSDNKYRGIVKVDLNTRFYRLRNSGHGPVFVLPAFADRSNTEHTRDMENRPTVIAIPQPSMKESISAWEEKNKDCHDAVLKLTIQNSNLAGRKSELEAFNAMLQREVGRLEALIKVLTGHDINGNSNKLQKDQWTVHLQETIDILRKNLADSEAHETDLQNSLDLFKKANLYVQNGQDPLTPMVTKIDELSKYIRKLHGDLKSQEEKYKEVEVNYNTLRLFSNQKDHPAPTPAPVAGLPQAQQDYVDNLHKLWQHEKQEREKLEKQLRERSSVPEDAQDQTPVQDQSAEVEKLKKQLQDERILRYKLRSENNELKQSRLLQGHVHNFDQDTIEFGTSVDDSEKKISVVSTDYLKYLKDGKTEAIAIQQSYEESKEAQKELQSQLEQSKKDAMGYQKELARVKKTNKETKAVQTTPTGKIINLPNGMALNQSSVWRDDKQQLAVINTEWYDELITQHRRQTHTAEEITNLRMQVKRLQKPQPVDLSTVYSRITGQNPPSDGVFETFRDRKSNLVLMTIARHDELIATEDAWVDQQDSASGSANEQILRDQAEDYKKQLHAVEQQNKDLAEQLAHAVPDDIQKLKDEIENGNAKAAILQDIITKFTTQQLSPPDSPVLNSPEDANPDDLQATKISDLTNKLTSYQETMKNLKLSNSIMTLTKRIRELEEANRNLRRQNAAVHKLLDDCGKAPRSSQPNAEMIELKSQLAVAKEQYMTLKRNSELGAQGEELAAQIESSIARVGDKDIEISELQRQINDLKVQLKTLLKTSAQQVKDGEDVVNQLKIRLSAANDRLGAMTFDLEAVKAELIISQQQTQAARKARNTAQKTIDDLVKPDDESDCADIVKLGKREILHLRGQVADAERRFVEMWRWAAEEISRVQMAHALQNEEHQRDRQALAELRSQSQSKLLTDAETDDAQARLLEEYRILKEQLETERKQAVRDLRECHDTQNQLRSSLEEAATNANPDAGDIIADLNSQLARSQDQVEQLREEINRGNDALSREQDQVNAMDRGLRSSQDELKQTRSELYRLQQQIQDLETQLENNPDSTEQTTDLEDRARDLDLELRRARQQYQNAASNVQELQNRVKELTEVNEANDKQIEELNRSAQAQNDPGHHIGSEGFRLMNERITLRENRIAELEAQEVLLREQLVEVETELGVVMVENDNRAGDENASSRELEDLRNEITLWQREFEIQRNVVQAQIQTITELEADVAARAQQLRDCEEHGRNLSTQIAQLNLQIAENEGANGNQEELAALEQRLRECEDHRRKAVRDYDNLVKEHNNTVALLEGSEHEEQIADLQQQLKDCQEHGRELEKKVIMNPHTVNDYIISVEARRQTALQDVRRLREELKNQKKHCAAEKARLRGLLANEMDAVSQMENRLHNQRRVLQENMKGETTSEEESGVDSVETETEDFPVVRLDVRTRTITGLVKDEDVEEDDDDEDL

SEQ ID NO: 19829 - DNA, 1008 bp, Muscodor strobelii
  misc_feature: SGI EST ID NO. CUFF.46400.0
  misc_feature: Variant of the nucleotide sequence at SEQ ID NO 19827
cttccagcagggagcttgaagatctacggaacgagataacactctggcaacgtgagttcgaaatacaacgaaacgtcgttcaggctcagatccaaactataactgagctagaggccgatgtcgccgctcgcgcgcagcaactaagggattgtgaagaacacggccgtaatctatcgacacagattgcgcagttgaacttacagatagcggagaatgagggcgcgaatggtaaccaagaggagcttgctgcgcttgaacaaaggctaagggagtgtgaggaccatagacgcaaggcagtaagggattatgacaatctcgtgaaggagcacaacaacacagtagcactacttgagggtagcgagcacgaggagcagattgcggaccttcagcagcagcttaaagattgtcaggagcatggccgggagcttgaaaagaaggtcatcatgaatcctcacacagtcaacgactacatcatcagcgtcgaagcccgtcgacagacggccctccaggacgtgagacgactacgggaagaattgaaaaatcagaagaaacactgcgcagcggagaaggcgaggctgcgtggtcttcttgccaatgaaatggacgcggtgtcgcaaatggaaaatcggctgcacaatcagcgacgagtattgcaggagaatatgaagggtgaaactactagcgaagaggagagtggcgtggattcggtcgaaacggaaactgaggacttccccgttgttcgtttggatgtccgaacccgaacgataaccggactggtcaaagacgaagatgtagaagaggatgatgatgacgaggatctttgagcttgggatggagatgcgggcactttcaccaggacacttcgagttataaaactttgcttgaacggcaatggtctcgtgtgtgagcgacatcatgctgccttgtctggcgtccattattaggatggatacggtagcttcgattagatcgttgtggaatatagtttgtgtgaatagaagttgtatt

SEQ ID NO: 19830 - DNA, 3174 bp, Muscodor strobelii
  misc_feature: SGI cDNA ID NO. 566677
  misc_feature: Encodes the peptide sequence at SEQ ID NO 19831
atgcaagaagaaacagcactcgctttcggtaccggctccgcagagattgagatcgggcccggtttcctaggcagtgggttcagcttttcgagtaccctcgaacccacggtttcacccgctattacctatgtctacggtggtatgtgtccgtctgcgggatccaatgcaactgtagcgcagtcaaaggcaacatattctaatcagatgatgaaaatatctgcctcggattcaaattctgaagtctacaatgtcgagctggtaaggagctcgggccccccaattgctgaagctggcttcacattcacttccttgtccccgtctgtctcaaaccgctccggcactgttacacagcagacaaattatgtcctccttggcggtcacacgcagtgggcttttatcaacatcagcactgtggcaatatggagtcttcccgaggagacctggaattttgtggacgacgttggtatgtctatggccagttctccaaataccgaattggcagtgaagagcaccgtagataccgttgactctcgctctggccatacggcggtactcaatgaagacggaacagccctggtcatttacggaggctgggtgggtgatttgacgcaagcagcatctccccagcttgttgttctccaaattgggtccgactatggaggacaaggaggaaactggcaatggtctataccagaatcacagccctcgggtaatgggatatatggccatggcgcaactttgctcccaggaaatattatgatgatctacggaggttacgatatttcttcctcgtccaatagtaagatggaacgacgtgccagtagtggcatgcagacattcctcaatcttacatcgatgacatggtctgaggattatgtgaacccatcttacaccgagtcttctacgggaagtgcacccgatgcagagaaaccctcgacacaaaaacttggactcggcctaggtctgggccttggacttggattcctgctcttagttcttgccattatcacttatttttactgtcgcaagcgttaccgaaacaggcgaatgatacgagactcagcaatccgatctcttgctcaggacaattccaggttcgttggtcacgatgatgacgacgtagttgagtacgacggcgattggtacactggaggacacgatccttataaccataatgggcgttcattaggctaccagagtctacaatcaggaagggacaacaaccgtcacaattggttcggtgatatggctccgcccgcccctgaaatggctcagatcaaaagaaaatctattcctccacgagcagcaagaggtcaagttcagccatccagttcgatcgtttacgagccgatcggcaaccagcgaggacttatgaaccccatttacgaagctgatgaggacgatggcggagattcaggtcgcgaaactatgaatctcgttccagaagaccagagggcgagtgttgcgtactcagacccatttcaaacgcccacacacgaacgaaccatctcattcccgcctccaagtcgcgcttctgcaacaccaagtccagaagagcgccatcggttgtctgtgactgatccagaggtgcaagactggatgacagatgtcgatacggcagacgctcttttgagcgggcgcatgacaactgccgccacaggcggtctcacttctccatctcgacgtgcatatgacgatgagtcttcgcgcactgggagcaacatctctgaatcaaaccgcagcaacttgattcctagtagatcaggttcagggaggtcattttttcgtccaggatttggtgtcgcggtagctgctgcgcttgcggcgacgaccgagggtcggggaggaagcagtagttcaagctccgctccgagttataacacagctcgtagcagttttccaacactgcaggccgaaggtccgtcgctgttgctcggtcaaagaggagaggctatggatgagcctggaagtccgagtaagaacaaaccacgccgcagcttctttggtagtctgcgccgcgtcttcacaggacccagtccgagctcgagttcacaaagtagcatggatgaagaggacccattccgtggtggcgtcgtcgaagctaatgattttgacgcgcgcatggggaacttgggtggccttggaggcattgctgctgatgggctgttgagaaggaaaggaggtcgaggcgcttgggaagtatcgaatgccggcttaggccaagctggtgtacgctatgcgccggtgcaggatcatgaaaggggcgatcaggctacgcatgacgacgagtgggatattgagaaagcggttgagcggagactggtgcaagtgatgttcacggtgcctaaggagcgcttaagagtcgtcaatgccgagccggacttagagagcgagcaagatgtagtgctcgtggatccagaagtcgaggcacgatctgggaccagcgaagttgagcccaagagaaagagctcgacagagcaaatgcccgagtcttcgagaaatgcgtctcagcatatgatggctgcgccgacctctatggtcgatgggaacatagagcacagaagggtcagcaatccgaattcagagagagaaacagtccgaccagaatcgagcacagcgtgggagaagatcgccaccgaaatcttacctaaagcgccagaaccgctacacctcaatacacatacccaacaactaccaatctcgtcacttacacaacaccaatcacgaacaactcctcacctgcaaatctcacgcgaggtacagccttctgaaccagaagtcgacacgctaactctcgaagagcaaatcgacaaattaggcgctgaactacatcaagcacgtagcgcagcacacacgccaacgtcgcaagcatcgcagtatcatagcgacgctgaaatgatgtcagcggaagctgtacacttcgctcggccttccctcagcacaccaacactacttcacaccccaccgaaacagaagacacctgtcttttgggccgggactcctgtgttacggagcgagaatataagaagcgagagcaatctgcgaggtatgggaagcccaaccacaagagttaaggctatggttgaggagttcgagagtaaaagctcaagggagaacagcccatcaccaactagaggatcacctacacgaggctcgcccacgaggatgaggtga

SEQ ID NO: 19831 - protein, 1057 aa, Muscodor strobelii
  misc_feature: SGI Peptide ID NO. 566677
  misc_feature (15)..(807): NCBI GI: 261352473 Blast Desc: conserved [Verticillium albo-atrum VaMs.102]
  misc_feature (19)..(827): NCBI GI: 256729814 Blast Desc: NECHADRAFT_46868 [Nectria haematococca mpVI 77-13-4]
  misc_feature (20)..(809): NCBI GI: 46122553 Blast Desc: FG05654.1 [Gibberella zeae PH-1]
  misc_feature (2)..(790): NCBI GI: 156046242 Blast Desc: SS1G_09380 [Sclerotinia sclerotiorum 1980] gi|154693775|gb|EDN93513.1| SS1G_09380 [Sclerotinia sclerotiorum 1980]
  misc_feature (3)..(790): NCBI GI: 154319700 Blast Desc: BC1G_02331 [Botryotinia fuckeliana B05.10] gi|150855989|gb|EDN31181.1| BC1G_02331 [Botryotinia fuckeliana B05.10]
  misc_feature (19)..(818): NCBI GI: 145613646 Blast Desc: MGG_11202 [Magnaporthe grisea 70-15] gi|145020697|gb|EDK04826.1| MGG_11202 [Magnaporthe grisea 70-15]
  misc_feature (2)..(379): NCBI GI: 169603586 Blast Desc: SNOG_04802 [Phaeosphaeria nodorum SN15] gi|160706423|gb|EAT87193.2| SNOG_04802 [Phaeosphaeria nodorum SN15]
  misc_feature (33)..(295): NCBI GI: 85108694 Blast Desc: NCU06984 [Neurospora crassa OR74A] gi|28924234|gb|EAA33388.1| [Neurospora crassa OR74A]
  misc_feature (12)..(382): NCBI GI: 189196528 Blast Desc: conserved [Pyrenophora tritici-repentis Pt-1C-BFP] gi|187980481|gb|EDU47107.1| conserved [Pyrenophora tritici-repentis Pt-1C-BFP]
  misc_feature (19)..(295): NCBI GI: 116194744 Blast Desc: CHGG_03970 [Chaetomium globosum CBS 148.51] gi|88179883|gb|EAQ87351.1| CHGG_03970 [Chaetomium globosum CBS 148.51]
MQEETALAFGTGSAEIEIGPGFLGSGFSFSSTLEPTVSPAITYVYGGMCPSAGSNATVAQSKATYSNQMMKISASDSNSEVYNVELVRSSGPPIAEAGFTFTSLSPSVSNRSGTVTQQTNYVLLGGHTQWAFINISTVAIWSLPEETWNFVDDVGMSMASSPNTELAVKSTVDTVDSRSGHTAVLNEDGTALVIYGGWVGDLTQAASPQLVVLQIGSDYGGQGGNWQWSIPESQPSGNGIYGHGATLLPGNIMMIYGGYDISSSSNSKMERRASSGMQTFLNLTSMTWSEDYVNPSYTESSTGSAPDAEKPSTQKLGLGLGLGLGLGFLLLVLAIITYFYCRKRYRNRRMIRDSAIRSLAQDNSRFVGHDDDDVVEYDGDWYTGGHDPYNHNGRSLGYQSLQSGRDNNRHNWFGDMAPPAPEMAQIKRKSIPPRAARGQVQPSSSIVYEPIGNQRGLMNPIYEADEDDGGDSGRETMNLVPEDQRASVAYSDPFQTPTHERTISFPPPSRASATPSPEERHRLSVTDPEVQDWMTDVDTADALLSGRMTTAATGGLTSPSRRAYDDESSRTGSNISESNRSNLIPSRSGSGRSFFRPGFGVAVAAALAATTEGRGGSSSSSSAPSYNTARSSFPTLQAEGPSLLLGQRGEAMDEPGSPSKNKPRRSFFGSLRRVFTGPSPSSSSQSSMDEEDPFRGGVVEANDFDARMGNLGGLGGIAADGLLRRKGGRGAWEVSNAGLGQAGVRYAPVQDHERGDQATHDDEWDIEKAVERRLVQVMFTVPKERLRVVNAEPDLESEQDVVLVDPEVEARSGTSEVEPKRKSSTEQMPESSRNASQHMMAAPTSMVDGNIEHRRVSNPNSERETVRPESSTAWEKIATEILPKAPEPLHLNTHTQQLPISSLTQHQSRTTPHLQISREVQPSEPEVDTLTLEEQIDKLGAELHQARSAAHTPTSQASQYHSDAEMMSAEAVHFARPSLSTPTLLHTPPKQKTPVFWAGTPVLRSENIRSESNLRGMGSPTTRVKAMVEEFESKSSRENSPSPTRGSPTRGSPTRMR

SEQ ID NO: 19832 - DNA, 2267 bp, Muscodor strobelii
  misc_feature: SGI EST ID NO. CUFF.46409.0
  misc_feature: Variant of the nucleotide sequence at SEQ ID NO 19830
ctcagatcaaaagaaaatctattcctccacgagcagcaagaggtcaagttcagccatccagttcgatcgtttacgagccgatcggcaaccagcgaggacttatgaaccccatttacgaagctgatgaggacgatggcggagattcaggtcgcgaaactatgaatctcgttccagaagaccagagggcgagtgttgcgtactcagacccatttcaaacgcccacacacgaacgaaccatctcattcccgcctccaagtcgcgcttctgcaacaccaagtccagaagagcgccatcggttgtctgtgactgatccagaggtgcaagactggatgacagatgtcgatacggcagacgctcttttgagcgggcgcatgacaactgccgccacaggcggtctcacttctccatctcgacgtgcatatgacgatgagtcttcgcgcactgggagcaacatctctgaatcaaaccgcagcaacttgattcctagtagatcaggttcagggaggtcattttttcgtccaggatttggtgtcgcggtagctgctgcgcttgcggcgacgaccgagggtcggggaggaagcagtagttcaagctccgctccgagttataacacagctcgtagcagttttccaacactgcaggccgaaggtccgtcgctgttgctcggtcaaagaggagaggctatggatgagcctggaagtccgagtaagaacaaaccacgccgcagcttctttggtagtctgcgccgcgtcttcacaggacccagtccgagctcgagttcacaaagtagcatggatgaagaggacccattccgtggtggcgtcgtcgaagctaatgattttgacgcgcgcatggggaacttgggtggccttggaggcattgctgctgatgggctgttgagaaggaaaggaggtcgaggcgcttgggaagtatcgaatgccggcttaggccaagctggtgtacgctatgcgccggtgcaggatcatgaaaggggcgatcaggctacgcatgacgacgagtgggatattgagaaagcggttgagcggagactggtgcaagtgatgttcacggtgcctaaggagcgcttaagagtcgtcaatgccgagccggacttagagagcgagcaagatgtagtgctcgtggatccagaagtcgaggcacgatctgggaccagcgaagttgagcccaagagaaagagctcgacagagcaaatgcccgagtcttcgagaaatgcgtctcagcatatgatggctgcgccgacctctatggtcgatgggaacatagagcacagaagggtcagcaatccgaattcagagagagaaacagtccgaccagaatcgagcacagcgtgggagaagatcgccaccgaaatcttacctaaagcgccagaaccgctacacctcaatacacatacccaacaactaccaatctcgtcacttacacaacaccaatcacgaacaactcctcacctgcaaatctcacgcgaggtacagccttctgaaccagaagtcgacacgctaactctcgaagagcaaatcgacaaattaggcgctgaactacatcaagcacgtagcgcagcacacacgccaacgtcgcaagcatcgcagtatcatagcgacgctgaaatgatgtcagcggaagctgtacacttcgctcggccttccctcagcacaccaacactacttcacaccccaccgaaacagaagacacctgtcttttgggccgggactcctgtgttacggagcgagaatataagaagcgagagcaatctgcgaggtatgggaagcccaaccacaagagttaaggctatggttgaggagttcgagagtaaaagctcaagggagaacagcccatcaccaactagaggatcacctacacgaggctcgcccacgaggatgaggtgatagtgagtgtgttttgctctggcaggaagaggtaacaacgcagagatgagtcgcaatagatttgcgacgtatctagcgagcgcgttcggcgttataatggggctgattggttggttcatctccagcatttatatccatattaaggtctatggggaaagggaggacgcagcatcatgtagtgttctgtggaacgcttgttcgcaacaggtgctgccggcgttttggatcggatcttgatttagcttgtgtttcgaaccaagccaactttgaaaattcttgtattgtatttaaactgcccttcctgttagaggagcagatgtgtatgcactgatatagtttaatccaataacaggcttcagccgc

SEQ ID NO: 19833 - DNA, 1005 bp, Muscodor strobelii
  misc_feature: SGI cDNA ID NO. 566678
  misc_feature: Reduced expression when VOC is produced
  misc_feature: Encodes the peptide sequence at SEQ ID NO 19834
atggctcgtttacagtatttcgcgtccttggccgcggccattgcattgctggctagtttatcgacagcaggcgaacagtcatggcctttcgaatactgcgcagacataaacaccgcgtcgagtgccgccaatttcagtatatatcagtctcaagggttatgtcacgacttctgtaacgaccaggcgtttccctacgccgtcctcaacgctagaaactgttggtgctccgactacacgcccgacgaggcgacgacgacagatacctcggactgcgatactgtgtgtgctggctggccggacgacctgtgcggaggtgccggcttatggggatacatacaattaggtccaagtccatctggcacctccagcactaacggtaccgatacccaatctacaacttcggctgatactacgtcgacgacttccacaacatcgacatcgacatcgtcatcgtcatcatccataacttcgaagatcacaacaccacacacttcagtccaaacggttacggttggcggttcacccagcgtacaaacgattatcgttacccctagttcgagtacttctccagacgggagcaatggaggggtcacttctagccaaaaggggctcagtgccggagctgctgcaggaattgctatcggtgttctagctattgttggcgtcatcgcgggcatcgtcgtcttcttctgcattcgcaagaagaagcaacggcaagaggaggaaatcgcttcgaatccggctagtcatcggggaagctctgcgggcatgatgggtacccctactacgggtatggcgtctgtgtgggatggagagaacgcctcgacaggccgtagaagcagcaggttgatgcctcacgatccacggatggatccttacgcgatgaacatatactctcgattcgaaaacaagagtcgcgaaagtgttaataccctccaagacaaccaggactattcgagaaaggttttacgcacgacgaatcccgatccgcctgagggatcataa

SEQ ID NO: 19834 - protein, 334 aa, Muscodor strobelii
  misc_feature: SGI Peptide ID NO. 566678
  misc_feature (30)..(105): Pfam Id: PF01822 Pfam Desc: WSC domain
  misc_feature (38)..(105): Pfam Id: PF01822 Pfam Desc: WSC domain
  misc_feature (30)..(330): NCBI GI: 156060889 Blast Desc: SS1G_02587 [Sclerotinia sclerotiorum 1980] gi|154699991|gb|EDN99729.1| SS1G_02587 [Sclerotinia sclerotiorum 1980]
  misc_feature (11)..(330): NCBI GI: 154322104 Blast Desc: BC1G_01199 [Botryotinia fuckeliana B05.10] gi|150850446|gb|EDN25639.1| BC1G_01199 [Botryotinia fuckeliana B05.10]
  misc_feature (7)..(330): NCBI GI: 116194742 Blast Desc: CHGG_03969 [Chaetomium globosum CBS 148.51] gi|88179882|gb|EAQ87350.1| CHGG_03969 [Chaetomium globosum CBS 148.51]
  misc_feature (11)..(334): NCBI GI: 256729813 Blast Desc: NECHADRAFT_83649 [Nectria haematococca mpVI 77-13-4]
  misc_feature (14)..(330): NCBI GI: 171683377 Blast Desc: protein product [Podospora anserina] gi|170941648|emb|CAP67302.1| protein product [Podospora anserina]
  misc_feature (1)..(330): NCBI GI: 85108682 Blast Desc: NCU06981 [Neurospora crassa OR74A] gi|28924231|gb|EAA33385.1| [Neurospora crassa OR74A]
  misc_feature (26)..(328): NCBI GI: 145613642 Blast Desc: MGG_01466 [Magnaporthe grisea 70-15] gi|145020695|gb|EDK04824.1| MGG_01466 [Magnaporthe grisea 70-15]
  misc_feature (8)..(332): NCBI GI: 46122557 Blast Desc: FG05656.1 [Gibberella zeae PH-1]
  misc_feature (2)..(329): NCBI GI: 212534500 Blast Desc: ER membrane protein Wsc4, [Penicillium marneffei ATCC 18224] gi|210069805|gb|EEA23895.1| ER membrane protein Wsc4, [Penicillium marneffei ATCC 18224]
  misc_feature (14)..(329): NCBI GI: 121713080 Blast Desc: ER membrane protein (Wsc4), [Aspergillus clavatus NRRL 1] gi|119402304|gb|EAW12725.1| ER membrane protein (Wsc4), [Aspergillus clavatus NRRL 1]
  misc_feature: Useful for introducing or modulating the production of volatile compounds
MARLQYFASLAAAIALLASLSTAGEQSWPFEYCADINTASSAANFSIYQSQGLCHDFCNDQAFPYAVLNARNCWCSDYTPDEATTTDTSDCDTVCAGWPDDLCGGAGLWGYIQLGPSPSGTSSTNGTDTQSTTSADTTSTTSTTSTSTSSSSSSITSKITTPHTSVQTVTVGGSPSVQTIIVTPSSSTSPDGSNGGVTSSQKGLSAGAAAGIAIGVLAIVGVIAGIVVFFCIRKKKQRQEEEIASNPASHRGSSAGMMGTPTTGMASVWDGENASTGRRSSRLMPHDPRMDPYAMNIYSRFENKSRESVNTLQDNQDYSRKVLRTTNPDPPEGS

SEQ ID NO: 19835 - DNA, 4764 bp, Muscodor strobelii
  misc_feature: SGI EST ID NO. CUFF.46868.0
  misc_feature: Variant of the nucleotide sequence at SEQ ID NO 19833
caagctctatgcacgacgcaagctccatttcaactctaaacctatctagccctgatagcttgtcaatgaagggcttgaaggctcagtagttatctaccgtctggtactaggtaattatcgcgcattttgacttctctgtaatgctcttataaaagatttatgtgatgctgtcataaaccatcatccctagcagactatatggttggttatgtaacaagaaggtcgggatttttgaggactcagagttatggcggtgtgatcagatgctgtggtacgagttggaagaatcaccacaaggttggaagtggtgagcgaggtttgtgtagagtattgcgaaacatccaaaagctgctcaacatgactcgcttgtggctttgtctggtgtagcgaaccgacatgctcggtggcgggcgttgaagaacatgcaggcttggcacgttagataagcgagcgtgctgcagtccatactggatgaatggctggctgctgtttatttgttgttcacatgcattccgctagaccagtacgagaagaatgtcaatgcagggcatggaatactgacgagagagtttcgtgctgtgttgatgtttggcgacggatgggtccttgggcgtgtcgctgtcgccaattgatgaggctattcgaagattcttgcaccacgttgcttgtgatcgtcggactcgttagatagctgagatgtgatgacgacattgccgtatttgatgtccatattggccgttgatatgcactgtgtacaaggaatatcccttctcacagtggcctccttattgcgctcacgaggttatggttaggttttaatgcacctgcgttaaagcaacgaagcttcacaatcttgcaaaaaaagaacagacgacagatgcgagtagatgcattcaacaagactatgtactgtagattaaattttaaggtgtttggttgacagattagaatgttgctagacaaaatagattttgggccttgtacaatgtgattcgtaagagctacgcctaaagcgatgcaaggccgatcgttatctggcaatttgcttcagatgcgtaccggctgcttttgttccatgccgctagtaattaagaatccccctggattatttggaaacagccgcccgaggactggtgacaagctggccgatgaagtgatagcgacgagtagaggatcaacgaggaagatacactcatccggtgttggcactctttgtgcttttctcaattcatatcgagctcttcattgcagttctttcccattctcattgcaccaccaaatttcaattccatcgcattcgttcattcattctctttgtcagttgtcagttgggcctcactccgttccattcaaggccgtaatagagccccgctgctgttcgctcgttcgtatctgccctacttataggccattatttttacgacacggctttatctcgtgtcatcccaacaatctcagtatcatctgcgcccaggtggttggagtaagacgcatactttgcgctatcttcttgcttgcagctttgtcacccgggtcaattccaattcactttgaagcactttatctgcaagtacagttggactaggggttttggcctggctgttgccctggcactcgcatacttgtacaaacccccggtcttgctgctcccttgtcggccaaatatctcgtacctgcaaaataacctgcttggacttcgtaccgaatccaccttccaacccgtcagctatctgctcctctctagcctctgctctagcgcactcgtgcactgcattgggccacacacactttctgttttaacgcctttgctagtccacaatagtgccatagctgtgtacatcctggccaaggcaacaggtgcatccgtccttccgttctcctgccgtttttcccacccaccatctcgccaggtaccatactgtacccaaggtgccttccgcgccaattgacccttcctgccgcctccggctacttttttccctcgcctcctccgttgctggctttactctcctttgatcccaattgacagagacgaggcatcacctacgaggcggtgatttccctctgccattctgattcactacaagccattccaagtgtcattctgccgtagcggtctttaatagcaaccggctattattgttctgctctggacacttgtgcttgtctcggccactgacacttcaaccattcatttggctcgacttggtcatggcaacaggagccattcctccttgctgtttgtgattcgtctctcccaacgagtccagagtagtttgtttgtggtgagagagcactgcttcatagctactactgcgtcgataggagacgccaacttccttccgcagtaattcaagatctcatggctcgtttacagtatttcgcgtccttggccgcggccattgcattgctggctagtttatcgacagcaggcgaacagtcatggcctttcgaatactgcgcagacataaacaccgcgtcgagtgccgccaatttcagtatatatcagtctcaagggttatgtcacgacttctgtaacgaccaggcgtttccctacgccgtcctcaacgctagaaactgttggtgctccgactacacgcccgacgaggcgacgacgacagatacctcggactgcgatactgtgtgtgctggctggccggacgacctgtgcggaggtgccggcttatggggatacatacaattaggtccaagtccatctggcacctccagcactaacggtaccgatacccaatctacaacttcggctgagagcacgacaacgagtgctgtcacatcgacgacgagtactgtcgaatcgacagtgagctcaactataacatcttcttcaacacatgatactacgtcgacgacttccacaacatcgacatcgacatcgtcatcgtcatcatccataacttcgaagatcacaacaccacacacttcagtccaaacggttacggttggcggttcacccagcgtacaaacgattatcgttacccctagttcgagtacttctccagacgggagcaatggaggggtcacttctagccaaaaggggctcagtgccggagctgctgcaggaattgctatcggtgttctagctattgttggcgtcatcgcgggcatcgtcgtcttcttctgcattcgcaagaagaagcaacggcaagaggaggaaatcgcttcgaatccggctagtcatcggggaagctctgcgggcatgatgggtacccctactacgggtatggcgtctgtgtgggatggagagaacgcctcgacaggccgtagaagcagcaggttgatgcctcacgatccacggatggatccttacgcgatgaacatatactctcgattcgaaaacaagagtcgcgaaagtgttaataccctccaagacaaccaggactattcgagaaaggttttacgcacgacgaatcccgatccgcctgagggatcataagacaactttttttttccggaaagagcgaaaggggatgaaaataattcctggaaggggagggtctctcatctgcaatgggtctattgcgcagcatttttcctttgcaagataccacgacggcgtttcggtgcattgggtttttctagggaccacagaattatacgcatacataacgagcattgctttgggttctagcgtcgctgccaaacgaaagccttgcatcgttcaattcactctgcacatcattttgtgttcttcggacaggggatcgtactcgaaacagttcgcctcactgtgacacccggtgatattgaacagataggaattggaatcgagatcccgccgttttgggcacttgggtttcgcggcattgtaaataaggggtcgggaagactggatttcatgacgaacacaaaatcaaccagcataattagattacgactgcgtactcgggaaatagtacatacattcacatgtagagacatagaaaggataatattgctactaggcaattgagaggcattttgcaagcacaacttccacctggcggacttgcaaatgagtgtcaatatacatgatcaatcagtagacttgctcacccgcgctgtggttcctagatcacatttcgttgacttttaccggaaggggcgaaatacaatcgctggggttcctggacatgagttccagtcatgtcatccagatgcataggtacatttcgatgtgtatcgatttccagatgttgagagtgttttcatacagtatcaaggaactagccagaagatgtctgggcttggcaaatacacgtaaacgcatcctgccgttcgcttccttccgagccagtccctgcaccgttccctccagctttgaaacaagacgtgaacagggggtctatattttggcgctgagccacaatattttcacagacacgtcaacgcggttgctgttcaaggtagtcaagactttgagttatcaggctttcgcatcttatagattgatggtttggatatggaatgcgaatttggctgcttatactcgaattgttatggggtctctatgagcttgttgtgttcgactactacaggattcttttacgatacagcttctgctcgccatcagtcatgttatcatgagaactcggcatctatcatgcacacacactgtcttgcgtggactggttcagtccagtgtcaacatatcagccacgtctgattcggatctcgtgttgaatgttttgacaggacagggtcgtatgattcggtttgatcccgtactcgcgtagaaaaagaaagcaaatgggaggtaagtgcggc

SEQ ID NO: 19836 - DNA, 1098 bp, Muscodor strobelii
  misc_feature: SGI cDNA ID NO. 566679
  misc_feature: Encodes the peptide sequence at SEQ ID NO 19837
atgaaaacgaaatggttttcaactacatttgggtacgtcacagtttatcactacggcaacttaacgataggcaccgaggtggttgattacattgcgacagccaagactgttaagtcattatacaacttcaacgagacaccggactccacgactccccaggaaatatcttttggcaccgattatatactaagtccaccctttgctgcagttagaaatggtacgatcgacgaggcatattctagctttctacctactgagtcaatttttagatcggatgctgaccttgaccttgttttcctttctggaaatggtgttcttcacgcaaaaccctcaagtgatgagtggtattgtgtatcaccaacaccttggattgctggtgtcacaggcagtaatagttcgaatggccagctcgaatacttccctccgtcagaagatgcatctcccttaggctgtataagtcagtaccaggtttgtggttctacaaccaatgactgtggtatcttagggagcgccggggatgttcttgcagacccagtcacaactttcaacgctgagcagaaagccagtgaaggtgataattccaaggcagagtacttgcgctatttcaaagaggttgtgagcaatagttttaccttgcaaggtgttatacggcaaatgggaccagccagcctgaagtctcagagctcactggtgtctggcagacagggtccgctaccgtctaatcagtggcagctggacgttatacactggtttgatatcatgtcagcatctgtccagctcggtttccttagaacagcttatttcaacccaactgatccccaattcctcaaatttcgcaagtcgttttccggggaggcgcagaacctgtgttcaaaccagctacaacgtcttgctcatgaaggacaaggttttggtaactggtcgaaagctacggctaagataccggtcgccaaggatgacgatatcctcggctgtcttgatttaaccaatcttgatcatccagtattaggctcgcactccgcgacgacaaagagcgaggttagctgcaacacggcagaaaagaggatgggaaattccgtcggaggagcagaggtatga

SEQ ID NO: 19837 - protein, 365 aa, Muscodor strobelii
  misc_feature: SGI Peptide ID NO. 566679
  misc_feature (1)..(270): NCBI GI: 169615058 Blast Desc: SNOG_10683 [Phaeosphaeria nodorum SN15] gi|111060957|gb|EAT82077.1| SNOG_10683 [Phaeosphaeria nodorum SN15]
  misc_feature (73)..(294): NCBI GI: 169772941 Blast Desc: [Aspergillus oryzae RIB40] gi|83768800|dbj|BAE58937.1| protein product [Aspergillus oryzae]
  misc_feature (8)..(259): NCBI GI: 119474227 Blast Desc: NFIA_004500 [Neosartorya fischeri NRRL 181] gi|119407142|gb|EAW17092.1| conserved [Neosartorya fischeri NRRL 181]
  misc_feature (293)..(347): NCBI GI: 169615058 Blast Desc: SNOG_10683 [Phaeosphaeria nodorum SN15] gi|111060957|gb|EAT82077.1| SNOG_10683 [Phaeosphaeria nodorum SN15]
  misc_feature (73)..(294): NCBI GI: 121699395 Blast Desc: ACLA_082720 [Aspergillus clavatus NRRL 1] gi|119396149|gb|EAW06581.1| ACLA_082720 [Aspergillus clavatus NRRL 1]
  misc_feature (8)..(259): NCBI GI: 70986226 Blast Desc: conserved [Aspergillus fumigatus Af293] gi|66846236|gb|EAL86569.1| conserved [Aspergillus fumigatus Af293]
  misc_feature (8)..(259): NCBI GI: 159128250 Blast Desc: conserved [Aspergillus fumigatus A1163]
  misc_feature (84)..(259): NCBI GI: 115399382 Blast Desc: [Aspergillus terreus NIH2624] gi|114192163|gb|EAU33863.1| [Aspergillus terreus NIH2624]
  misc_feature (69)..(296): NCBI GI: 189194015 Blast Desc: conserved [Pyrenophora tritici-repentis Pt-1C-BFP] gi|187978910|gb|EDU45536.1| conserved [Pyrenophora tritici-repentis Pt-1C-BFP]
  misc_feature (20)..(274): NCBI GI: 256723662 Blast Desc: NECHADRAFT_86728 [Nectria haematococca mpVI 77-13-4]
MKTKWFSTTFGYVTVYHYGNLTIGTEVVDYIATAKTVKSLYNFNETPDSTTPQEISFGTDYILSPPFAAVRNGTIDEAYSSFLPTESIFRSDADLDLVFLSGNGVLHAKPSSDEWYCVSPTPWIAGVTGSNSSNGQLEYFPPSEDASPLGCISQYQVCGSTTNDCGILGSAGDVLADPVTTFNAEQKASEGDNSKAEYLRYFKEVVSNSFTLQGVIRQMGPASLKSQSSLVSGRQGPLPSNQWQLDVIHWFDIMSASVQLGFLRTAYFNPTDPQFLKFRKSFSGEAQNLCSNQLQRLAHEGQGFGNWSKATAKIPVAKDDDILGCLDLTNLDHPVLGSHSATTKSEVSCNTAEKRMGNSVGGAEV

SEQ ID NO: 19838 - DNA, 1674 bp, Muscodor strobelii
  misc_feature: SGI cDNA ID NO. 566680
  misc_feature: Reduced expression when VOC is produced
  misc_feature: Encodes the peptide sequence at SEQ ID NO 19839
atggggttattcaatacaacatgcaactccacgctggaggacatgcgcatcggctctgaggagaagatcgctggcgacctcaccttccatcagttagctttgattattgccggcggagccactataatcgctatcacagtcagcatatatctcatatggcaacatgccctcaactacaccaagcctcgcgaacagaaacacattatgcgtatccttttcatggtccccgtctacagcgcggcctccttcctcgctctctggtattattggcacgccgtctacttccaggtcataagcgaagtctatgaagcctttgccatcgtgtctttcttcggcttgatgtgtcactatatcgcccctgatctgcacgagcagaagaacttcttccgccagatgacgcccattaaaccgtggatctggcctgttccttggttcgccaaatgttgcggtggccaacgaggtatttggaggacacctaggtctggtttgacgtggttcaatattgcttgggcttgtgtctaccagtactgcttcatacgcgttgcttttacgatcattgctgtagtcactcagtacttcgacaggtactgcgagagttccaacagccctgtctttgctcatatctgggttactgcgttcgaagctgttgccgtcacgatcgctatgtactgtattatccagttctatgtgcagttcaaaaagccactggccgagcagcacttaggtttaaaagttctagccatcaagctggtcatctttttgtcgttctggcaaacgatcgtcatcgaccttgctacttcagaatcattgaacattgtgagcgccaacgcgacactggcctggccagacttgaaagtagggatccccagtctgcttctgtgcgtggagatggccctgttcgcaattctgcatctctggtccttctcatacgtgccttacaaggaaggtgctaaatccaccttctatcctaacccaaacatgacaaatgaaagcccatctcgcgtgaatgagtctgggcctaagcaaggtggtttcttgggcatcaaggcatttttcgatgccgccaatccatgggatattgcgaaggctttcgctcgagggattcgctggctcttcgtcggggttaagcgccgccacgatgacgccagctaccaactcggaggtgatactagctacatgggaaagaatggcgcgcccctcaaaagcactgatcatctaccaattgcaacacagttccgtcggagtacatatggaatgcctatcgcccagaatgacccgatacctggagaagagagtgctggcttgattgcaaatgcgcaacccaaccccgccggatcgagacagaacagaccgataagcctcgaatcggatccgaatggaagcgacaggcacaattcagacttacggccaaactatgacgagaatccctatgcgcacgagcagtcctactcggcataccggccatacaatgacgagggaggcgatctaggcgcaccaccatcgtcgtatcaggcttatgatcctaatgcatcatacggaccaccaccaccagggagttcactaaaccaagggactggacaccccagaaactcgacacaggcaagagtagggaacgcattatggggagacggcggcaaccagtaccagccgcatcaggggccagggccacaataa

SEQ ID NO: 19839 - protein, 557 aa, Muscodor strobelii
  misc_feature: SGI Peptide ID NO. 566680
  misc_feature (30)..(321): Pfam Id: PF03619 Pfam Desc: Domain of function
  misc_feature (30)..(118): Pfam Id: PF03619 Pfam Desc: Domain of function
  misc_feature (175)..(321): Pfam Id: PF03619 Pfam Desc: Domain of function
  misc_feature (3)..(475): NCBI GI: 156061313 Blast Desc: SS1G_02799 [Sclerotinia sclerotiorum 1980] gi|154700203|gb|EDN99941.1| SS1G_02799 [Sclerotinia sclerotiorum 1980]
  misc_feature (8)..(543): NCBI GI: 39951649 Blast Desc: MGG_01467 [Magnaporthe grisea 70-15] gi|145020694|gb|EDK04823.1| MGG_01467 [Magnaporthe grisea 70-15]
  misc_feature (15)..(467): NCBI GI: 154319638 Blast Desc: BC1G_02300 [Botryotinia fuckeliana B05.10] gi|150855958|gb|EDN31150.1| BC1G_02300 [Botryotinia fuckeliana B05.10]
  misc_feature (5)..(401): NCBI GI: 85108706 Blast Desc: NCU06987 [Neurospora crassa OR74A] gi|28924237|gb|EAA33391.1| [Neurospora crassa OR74A]
  misc_feature (7)..(444): NCBI GI: 240109133 Blast Desc: CPC735_026380 [Coccidioides posadasii C735 delta SOWgp]
  misc_feature (6)..(531): NCBI GI: 242818353 Blast Desc: DUF300 domain protein, [Talaromyces stipitatus ATCC 10500] gi|218713565|gb|EED12989.1| DUF300 domain protein, [Talaromyces stipitatus ATCC 10500]
  misc_feature (6)..(475): NCBI GI: 212530560 Blast Desc: DUF300 domain protein, [Penicillium marneffei ATCC 18224] gi|210074835|gb|EEA28922.1| DUF300 domain protein, [Penicillium marneffei ATCC 18224]
  misc_feature (15)..(491): NCBI GI: 121712878 Blast Desc: DUF300 domain protein, [Aspergillus clavatus NRRL 1] gi|119402203|gb|EAW12624.1| DUF300 domain protein, [Aspergillus clavatus NRRL 1]
  misc_feature (7)..(490): NCBI GI: 70998374 Blast Desc: DUF300 domain protein [Aspergillus fumigatus Af293] gi|66851545|gb|EAL91871.1| DUF300 domain protein, [Aspergillus fumigatus Af293] gi|159126356|gb|EDP51472.1| DUF300 domain A1163]
  misc_feature (7)..(523): NCBI GI: 115438022 Blast Desc: conserved [Aspergillus terreus NIH2624] gi|114188774|gb|EAU30474.1| conserved [Aspergillus terreus NIH2624]
  misc_feature: Useful for introducing or modulating the production of volatile compounds
MGLFNTTCNSTLEDMRIGSEEKIAGDLTFHQLALIIAGGATIIAITVSIYLIWQHALNYTKPREQKHIMRILFMVPVYSAASFLALWYYWHAVYFQVISEVYEAFAIVSFFGLMCHYIAPDLHEQKNFFRQMTPIKPWIWPVPWFAKCCGGQRGIWRTPRSGLTWFNIAWACVYQYCFIRVAFTIIAVVTQYFDRYCESSNSPVFAHIWVTAFEAVAVTIAMYCIIQFYVQFKKPLAEQHLGLKVLAIKLVIFLSFWQTIVIDLATSESLNIVSANATLAWPDLKVGIPSLLLCVEMALFAILHLWSFSYVPYKEGAKSTFYPNPNMTNESPSRVNESGPKQGGFLGIKAFFDAANPWDIAKAFARGIRWLFVGVKRRHDDASYQLGGDTSYMGKNGAPLKSTDHLPIATQFRRSTYGMPIAQNDPIPGEESAGLIANAQPNPAGSRQNRPISLESDPNGSDRHNSDLRPNYDENPYAHEQSYSAYRPYNDEGGDLGAPPSSYQAYDPNASYGPPPPGSSLNQGTGHPRNSTQARVGNALWGDGGNQYQPHQGPGPQ

SEQ ID NO: 19840 - DNA, 2857 bp, Muscodor strobelii
  misc_feature: SGI EST ID NO. CUFF.46779.1
  misc_feature: Variant of the nucleotide sequence at SEQ ID NO 19838
gcacaggctgcgattgatccttggttcatctctcttgaatatccgtggacctgccaagttctacggattacagcaacttcccatttcaaaactctgtaatgtttgtttcccacgcggtcgattaagccttaagagaatcgcgaaatcaatcgctgaaccccatccttcaattcccgcagtcgaccgacgaccgtcataactactccgccgtcttattgcctcccgccgtaccgaacgcattggtcgaaaccgtctcttcaccaccgctctttgtgcgactgcccaagtgtttcaccattctcgaacttcaaccatcaacgcccgccgaccaacaccacagcgtgtttggagtacgaaccatataatacgattaatatcgacctcgaaggcatcgcgaccgctgcaaggcgggttggtcgaccctacgcagcgacggcctttgcagccgtctgggccaccgcctctgaaacaatcccgccatcgggcggaatcataattatactcgagcgagaatggggttattcaatacaacatgcaactccacgctggaggacatgcgcagtacgtctaaatatctgaacactctatggctacatttaagtttcgttgccgagccgttcctgcataccaagataccaagacagatcgccaagccactattctaagatcagtctcactgaccatctcgtgtctatacagtcggctctgaggagaagatcgctggcgacctcaccttccatcagttagctttgattattgccggcggagccactataatcgctatcacagtcagcatatatctcatatggcaacatgccctcaactacaccaagcctcgcgaacagaaacacattatgcgtatccttttcatggtccccgtctacagcgcggcctccttcctcgctctctggtattattggcacgccgtctacttccaggtcataagcgaagtctatgaagcctttgccatcgtgtctttcttcggcttgatgtgtcactatatcgcccctgatctgcacgagcagaagaacttcttccgccagatgacgcccattaaaccgtggatctggcctgttccttggttcgccaaatgttgcggtggccaacgaggtatttggaggacacctaggtctggtttgacgtggttcaatattgcttgggcttgtgtctaccagtactgcttcatacgcgttgcttttacgatcattgctgtagtcactcagtacttcgacaggtactgcgagagttccaacagccctgtctttgctcatatctgggttactgcgttcgaagctgttgccgtcacgatcgctatgtactgtattatccagttctatgtgcagttcaaaaagccactggccgagcagcacttaggtttaaaagttctagccatcaagctggtcatctttttgtcgttctggcaaacgatcgtcatcgaccttgctacttcagaatcattgaacattgtgagcgccaacgcgacactggcctggccagacttgaaagtagggatccccagtctgcttctgtgcgtggagatggccctgttcgcaattctgcatctctggtccttctcatacgtgccttacaaggaaggtgctaaatccaccttctatcctaacccaaacatgacaaatgaaagcccatctcgcgtgaatgagtctgggcctaagcaaggtggtttcttgggcatcaaggcatttttcgatgccgccaatccatgggatattgcgaaggctttcgctcgagggattcgctggctcttcgtcggggttaagcgccgccacgatgacgccagctaccaactcggaggtgatactagctacatgggaaagaatggcgcgcccctcaaaagcactgatcatctaccaattgcaacacagttccgtcggagtacatatggaatgcctatcgcccagaatgacccgatacctggagaagagagtgctggcttgattgcaaatgcgcaacccaaccccgccggatcgagacagaacagaccgataagcctcgaatcggatccgaatggaagcgacaggcacaattcagacttacggccaaactatgacgagaatccctatgcgcacgagcagtcctactcggcataccggccatacaatgacgagggaggcgatctaggcgcaccaccatcgtcgtatcaggcttatgatcctaatgcatcatacggaccaccaccaccagggagttcactaaaccaagggactggacaccccagaaactcgacacaggcaagagtagggaacgcattatggggagacggcggcaaccagtaccagccgcatcaggggccagggccacaataaaagctatgctgtcctggtagaaaccaaagttcgtatttcttatacccacgccatggcctacgccagagagagacacgataacgacgaaccatattggaagatgtgcatatctgggcataggtttttgaagcccttgaaactcggcgttggggtttattctgattaaggatctggctgcgcttctcagtacggtatcttgacgatgcaagctgtactatgttgccctctgttgtatacaaacaactttgaagaagataagggaaaggggataggaacaaatcttagttgccgtgatacctttgttatgggtatttagacaggcgacctttcgtcagattacatgatatcccccttgtacagaatacaattgatgaattacctaaatttcagtggggctttggatggtcctgcgtcgtggcacgagttgtgaattttttttgttgcttgctacggtaattgaaagacttctgcatgtgcgtgacgcagcgctattttcttgggatctggttagtttctatcaaggttgttgaaag

SEQ ID NO: 19841 - DNA, 9087 bp, Muscodor strobelii
  misc_feature: SGI cDNA ID NO. 566681
  misc_feature: Encodes the peptide sequence at SEQ ID NO 19842
gagccggagcgcagcagcctttcggttccagacacttcggcctggcgcggaaataccatgaatcttgacgccgaattgttctacaaacatgcgagacaggtcggttatggttggaccgggcctttccaagccttgtcaaacattcaacgaaggtatcgccacgccttggccgatgtaacagttcccgatgatgagagcatggccgattgtaagtgggccgtgcatcccgctgccctcgacgccgccttgcaggtcttgatgcttgctaagagctacccaggcgacggcgagctaaaagcgctttatctccccagcgtgattggcaagatcagaatcaattcggcctggtgccgtgccggacccgggtggctgggcgggcaacaggcgaggacctatgccgctctcgaagacagcaagcacggcgaggcgcaagaggccgctcgcgggcagatagatatcctagactcgacgcaagcgtacacggctatccagattagagatgtgagaatgctgccgctacaacgactcacagccgacgaggattgcgcatcattcgccgcctacaagtgggttcttgcgacgccagacttatcgacgcttcagaaaacggttgccagtgcagaggatatcaggctcaaccagctggccgagtacacatccgcgttctacctgcgccaactggtacgagaattccctgtcgggcacggctcacgcgaggacaagcccggttatttctaccagcactacctcaaatgggcatctcacgtcatcgatgccatcgccgaggggagacacccggttttgagacaagacgagatgtttaatagttatgagcagctgactaccaccctcaaacgctcaggcttgaaggactatccgataattgagttggcccgcatcgctggcgagaatatcgctcgcgccatccgcggcgaagtctccatggtagaaaagctcctcggcacgccagcgtgggagaagctctacgaaacacagtgtggtgaagtctcgcaggcagtgggtgacgctgtcttgcaaatcactaaccgatacccgagcgccgtgatattagaagtcggagctgggaccgggggcgcgacaaagcagatcatggccaaggccggccgtagtttcaagtcgtacacctacacagacatctccgcgggattctttggcgaggcgcgcaagacttttcaggcgtggcaagacaagatgatgtttgctgtgctcaacctcgacgatgagattgacgaatccaaattcaccaaggactcgtacgatgttgtcgtgggtatgctttgcgtccacgcggccaagagcatcgaggcaagcctaagacgcatgaggtctttactgaagccaggcggctttatcgtattaggtgaaatggtcaacgtagactgcgtttccgctactttcacgttcggatgtctcgagggatggtggtctggtgtacacgagggccgtaccatgggtgcccttatgcctctgagtgagtgggacagggtgctacgccgatccggtttctctggcgtcgacacggcatccccagctggtgagggcctggtcacgcagggccaggccatggtgtcccaggcaatcgacgacaggataagcttcattcgcgagcccctgtcatcatcgtggtgcgctgacaacctggagggaaccgcctctgcactccaacatcttgtcatcgtcggcgggaccacagatcccgtaaaaagtctgaccagagagctccatgaaatccttggcgactttttccagtctatagatatctatcaaagtctagaggctgttgatgcgaccaaggtgacccaccattctacctgtgtcgttctgagcgagcttgacaagcctgtttttgaggacctgacgagacagcgattcgccggactgcagcagatgctcacttcgaggcggaccattctctgggcgacttcagaccgtctgggagataatctatactccgagatggtgatgggaatggttcggagtattatgtgggaggtaacggacctccgcgtccaatatatcgacattgaaagcgcgacaccgttgcctaagtcgaaattgctggccgaagccgtgctccggctccgcattgccgagccatggcttagcgccgtagacggtgaaggagagaacgtcgacaacaagatgccgacgttgttgtgggccgcagagtcgcagcttgtgagcagaagcgatggccgcacctacgtgccgcgtatgaaacttttgcctgaggtaaatgaacgcgtcaattcatcccgccgatccattacgaggaccgtcaacacccgcaactctgatgtcgagttggtccccattgcctgcggagagatcacactacgtgagacgcggaggacggaggagacagtggccgacaatgccgagaaggaggtcaacaccttgaaactgcgcaccacacactccaccacttaccccatccgtttcaaagatgaacatttctttcacgtagtagccggtaagccgtttgtcaacgatggaagcacttcacatttttacgtgggatattcttccgaacctcatatcgcatccaccatcaccatcgacagggacaccgctatcacctgccgctccaatgaggctgcggctgaggctgtggctaccacggccgctaggctattgtctagatctatcatctggcggaccgtcagctacgccaaggaaaaggcaagcgaggagatcctggtcgtagttcacgaggctagcacttcgctgatggccgtgctggacgaggacatcgccacatgtgacgcgaagattagggtcgtctacacaacctcgtcggctaccgcagcagcagagaatagcaagctggtatgcatctcacaatgggcggatgttgatcttgtctgccggctcctgagtgtgccctcttctaatgatgaaggccggcgcacgtttgtcgacctcagtggtgacggagagagttctgccgcagcattgctcgtccaaaaggctctcggaccgcgccatcagttcgaggaaagcgcatcgttgatgctactcggaacagatagcggccatatctctaatgtttccattcccgatgcatcgatgatcagtctcctgaagaagtctgttagtgctagagacgacaataatgttgtgagcaaggttcctcttagcaccatctctccagagccgagccgagtcctccctcaatccatcttgagatggacggaggaatgtgaggtggtagtacagccttcatatatgcagttcaagctagatcggacatactggctagctggattgacgggtagtttgggtctggctctgtgtgaatggatggtggcccaaggcgctcggcacgtagtgctaagcagccggaatcccaatatcgagccggcgtggtctaaccgaatggcgagcaccggcgccgaaatccgggccgtgagctgtgacgtctccgacttcgatgctcttcagcggacataccaggacatctgcaacacaatgccgcctatagcgggcgtagctcagggagcgatggtcctgaaggatgcgcctatctgggatctgacctttgagcaagcccgcgcagtacttggtccaaaggttgacgggagcaggtacctagacagaatcttctgggacataccgctcgacttctttgtcttcttctcctctggcgtctcagtcgtaggcaacccgggccagtccctctacggcggagtcaacatgttcatgcattcgcttgcccgccggcggcggagtcggggtgttgcggcttcggtcatcggcatccccgtcgtcctgggagtgggctacgtgacgcagaagctagctaatgacgctgatattcagagattggttggtagaggcgtgggcatcatgtcggagcacagcttctaccagttcgcctccgaagtcatgtcagccagttaccccaagacgccgtctgagtccgagatctgggatgcgagcggcctgttcaactcttatagcgccaccaaccgcccgcactggtacgtcgacccaacgtacggcttcttcgttgcgtcaggtacctcgagtagttcagctactgtccaggcttccggtcaggtctcggtccagagacgtctgtctgaggccgagtcgtaccaaaacgtcaagagtatcatattcgaatctctggtcgagcaacttgttatactacttgagcttggccaagaccagcaggtcaccccatcgaccggaaccgacgaactgggtgtggattctctgatcgcctccaaacttcgaacgtggatgacgacaaattttgaagtatccatcccgacgttagagattctccaaggcacaacgcttcgaaagtttacaggcagaatatttgatgctatgcctaagacggtcattccgaaagccactgctgggatgagcaacggcaatgaagctgaaggagactccacgggttcctcgtctcaagctagtagtaacgaagcttcgtctgagctggatgagtcggatacctcactggaaaccccgaatgacgattcggacctagaagagcagaacaataaaagtgccgggcgcggccctgttgtaagaacagcccctctaagttcgacgcagacgatgttctggtttgttcacactcttctagacgaccgttcgactctgaacagtacgtggtgtttccgtctgagaggtcagttagatccggttcgcatcgccggcgcagtgcgcaccctaggtgagcgccatgagattctgcgcacctgctttgaggaggataacgagcaagagcggagcttgccagtgcagcgtgtactggagtcgtcgcaattggcgctcgaatgctatgatatacagtctgagcgagaggcccatgagtacttcgatgccctgaacgaccatatattcgatttaagtcttggttctacaatgcgcatccagttgcttacccgttcaccctcggagcggtacttattgatcggttaccaccatattgtcttcgatggtgctagtcatttgcccttgatgctcgacctcgaccgggcctaccactgggagccccaatcgccggcgcgcgtcatacaattcgtcgacttcgctgcccaacaaaagcagcagctaacatcgggcgcctgggatgacaaaatcgcattttggcatcgcgaattccagacgatccctgagccactgccaattcatcgcagtcgactgttggatcggagagttctttcacggtacgaaaacgcaacgggcactattttcaccttcgatggtcagcttcacccccaactggtccagttcgctcgcacccagcgaactaccgtcgtacatatatatatggcggccttcaaagtactcatcttccgctttctcggtgtgactgatatgtgtatcggcctcgcagatgatggtcggcgtgatgaccggctgcattcgtccatcgggcccctacttaatatcctaccgatccgcctgtcggccaagcccaacgaaacctttgcccgtgcggcccaaaacgcacgagacaagatactagcggcactagacaacgccgacgtacctctggaagtaattttcaacgagttgcgtgtcaagcgaccggccacatacagcccgctattccaagccttcctgaactacctgcctacgggcgtccatggggcgtccgaactgttctgtggcaatggacttgaaatggttagaacaagccctgcccagctcccgttcgacattgccatcaacatggtcaagactccagacggcgtgtccttcgcagtgtgcgcgtcggagaacctttacacctttgacgactgcaatgtgttggcgcgtagctttcaagacatccttcgtgagttcgccactacgcccaaaggtaaagtgggctgcgagtggaacgcccaccccgacgacgtcacagaggcattgcacatcggccggggcccttctctcagtacttcgttcgagaaggaaacgctgattcatgccattgaggcccatgcgacgttgctctctgccaagcctgccatcatcgacgacagaggggcagtccggtcatacagaagcatgatggatagggtgggagtcattgctaagcacttacttagtctcggtctcgggtcaggcagcagcatctgcgtgttacagcaaccgtcgttggactgggtcgagtctttcttggctgtgttgaagataggtgcaatctattcgcctctagatcccagcaccccatcaagccgtctctcgttaatcctcgccgaatgcagccccgctgccataattactaatgccgtcaaaatttccgtggttgaggatctcctgcacctggctaacggccccagagcccgtattgtcaatgtatctcagcttccacttgtccttaacgagcaacgaacagttccgacgctcgccaagtcatccaattctgcaatcgtattatataccagcggctcgacaggtaccccaaaaggagtcgtcatgtctcacgccaacctaacagattcgtttgatagccgtcgattctcgcccatgggccgcggggcgaacgtcgacgacgttatgctccatcagacagcgtacagcttcgacctatccgttatgcaaatcttcttcgccctctgcaatggcggtaccctcgtcgtcgcatcagaagaaaccagggctgacgcgcgtctcattgcgaaacttattcgcgatgcccgagttaccatgaccttggctactcccactgaatacaagggctggctgcggcgtgagcattgggaactactccgtgcttctccactttcgttgtgcatagcagctggtgaacctgtggccaactctctcctagagcttttccgaggcctagacatggcgagccttagatttcaaaacatctatgggccaaccgagactacatccggatctacagcaggtgaaatcccgtaccgagccgaccagtacatcaaaggtgaagtcagcaacatctcagcagggccggcgctggcaaatgagagcatttacatcctggacccggattcaaaacaagtacaacctgtgggtttgcccggcgaggtatacataggaggctcgggtgtcgcggccgggagctatcttggaggatcagaacagactgcagccaacttcctgccggatccatttgccgacgccgagtatcaagcacgaggctggaccacgatgtaccgtacgggggaccgaggtcgcctgtcacgggaggacggcaatctctatctcgagggccggatcggaggagacacccaagtcaaaatccacggtatgcgcatcgatctccgcgacatcgaagagaccattctcagggtagcacccgtaggtgtactagacgatgcggtggcgtcggtccgttcgcttgggaatgggagtgatgatgatcacaagttcattatttgccacgttacgttcgattcaagcctagaaccttcattcgattgcgatagattcttaacgttgcttcgcagcgaacttccccttggccgtcaaatgcgccctgccgcaattatagccgttcacgagctgcctcgtactgtatcgggaaaactagatcgacgggcattggccaagcttcccggggcacctgccgtgaaggcggagaatcaatgtcagattgataggacagtagtgactctcttagatcgagaggtatctctactgagaatctggctccaagtgatcccgacaagtctctcttccatgtataacatcacggctgaatcggattttttcgcggttggcggcaattcactcatgctactcgaactagcaagacacatcaagcagtatcttggcaaatctataccacttattgccttgtatcagtcaatcactctaggcgaaatggcagagctccttgaagatgacaaggcggacgaaggcaacagcgagacagcccggaagtacgattgggcagtcgaagctagaccgacatcggaagaggacgtggacaagttgcataaatcattactgtcacatcttccgcttcagccttcggcacgttcggattttggtgccatacaacatccgccacgcgtcgttgtgcttaccggagctaccggctttcttggcagatatctcctctcaaatctattgtctcaggacaatatcacagaggttatctgtatcggtctgcgtcgagaagcttccacaatagaagccctctgccccgaagacaaaaaggtaacatgcttcactggtgatcttcgtctgccgctcctaggtctcacgccgtccgcggccttggagatctttggctgtcgagttgacgccataattcacaatgccgccgacgtctcgcaccttaagacttacgcgtccctcaaggcacccaacgtggacgctgtgcgggaacttgcagccctatgtctcttgcgaggccacgtgagcggcgggggcccgctacccaccttccacttcatctcgaccgcaggggtgtctatgtacacttcaaccgactcagtcacggaacagcgatccttccgggacgctccacccccatcagatggtagttacggatacctggcctcgaagcacgtcgcagaacggtatctcgaagaaatgtacagtaaatatggactgccggtgtgtattcatcgaccgaccagcgttgtgcggccacctaagaatgacaacaacgacaatttcggacaaaagcaacgcgtcgtcgtcggcatgaccgacgtcgacgatatcgtccagaacatggtcgggtattctaggctgatcaaagctgtaccgacttcagacaagttaaaaggctggttggacttcgtctatcccgagtcgttcgcacgcattgtcgtccgagacctgatgaggggggcggcgtggagttgtgacaatggtacctcgtctatcggtgcgcctaaaatggtgtatagatatgaagcaggggattttgagatacggatcgaagatatgaaagagttcttggagggtgaaaatggaaatggtactgttttcgagaaactggagatcgcagactgggttgcgcgggctcaggcggtcgctgcaatgcctgagcccatggctgtaattttccagaacttcgagagcctacaaagtagcgggatcaactttcctcgctttgtgcgagactaa

SEQ ID NO: 19842 - protein, 3028 aa, Muscodor strobelii
  misc_feature: SGI Peptide ID NO. 566681
  misc_feature (1090)..(1254): Pfam Id: PF00106 Pfam Desc: short chain dehydrogenase
  misc_feature (2010)..(2437): Pfam Id: PF00501 Pfam Desc: AMP-binding enzyme
  misc_feature (1521)..(1820): Pfam Id: PF00668 Pfam Desc: Condensation domain
  misc_feature (2675)..(2949): Pfam Id: PF01370 Pfam Desc: NAD dependent epimerase/dehydratase family
  misc_feature (1091)..(1267): Pfam Id: PF08659 Pfam Desc: KR domain
  misc_feature (357)..(460): Pfam Id: PF08241 Pfam Desc: Methyltransferase domain
  misc_feature (357)..(458): Pfam Id: PF08242 Pfam Desc: Methyltransferase domain
  misc_feature (2677)..(2897): Pfam Id: PF07993 Pfam Desc: Male sterility protein
  misc_feature (2545)..(2614): Pfam Id: PF00550 Pfam Desc: Phosphopantetheine attachment site
  misc_feature (2676)..(2701): Pfam Id: PF01073 Pfam Desc: 3-beta hydroxysteroid dehydrogenase/isomerase family
  misc_feature (1521)..(1723): Pfam Id: PF00668 Pfam Desc: Condensation domain
  misc_feature (2675)..(2696): Pfam Id: PF01370 Pfam Desc: NAD dependent epimerase/dehydratase family
  misc_feature (2677)..(2866): Pfam Id: PF07993 Pfam Desc: Male sterility protein
  misc_feature (20)..(3027): NCBI GI: 238840354 Blast Desc: polyketide synthase/peptide synthetase [Microsporum canis CBS 113480]
  misc_feature (21)..(3028): NCBI GI: 47109414 Blast Desc: polyketide synthase/peptide synthetase [Magnaporthe grisea]
  misc_feature (21)..(3028): NCBI GI: 145612849 Blast Desc: MGG_12447 [Magnaporthe grisea 70-15] gi|145019951|gb|EDK04179.1| MGG_12447 [Magnaporthe grisea 70-15]
  misc_feature (4)..(3027): NCBI GI: 240109583 Blast Desc: polyketide synthase, [Coccidioides posadasii C735 delta SOWgp]
  misc_feature (9)..(3027): NCBI GI: 258570989 Blast Desc: UREG_03815 [Uncinocarpus reesii 1704] gi|237904568|gb|EEP78969.1| UREG_03815 [Uncinocarpus reesii 1704]
  misc_feature (18)..(3002): NCBI GI: 116181222 Blast Desc: CHGG_01239 [Chaetomium globosum CBS 148.51] gi|88185536|gb|EAQ93004.1| CHGG_01239 [Chaetomium globosum CBS 148.51]
  misc_feature (9)..(3027): NCBI GI: 255938466 Blast Desc: Pc14g00080 [Penicillium chrysogenum Wisconsin 54-1255] gi|211584624|emb|CAP74149.1| Pc14g00080 [Penicillium chrysogenum Wisconsin 54-1255]
  misc_feature (18)..(2861): NCBI GI: 171680492 Blast Desc: protein product [Podospora anserina] gi|170939873|emb|CAP65099.1| protein product [Podospora anserina]
  misc_feature (18)..(2967): NCBI GI: 121701571 Blast Desc: equisetin synthetase, [Aspergillus clavatus NRRL 1] gi|119397193|gb|EAW07624.1| equisetin synthetase, [Aspergillus clavatus NRRL 1]
  misc_feature (22)..(3023): NCBI GI: 241864947 Blast Desc: hybrid PKS-NRPS protein [Metarhizium anisopliae]
  misc_feature (3)..(1953): SWISSPROT Homolog: EC 2.3.1.161 Lovastatin nonaketide synthase
EPERSSLSVPDTSAWRGNTMNLDAELFYKHARQVGYGWTGPFQALSNIQRRYRHALADVTVPDDESMADCKWAVHPAALDAALQVLMLAKSYPGDGELKALYLPSVIGKIRINSAWCRAGPGWLGGQQARTYAALEDSKHGEAQEAARGQIDILDSTQAYTAIQIRDVRMLPLQRLTADEDCASFAAYKWVLATPDLSTLQKTVASAEDIRLNQLAEYTSAFYLRQLVREFPVGHGSREDKPGYFYQHYLKWASHVIDAIAEGRHPVLRQDEMFNSYEQLTTTLKRSGLKDYPIIELARIAGENIARAIRGEVSMVEKLLGTPAWEKLYETQCGEVSQAVGDAVLQITNRYPSAVILEVGAGTGGATKQIMAKAGRSFKSYTYTDISAGFFGEARKTFQAWQDKMMFAVLNLDDEIDESKFTKDSYDVVVGMLCVHAAKSIEASLRRMRSLLKPGGFIVLGEMVNVDCVSATFTFGCLEGWWSGVHEGRTMGALMPLSEWDRVLRRSGFSGVDTASPAGEGLVTQGQAMVSQAIDDRISFIREPLSSSWCADNLEGTASALQHLVIVGGTTDPVKSLTRELHEILGDFFQSIDIYQSLEAVDATKVTHHSTCVVLSELDKPVFEDLTRQRFAGLQQMLTSRRTILWATSDRLGDNLYSEMVMGMVRSIMWEVTDLRVQYIDIESATPLPKSKLLAEAVLRLRIAEPWLSAVDGEGENVDNKMPTLLWAAESQLVSRSDGRTYVPRMKLLPEVNERVNSSRRSITRTVNTRNSDVELVPIACGEITLRETRRTEETVADNAEKEVNTLKLRTTHSTTYPIRFKDEHFFHVVAGKPFVNDGSTSHFYVGYSSEPHIASTITIDRDTAITCRSNEAAAEAVATTAARLLSRSIIWRTVSYAKEKASEEILVVVHEASTSLMAVLDEDIATCDAKIRVVYTTSSATAAAENSKLVCISQWADVDLVCRLLSVPSSNDEGRRTFVDLSGDGESSAAALLVQKALGPRHQFEESASLMLLGTDSGHISNVSIPDASMISLLKKSVSARDDNNVVSKVPLSTISPEPSRVLPQSILRWTEECEVVVQPSYMQFKLDRTYWLAGLTGSLGLALCEWMVAQGARHVVLSSRNPNIEPAWSNRMASTGAEIRAVSCDVSDFDALQRTYQDICNTMPPIAGVAQGAMVLKDAPIWDLTFEQARAVLGPKVDGSRYLDRIFWDIPLDFFVFFSSGVSVVGNPGQSLYGGVNMFMHSLARRRRSRGVAASVIGIPVVLGVGYVTQKLANDADIQRLVGRGVGIMSEHSFYQFASEVMSASYPKTPSESEIWDASGLFNSYSATNRPHWYVDPTYGFFVASGTSSSSATVQASGQVSVQRRLSEAESYQNVKSIIFESLVEQLVILLELGQDQQVTPSTGTDELGVDSLIASKLRTWMTTNFEVSIPTLEILQGTTLRKFTGRIFDAMPKTVIPKATAGMSNGNEAEGDSTGSSSQASSNEASSELDESDTSLETPNDDSDLEEQNNKSAGRGPVVRTAPLSSTQTMFWFVHTLLDDRSTLNSTWCFRLRGQLDPVRIAGAVRTLGERHEILRTCFEEDNEQERSLPVQRVLESSQLALECYDIQSEREAHEYFDALNDHIFDLSLGSTMRIQLLTRSPSERYLLIGYHHIVFDGASHLPLMLDLDRAYHWEPQSPARVIQFVDFAAQQKQQLTSGAWDDKIAFWHREFQTIPEPLPIHRSRLLDRRVLSRYENATGTIFTFDGQLHPQLVQFARTQRTTVVHIYMAAFKVLIFRFLGVTDMCIGLADDGRRDDRLHSSIGPLLNILPIRLSAKPNETFARAAQNARDKILAALDNADVPLEVIFNELRVKRPATYSPLFQAFLNYLPTGVHGASELFCGNGLEMVRTSPAQLPFDIAINMVKTPDGVSFAVCASENLYTFDDCNVLARSFQDILREFATTPKGKVGCEWNAHPDDVTEALHIGRGPSLSTSFEKETLIHAIEAHATLLSAKPAIIDDRGAVRSYRSMMDRVGVIAKHLLSLGLGSGSSICVLQQPSLDWVESFLAVLKIGAIYSPLDPSTPSSRLSLILAECSPAAIITNAVKISVVEDLLHLANGPRARIVNVSQLPLVLNEQRTVPTLAKSSNSAIVLYTSGSTGTPKGVVMSHANLTDSFDSRRFSPMGRGANVDDVMLHQTAYSFDLSVMQIFFALCNGGTLVVASEETRADARLIAKLIRDARVTMTLATPTEYKGWLRREHWELLRASPLSLCIAAGEPVANSLLELFRGLDMASLRFQNIYGPTETTSGSTAGEIPYRADQYIKGEVSNISAGPALANESIYILDPDSKQVQPVGLPGEVYIGGSGVAAGSYLGGSEQTAANFLPDPFADAEYQARGWTTMYRTGDRGRLSREDGNLYLEGRIGGDTQVKIHGMRIDLRDIEETILRVAPVGVLDDAVASVRSLGNGSDDDHKFIICHVTFDSSLEPSFDCDRFLTLLRSELPLGRQMRPAAIIAVHELPRTVSGKLDRRALAKLPGAPAVKAENQCQIDRTVVTLLDREVSLLRIWLQVIPTSLSSMYNITAESDFFAVGGNSLMLLELARHIKQYLGKSIPLIALYQSITLGEMAELLEDDKADEGNSETARKYDWAVEARPTSEEDVDKLHKSLLSHLPLQPSARSDFGAIQHPPRVVVLTGATGFLGRYLLSNLLSQDNITEVICIGLRREASTIEALCPEDKKVTCFTGDLRLPLLGLTPSAALEIFGCRVDAIIHNAADVSHLKTYASLKAPNVDAVRELAALCLLRGHVSGGGPLPTFHFISTAGVSMYTSTDSVTEQRSFRDAPPPSDGSYGYLASKHVAERYLEEMYSKYGLPVCIHRPTSVVRPPKNDNNDNFGQKQRVVVGMTDVDDIVQNMVGYSRLIKAVPTSDKLKGWLDFVYPESFARIVVRDLMRGAAWSCDNGTSSIGAPKMVYRYEAGDFEIRIEDMKEFLEGENGNGTVFEKLEIADWVARAQAVAAMPEPMAVIFQNFESLQSSGINFPRFVRD

SEQ ID NO: 19843 - DNA, 1121 bp, Muscodor strobelii
  misc_feature: SGI EST ID NO. CUFF.46451.0
  misc_feature: Variant of the nucleotide sequence at SEQ ID NO 19841
gcccaaatgatgcagtgacgtctccgacttcgatgctcttcagcggacataccaggacatctgcaacacaatgccgcctatagcgggcgtagctcagggagcgatggtcctgaaggatgcgcctatctgggatctgacctttgagcaagcccgcgcagtacttggtccaaaggttgacgggagcaggtacctagacagaatcttctgggacataccgctcgacttctttgtcttcttctcctctggcgtctcagtcgtaggcaacccgggccagtccctctacggcggagtcaacatgttcatgcattcgcttgcccgccggcggcggagtcggggtgttgcggcttcggtcatcggcatccccgtcgtcctgggagtgggctacgtgacgcagaagctagctaatgacgctgatattcagagattggttggtagaggcgtgggcatcatgtcggagcacagcttctaccagttcgcctccgaagtcatgtcagccagttaccccaagacgccgtctgagtccgagatctgggatgcgagcggcctgttcaactcttatagcgccaccaaccgcccgcactggtacgtcgacccaacgtacggcttcttcgttgcgtcaggtacctcgagtagttcagctactgtccaggcttccggtcaggtctcggtccagagacgtctgtctgaggccgagtcgtaccaaaacgtcaagagtatcatattcgaatctctggtcgagcaacttgttatactacttgagcttggccaagaccagcaggtcaccccatcgaccggaaccgacgaactgggtgtggattctctgatcgcctccaaacttcgaacgtggatgacgacaaattttgaagtatccatcccgacgttagagattctccaaggcacaacgcttcgaaagtttacaggcagaatatttgatgctatgcctaagacggtcattccgaaagccactgctgggatgagcaacggcaatgaagctgaaggagactccacgggttcctcgtctcaagctagtagtaacgaagcttcgtctgagctggatgagtcggatacctcactggaaaccccgaatgacgattcggacctagaagagcagaacaataaaa

SEQ ID NO: 19844 - DNA, 1077 bp, Muscodor strobelii
  misc_feature: SGI cDNA ID NO. 566682
  misc_feature: Encodes the peptide sequence at SEQ ID NO 19845
atgactgtgcccgtcacaaccaaggcacttgtagtgctcgataatgagaaagactccgaagtacgcgacgtgccatgtccggcgtatgaggatgattggattctcgtcaaggtcaaggccgtagccctaaacccgtcagactggaagcactttgactggggtcttgcaccggctggggcgagaatgggttttgactacgcaggtatcgtacaagctgtcgggagcaaagttactcggtttcgggaaggagatcgtatcaccggtgtctgtcacggatggaataaacttcatcccgagtacggtgcttttgcagaatatgtaagcgtcaaagaggcgatccagatgcacattcccgatttcttgagctaccaagaagcatcgacgttgggagttggcgttgttaccgtgggcctctgtctctataaaaccctcggtttacctttaccagatgcgccggtaacacggccattttctgttctcatattcgcgggcagtactgccgcaggcgtccttgcgatccaattcgccaaggcttcaggccttacggtcgtagccacagcgtctccgcgaaacttcgcctatctcaaatcgctcggagttgatgccatcttcgactacgcatcgccaacttgcgcctcggacatccgaaatttcacaaaaggcaagctcctcttcgcgctagactgctacggcacgggcgtggagatctgcgcatcggccatgtcgaacgaagaagcgagcaagtacagcaccctgcagctcatgaaccctgaacaggacgccaagcttctgaagaagaccaatccattagtcgaggggccctattttgttctgggctacgaagcgttcggtacgacgtacatctacaaagggcagacatatgctgggaggcccgagttcttggatttcgcggccaatttctctcagttgagcgagcggcttatcgccagtgggactgtgaagcctatccgtccgacaattgataaggaggggattggattggatggcgtccggcggggtctgcaaattttgagggaaaggggggttagtgcgtcgaaactcgtgtatactctctga

SEQ ID NO: 19845 - protein, 358 aa, Muscodor strobelii
  misc_feature: SGI Peptide ID NO. 566682
  misc_feature (31)..(115): Pfam Id: PF08240 Pfam Desc: Alcohol dehydrogenase GroES-like domain
  misc_feature (31)..(111): Pfam Id: PF08240 Pfam Desc: Alcohol dehydrogenase GroES-like domain
  misc_feature (158)..(234): Pfam Id: PF00107 Pfam Desc: Zinc-binding dehydrogenase
  misc_feature (6)..(358): NCBI GI: 242812056 Blast Desc: alcohol dehydrogenase, [Talaromyces stipitatus ATCC 10500] gi|218714219|gb|EED13642.1| alcohol dehydrogenase, [Talaromyces stipitatus ATCC 10500]
  misc_feature (11)..(358): NCBI GI: 238034194 Blast Desc: Alcohol dehydrogenase [Pichia pastoris]
  misc_feature (11)..(358): NCBI GI: 156057887 Blast Desc: SS1G_04675 [Sclerotinia sclerotiorum 1980] gi|154702460|gb|EDO02199.1| SS1G_04675 [Sclerotinia sclerotiorum 1980]
  misc_feature (11)..(358): NCBI GI: 154323390 Blast Desc: BC1G_00094 [Botryotinia fuckeliana B05.10] gi|150842323|gb|EDN17516.1| BC1G_00094 [Botryotinia fuckeliana B05.10]
  misc_feature (6)..(358): NCBI GI: 119471203 Blast Desc: zinc-binding oxidoreductase ToxD, [Neosartorya fischeri NRRL 181] gi|119406290|gb|EAW16241.1| zinc-binding oxidoreductase ToxD, [Neosartorya fischeri NRRL 181]
  misc_feature (11)..(358): NCBI GI: 256720125 Blast Desc: NECHADRAFT_56444 [Nectria haematococca mpVI 77-13-4]
  misc_feature (6)..(356): NCBI GI: 259483131 Blast Desc: TPA: oxidoreductase (Eurofung) [Aspergillus nidulans FGSC A4]
  misc_feature (8)..(358): NCBI GI: 115397707 Blast Desc: protein TOXD [Aspergillus terreus NIH2624] gi|114192636|gb|EAU34336.1| protein TOXD [Aspergillus terreus NIH2624]
  misc_feature (5)..(358): NCBI GI: 159124470 Blast Desc: zinc-binding oxidoreductase ToxD, [Aspergillus fumigatus A1163]
  misc_feature (6)..(358): NCBI GI: 169766250 Blast Desc: [Aspergillus oryzae RIB40] gi|238482955|ref|XP_002372716.1| zinc-binding oxidoreductase ToxD, [Aspergillus flavus NRRL3357] gi|83765451|dbj|BAE55594.1|
  misc_feature (34)..(222): SWISSPROT Homolog: EC 1.6.5.5 NADPH:quinone reductase
MTVPVTTKALVVLDNEKDSEVRDVPCPAYEDDWILVKVKAVALNPSDWKHFDWGLAPAGARMGFDYAGIVQAVGSKVTRFREGDRITGVCHGWNKLHPEYGAFAEYVSVKEAIQMHIPDFLSYQEASTLGVGVVTVGLCLYKTLGLPLPDAPVTRPFSVLIFAGSTAAGVLAIQFAKASGLTVVATASPRNFAYLKSLGVDAIFDYASPTCASDIRNFTKGKLLFALDCYGTGVEICASAMSNEEASKYSTLQLMNPEQDAKLLKKTNPLVEGPYFVLGYEAFGTTYIYKGQTYAGRPEFLDFAANFSQLSERLIASGTVKPIRPTIDKEGIGLDGVRRGLQILRERGVSASKLVYTL

SEQ ID NO: 19846 - DNA, 1482 bp, Muscodor strobelii
  misc_feature: SGI cDNA ID NO. 566683
  misc_feature: Encodes the peptide sequence at SEQ ID NO 19847
atgaactcgacttcgatgaggacaactctgcctgagagttttgtggccgtggggagtcagttcacaattctgaggattctaattgccatagtctcgtcttacatattctatacgatcatctacaatagactactctcgcccttaaggaaattcccagggccctgcataaacagcatcaccagcctgcccgctgatttccgctacctcaggggcgatgcctaccgccaattgacagtactgcatgccaagtacgggccggtcgtcagataccggcctaacgagctctcgtacatcgacgcggctgtctggagagacgccttcgccactcgtccggggcaccaggaatttggcaaggcagacccagtgcgctctcccaacgggccggttctttctccaaccagggggctcaagaaacaagaattacgtatccacggacacgttgagcggaccatcacccttctagcagagctaagtcgggccggcgcagttgacatctgcgagatcttcacatggatcaccatcgacgtcatcagcgacttgtcgtttggcgagtcgttcgacagcaccgaaaaagcggttgacacaccctggggcgtcggagacctcgtcatgagtcttatacccaagagtatgcagcgtggggttctcgacagttatcagactatcgtcgacatggtcgataggcgattacagaacagcaatccccgaggtgatttcttcgatcacctccttcaagacaagctggtcgacccggacggtgccttgacgagtccccagaggatgacacttgccgagcttcatagcacggctagcgacgtggggtttgcgggatcagagacaacggcgacggtcttgagcggcatcgtcttcaatctgatccgccacccggatgcttaccgcaagctgatcgcggagatcagagcaacctttaccggcgcttatgagatagacgtagcctcgacagcacccgcgctcatgccttacctcgatgccgtgatgcaagagggcctgcgaacgtataacccggcgcccgtgttcggcgcgcgacttgtgccgccgggtggtgatacgattgcgggcgtatggctgccgggcggaacacgcatccggatcccgccgtgggtggcatatcagtcggcgatgcatttcgcgagacccgacgagttcatacccgatcggtggctccccgttgccagcggtggaggtaatcgaccggccgagttcgacaacgacaacgcagatcgtgttttccagcccttcggattcggtccccgcaactgcatcggcgcgaacttggcccgtgctgagatacgcctgacgctcgcgcatctcctctggcgatttgacctcgccagaccgccgtgtgtgacaaagaatccggtgcagatacgtgagtggaatcgctggattgatcgccagaaagtttggtttatgtacgatagagggcctttaatggtccagctcgttgagaggggagtgtag

SEQ ID NO: 19847 - protein, 493 aa, Muscodor strobelii
  misc_feature: SGI Peptide ID NO. 566683
  misc_feature (47)..(477): Pfam Id: PF00067 Pfam Desc: Cytochrome P450
  misc_feature (238)..(450): Pfam Id: PF00067 Pfam Desc: Cytochrome P450
  misc_feature (35)..(491): NCBI GI: 240108758 Blast Desc: Cytochrome P450 family protein [Coccidioides posadasii C735 delta SOWgp]
  misc_feature (22)..(491): NCBI GI: 212531261 Blast Desc: benzoate 4-monooxygenase cytochrome P450, [Penicillium marneffei ATCC 18224] gi|210071151|gb|EEA25240.1| benzoate 4-monooxygenase cytochrome P450, [Penicillium marneffei ATCC
  misc_feature (19)..(469): NCBI GI: 121707561 Blast Desc: toxin biosynthesis cytochrome P450 monooxygenase, [Aspergillus clavatus NRRL 1] gi|119400022|gb|EAW10448.1| toxin biosynthesis cytochrome P450 monooxygenase, [Aspergillus clavatus
  misc_feature (34)..(491): NCBI GI: 255945441 Blast Desc: Pc20g09940 [Penicillium chrysogenum Wisconsin 54-1255] gi|211588223|emb|CAP86323.1| Pc20g09940 [Penicillium chrysogenum Wisconsin 54-1255]
  misc_feature (38)..(493): NCBI GI: 259484175 Blast Desc: TPA: sterigmatocystin biosynthesis P450 monooxygenase stcF (EC 1.14.-.-)(Cytochrome P450 60A2) [Source:UniProtKB/Swiss-Prot;Acc:Q12609] [Aspergillus nidulans
  misc_feature (40)..(492): NCBI GI: 46370475 Blast Desc: AvnA [Aspergillus flavus]
  misc_feature (40)..(491): NCBI GI: 5921170 Blast Desc: AVNA_ASPPA RecName: Full=Averantin oxidoreductase; AltName: Full=Cytochrome P450 60A1 gi|45477385|gb|AAS66008.1| cytochrome P450 monooxygenase [Aspergillus parasiticus]
  misc_feature (15)..(493): NCBI GI: 145235557 Blast Desc: An03g05460 [Aspergillus niger] gi|134058114|emb|CAK38308.1| protein product [Aspergillus niger]
  misc_feature (23)..(493): NCBI GI: 20338411 Blast Desc: AflL [Aspergillus ochraceoroseus]
  misc_feature (20)..(491): NCBI GI: 46370525 Blast Desc: AvnA [Aspergillus nomius]
  misc_feature (152)..(448): SWISSPROT Homolog: EC 1.14.14.1 Unspecific monooxygenase
MNSTSMRTTLPESFVAVGSQFTILRILIAIVSSYIFYTIIYNRLLSPLRKFPGPCINSITSLPADFRYLRGDAYRQLTVLHAKYGPVVRYRPNELSYIDAAVWRDAFATRPGHQEFGKADPVRSPNGPVLSPTRGLKKQELRIHGHVERTITLLAELSRAGAVDICEIFTWITIDVISDLSFGESFDSTEKAVDTPWGVGDLVMSLIPKSMQRGVLDSYQTIVDMVDRRLQNSNPRGDFFDHLLQDKLVDPDGALTSPQRMTLAELHSTASDVGFAGSETTATVLSGIVFNLIRHPDAYRKLIAEIRATFTGAYEIDVASTAPALMPYLDAVMQEGLRTYNPAPVFGARLVPPGGDTIAGVWLPGGTRIRIPPWVAYQSAMHFARPDEFIPDRWLPVASGGGNRPAEFDNDNADRVFQPFGFGPRNCIGANLARAEIRLTLAHLLWRFDLARPPCVTKNPVQIREWNRWIDRQKVWFMYDRGPLMVQLVERGV

SEQ ID NO: 19848 - DNA, 1161 bp, Muscodor strobelii
  misc_feature: SGI cDNA ID NO. 566684
  misc_feature: Encodes the peptide sequence at SEQ ID NO 19849
atgacaaccctcgtacctcctcaaaccatcaaggcgatcgtaataacggggagaggtaaagccgggattcgctcagtgcctatcccgcaggtccccgagggctatgtcctggtcaaggttcgtgccgtcggggtgaatcctacagattggaaggtcgtcgatgtccctccttctggcaagaccaagataggcacgcgcgtcggctgcgattttgcaggtgtcgtcgtggagcttggtgctggcgttacgaattatgtggtaggggaccgcattgctgggtttgcgcatggcaggtacgagcaagcggctaactctacttttttccaaagcaatgtctcgtcaccaagtaccggtagctttgccgaatacatcattagcaaggcgaccggagcgcagatgaagattcccgacaacataaccgatgaacaagcagcgacgctcggcgtatcaatcacaaccgtaggtcaaggtctctataaatcatcactcggactacccctgccatcacttagccacggcagaatctccgatggtaacaagtcacctttcttgtttatatcaggcggtagcacagctacaggtatctatgggattcaattcgccaaattgtccggatacacagtcgtggctacggcgtcgccggcgaatttcgaatacctaaagtcgctcggcgctgatgccgtcttcgactatcgctcacctaccgcggctattgacattcgtagtttcacagaggacaacttaacacttgcttgggactgcataggccaggatagtatagagctatgcgtaaatgctatgagtagcagcaacaccgcagaactcaagattggaacagtcgcaacggtggacacggcggcgctaaggtccattgccccaagactgaccgacagcggccccgaactcacgataggatttgatgtatttggagaaccatacgcgtggtatggtgtcactcgggtcccgaaggcggacgaggttgagtttgcgagtatgttctggtcgttgacccgggagctactcgctgacggcgctctgaagcccattaggatagaagtaaaccgtggtggcagggtcgggctggaaggcgtgctggaggggctggatattctaaagagaggggaggtcagtgctcagaaactggtctacactatattttga

SEQ ID NO: 19849 - protein, 386 aa, Muscodor strobelii
  misc_feature: SGI Peptide ID NO. 566684
  misc_feature (33)..(135): Pfam Id: PF08240 Pfam Desc: Alcohol dehydrogenase GroES-like domain
  misc_feature (180)..(323): Pfam Id: PF00107 Pfam Desc: Zinc-binding dehydrogenase
  misc_feature (33)..(92): Pfam Id: PF08240 Pfam Desc: Alcohol dehydrogenase GroES-like domain
  misc_feature (186)..(267): Pfam Id: PF00107 Pfam Desc: Zinc-binding dehydrogenase
  misc_feature (9)..(385): NCBI GI: 242812056 Blast Desc: alcohol dehydrogenase, [Talaromyces stipitatus ATCC 10500] gi|218714219|gb|EED13642.1| alcohol dehydrogenase, [Talaromyces stipitatus ATCC 10500]
  misc_feature (4)..(385): NCBI GI: 116196872 Blast Desc: CHGG_05034 [Chaetomium globosum CBS 148.51] gi|88180947|gb|EAQ88415.1| CHGG_05034 [Chaetomium globosum CBS 148.51]
  misc_feature (7)..(385): NCBI GI: 39940216 Blast Desc: MGG_05132 [Magnaporthe grisea 70-15] gi|145010612|gb|EDJ95268.1| MGG_05132 [Magnaporthe grisea 70-15]
  misc_feature (8)..(385): NCBI GI: 261357510 Blast Desc: TOXD [Verticillium albo-atrum VaMs.102]
  misc_feature (12)..(385): NCBI GI: 238034194 Blast Desc: Alcohol dehydrogenase [Pichia pastoris]
  misc_feature (12)..(385): NCBI GI: 154323390 Blast Desc: BC1G_00094 [Botryotinia fuckeliana B05.10] gi|150842323|gb|EDN17516.1| BC1G_00094 [Botryotinia fuckeliana B05.10]
  misc_feature (12)..(385): NCBI GI: 156057887 Blast Desc: SS1G_04675 [Sclerotinia sclerotiorum 1980] gi|154702460|gb|EDO02199.1| SS1G_04675 [Sclerotinia sclerotiorum 1980]
  misc_feature (9)..(385): NCBI GI: 159124470 Blast Desc: zinc-binding oxidoreductase ToxD, [Aspergillus fumigatus A1163]
  misc_feature (9)..(385): NCBI GI: 70992105 Blast Desc: zinc-binding oxidoreductase ToxD [Aspergillus fumigatus Af293] gi|66848534|gb|EAL88863.1| zinc-binding oxidoreductase ToxD, [Aspergillus fumigatus Af293]
  misc_feature (9)..(385): NCBI GI: 119471203 Blast Desc: zinc-binding oxidoreductase ToxD, [Neosartorya fischeri NRRL 181] gi|119406290|gb|EAW16241.1| zinc-binding oxidoreductase ToxD, [Neosartorya fischeri NRRL 181]
  misc_feature (23)..(242): SWISSPROT Homolog: EC 1.1.1.1 Alcohol dehydrogenase
MTTLVPPQTIKAIVITGRGKAGIRSVPIPQVPEGYVLVKVRAVGVNPTDWKVVDVPPSGKTKIGTRVGCDFAGVVVELGAGVTNYVVGDRIAGFAHGRYEQAANSTFFQSNVSSPSTGSFAEYIISKATGAQMKIPDNITDEQAATLGVSITTVGQGLYKSSLGLPLPSLSHGRISDGNKSPFLFISGGSTATGIYGIQFAKLSGYTVVATASPANFEYLKSLGADAVFDYRSPTAAIDIRSFTEDNLTLAWDCIGQDSIELCVNAMSSSNTAELKIGTVATVDTAALRSIAPRLTDSGPELTIGFDVFGEPYAWYGVTRVPKADEVEFASMFWSLTRELLADGALKPIRIEVNRGGRVGLEGVLEGLDILKRGEVSAQKLVYTIF

SEQ ID NO: 19850 - DNA, 2629 bp, Muscodor strobelii
  misc_feature: SGI EST ID NO. CUFF.46473.0
  misc_feature: Variant of the nucleotide sequence at SEQ ID NO 19848
tgtccagcaaaatatccttgacgctcccagtggttttgcaacaacacccttttagccgtagaagaactatatgaacggtcgtgcaaagatagttcttctggttatgagcctggctgtttccgcgctggtaatgcagcctcccgtcatcaccgttcgatcctcactttgagcagacgttgagatcccattagagaccagagatcagaggccggagccatatggaccacccagtacgggagatagggttcgcgagagcccagagatatcgagagtcagggggagtgtctagctttcacccactgcgtgggtggagggaaagagttggctagccacccccatatataccatactaccagtggtgaccactatcaggcgttcgacactcttttgtagcgtggctcagtggtatgttctactgataatatttggggatatcggcggtgcgttggcaatgggcaccgattttagaaacatggatacgtcgtgacgatcgctctggcatgttggagagcgctgccttccaactttaacaagcttgagtgggaattaacggaactaatatagagaaatttctttctaattagaggtgttgctttatattattattatatctgtattagatcaggtagatacatttttgaaagagagcgaaggcgtatgggttgggtcggagtacctaaggtacttgttgtaactgaaagccggagcaactgcagctgattttatgcaagatcggaacagacatggtccaatcattttaaccgtcaaaaagtaggattcaccactaccaccattcctcccacttatctcacacggcttaaagtgaaaaccccgaaatctttcgggctgatactaatgtctaaggatttaatatgaccaacgagggcaggtggtatacaatggtttttgaaggggtcttacacgcggctatataacctatcacacactatggtcagagttaccgaaactggaccatctacaactcgttacctcgtctactcaatctgaggtgacgaacccatttatgcctaaatatcagaggtcatttgattctatttgaactggatccgtatccatgcgacaaaactctctagctctgcgctaagtcagcactcgcacaatgacaaccctcgtacctcctcaaaccatcaaggcgatcgtaataacggggagaggtaaagccgggattcgctcagtgcctatcccgcaggtccccgagggctatgtcctggtcaaggttcgtgccgtcggggtgaatcctacagattggaaggtcgtcgatgtccctccttctggcaagaccaagataggcacgcgcgtcggctgcgattttgcaggtgtcgtcgtggagcttggtgctggcgttacgaattatgtggtaggggaccgcattgctgggtttgcgcatggcagcaatgtctcgtcaccaagtaccggtagctttgccgaatacatcattagcaaggcgaccggagcgcagatgaagattcccgacaacataaccgatgaacaagcagcgacgctcggcgtatcaatcacaaccgtaggtcaaggtctctataaatcatcactcggactacccctgccatcacttagccacggcagaatctccgatggtaacaagtcacctttcttgtttatatcaggcggtagcacagctacaggtatctatgggattcaattcgccaaattgtccggatacacagtcgtggctacggcgtcgccggcgaatttcgaatacctaaagtcgctcggcgctgatgccgtcttcgactatcgctcacctaccgcggctattgacattcgtagtttcacagaggacaacttaacacttgcttgggactgcataggccaggatagtatagagctatgcgtaaatgctatgagtagcagcaacaccgcagaactcaagattggaacagtcgcaacggtggacacggcggcgctaaggtccattgccccaagactgaccgacagcggccccgaactcacgataggatttgatgtatttggagaaccatacgcgtggtatggtgtcactcgggtcccgaaggcggacgaggttgagtttgcgagtatgttctggtcgttgacccgggagctactcgctgacggcgctctgaagcccattaggatagaagtaaaccgtggtggcagggtcgggctggaaggcgtgctggaggggctggatattctaaagagaggggaggtcagtgctcagaaactggtctacactatattttgacgctctgcgttgtattccttgcgaactgtgactaggatacggacgggatatgctaaactctacttcttaccgaagtttttcaacaggtagaacggaaatggggtcgtgttaccttacctttcttttctttatgcttttgtttattgatcattggtagaagagagggcccggtcataattgtcattgtgagattatttctgccaggttatggtctcgtgttcctgatgccaacagtcattgaggcgtctacactcccctctcaacgagctggaccattaaaggccctctatcgtacataaaccaaactttctggcgatcaatccagcgattccactcacgtatctgcaccggattctttgtcacacacggcggtctggcgaggtc

SEQ ID NO: 19851 - DNA, 432 bp, Muscodor strobelii
  misc_feature: SGI cDNA ID NO. 566685
  misc_feature: Reduced expression when VOC is produced
  misc_feature: Encodes the peptide sequence at SEQ ID NO 19852
atgcctcgcttcaccgtcgctgagccgcatccaaccgtcaagcagaacacatacacacattccggtcgtggcggcgccggcaactacttccgcgcacccgcaaccacaccatccagcggcgtcgcaacggagaccaaggtgctaccgcccgctacatcaaacttccactccggccggggcggcgctggaaacgcacatgtctctaccgagcgcccagtgatgtcgttcgatgacgagtacaagcgccagagccagctcgccgccaagcgcgtcggtcatgttggacgtggtggcgccggaaacatctacgatgccgctgcacccacagtcgtctcacgcaagggcagtgacgccgcaagtgcctccagctcagactcctcgcgatctggccgtttcctcgaccgcgtcagctctgccttcagcaagcactaa

SEQ ID NO: 19852 - protein, 143 aa, Muscodor strobelii
  misc_feature: SGI Peptide ID NO. 566685
  misc_feature (1)..(138): NCBI GI: 171694279 Blast Desc: protein product [Podospora anserina] gi|170947088|emb|CAP73893.1| protein product [Podospora anserina]
  misc_feature (2)..(103): NCBI GI: 85101938 Blast Desc: NCU04249 [Neurospora crassa OR74A] gi|16944610|emb|CAD11379.1| [Neurospora crassa] gi|28922782|gb|EAA32004.1| NCU04249 [Neurospora crassa OR74A]
  misc_feature (1)..(106): NCBI GI: 116197873 Blast Desc: CHGG_07092 [Chaetomium globosum CBS 148.51] gi|88178371|gb|EAQ85839.1| CHGG_07092 [Chaetomium globosum CBS 148.51]
  misc_feature (3)..(138): NCBI GI: 154316757 Blast Desc: BC1G_03796 [Botryotinia fuckeliana B05.10] gi|150845408|gb|EDN20601.1| BC1G_03796 [Botryotinia fuckeliana B05.10]
  misc_feature (3)..(138): NCBI GI: 156043559 Blast Desc: SS1G_10783 [Sclerotinia sclerotiorum 1980] gi|154695170|gb|EDN94908.1| SS1G_10783 [Sclerotinia sclerotiorum 1980]
  misc_feature (1)..(123): NCBI GI: 39961609 Blast Desc: MGG_09546 [Magnaporthe grisea 70-15] gi|145011049|gb|EDJ95705.1| MGG_09546 [Magnaporthe grisea 70-15]
  misc_feature (1)..(108): NCBI GI: 169605263 Blast Desc: SNOG_05654 [Phaeosphaeria nodorum SN15] gi|111065598|gb|EAT86718.1| SNOG_05654 [Phaeosphaeria nodorum SN15]
  misc_feature (1)..(108): NCBI GI: 189193071 Blast Desc: conserved [Pyrenophora tritici-repentis Pt-1C-BFP] gi|187978438|gb|EDU45064.1| conserved [Pyrenophora tritici-repentis Pt-1C-BFP]
  misc_feature (4)..(114): NCBI GI: 70993292 Blast Desc: conserved [Aspergillus fumigatus Af293] gi|66849127|gb|EAL89455.1| conserved [Aspergillus fumigatus Af293] gi|159125573|gb|EDP50690.1| conserved [Aspergillus A1163]
  misc_feature (4)..(131): NCBI GI: 67522991 Blast Desc: AN1952.2 [Aspergillus nidulans FGSC A4] gi|40745961|gb|EAA65117.1| AN1952.2 [Aspergillus nidulans FGSC A4] gi|259487311|tpe|CBF85885.1| TPA: conserved [Aspergillus FGSC
  misc_feature: Useful for introducing or modulating the production of volatile compounds
MPRFTVAEPHPTVKQNTYTHSGRGGAGNYFRAPATTPSSGVATETKVLPPATSNFHSGRGGAGNAHVSTERPVMSFDDEYKRQSQLAAKRVGHVGRGGAGNIYDAAAPTVVSRKGSDAASASSSDSSRSGRFLDRVSSAFSKH

SEQ ID NO: 19853 - DNA, 1143 bp, Muscodor strobelii
  misc_feature: SGI cDNA ID NO. 566686
  misc_feature: Encodes the peptide sequence at SEQ ID NO 19854
atgacggactccctgcacaacgccccaatcgtccttgacaacggctctggcaccatccgagctggtttcgctggcgatgatctgcccaagtgctactttccttcgtttgttggccgtccaaagcatctacgagttctcgccggtgccttagaaggcgaagtctttatcggccagaaagcagcgactgaactgagaggactcctcaaaatccgttatccattagagcatggcattgttactgactgggacgacatggagaagatatgggagtatgtgtatagcgaaggattaaagaccatgagcgaagaacacccggtacttctgaccgagccacccttaaatcctcgcgcaaaccgtgataccgccgcccagatcttgttcgagacattcaatgcacctgccctttacacatccatccaagctgtgttatcgttatacgcgagcggtcgaaccacgggctgtgtcatggacgccggtgatggagtctctcatgccgtgcccgtatacgaaggctttgccattcctagttcgatacagcgaatcgacgttgccggtcgagatgtcaccgagtacatgcagacgctgctccgtaagagcggttatatctttcatacgagtgccgagaaagaggtggtccgcctgataaaagagtccgtctcctacgttgcgctgaacccaaagcaagaggagaaggactgggcaagcacaaaggccgatcagagcaagatggccgagtatatactgcccgatggcaacagactacgtgtaggacaggagcgtttccgcgcccctgagatcctatttgaccctgaaatcatcggcctcgaatacccgggtatccatcagatcgtgaccgatgcaattaatcgaactgatctcgacctgcgcaagtcgctctacgccaacattgtgctctcgggtggaagcacacttacaaagggctttggtgatcggttgctgagcgaggtgaagaagcttgcggttaaggacatgcgtatcaagatcttcgcaccgccggagcggaaatactcgacctggatcggtggcagcattcttgcaggactcagcacatttagaaagatgtgggtcagcatcgatgactggcatgaggaccctgatatcatccacaagaaactgacataa

SEQ ID NO: 19854 - protein, 380 aa, Muscodor strobelii
  misc_feature: SGI Peptide ID NO. 566686
  misc_feature (4)..(380): Pfam Id: PF00022 Pfam Desc: Actin
  misc_feature (1)..(380): NCBI GI: 256720916 Blast Desc: Actin-related protein, ARP1 class [Nectria haematococca mpVI 77-13-4]
  misc_feature (1)..(380): NCBI GI: 85101929 Blast Desc: actin-2 [Neurospora crassa OR74A] gi|728797|sp|P38673.1|ACTZ_NEUCR RecName: Full=Actin-like protein; AltName: Full=Centractin gi|473492|gb|AAA64907.1| (ro-4)
  misc_feature (1)..(380): NCBI GI: 46137739 Blast Desc: ACTZ_NEUCR Actin-like protein (Centractin) [Gibberella zeae PH-1]
  misc_feature (1)..(379): NCBI GI: 171694277 Blast Desc: protein product [Podospora anserina] gi|170947087|emb|CAP73892.1| protein product [Podospora anserina]
  misc_feature (1)..(380): NCBI GI: 156059720 Blast Desc: actin-like protein [Sclerotinia sclerotiorum 1980] gi|154701659|gb|EDO01398.1| actin-like protein [Sclerotinia sclerotiorum 1980]
  misc_feature (1)..(380): NCBI GI: 154315814 Blast Desc: BC1G_04479 [Botryotinia fuckeliana B05.10] gi|150846875|gb|EDN22068.1| BC1G_04479 [Botryotinia fuckeliana B05.10]
  misc_feature (1)..(380): NCBI GI: 145602650 Blast Desc: MGG_09547 [Magnaporthe grisea 70-15] gi|145011050|gb|EDJ95706.1| MGG_09547 [Magnaporthe grisea 70-15]
  misc_feature (4)..(380): NCBI GI: 119192350 Blast Desc: actin-like protein (Centractin) [Coccidioides immitis RS] gi|240106120|gb|EER24313.1| Actin-related protein, [Coccidioides posadasii C735 delta SOWgp]
  misc_feature (4)..(380): NCBI GI: 238838494 Blast Desc: alpha-centractin [Microsporum canis CBS 113480]
  misc_feature (4)..(380): NCBI GI: 226280988 Blast Desc: alpha-centractin [Paracoccidioides brasiliensis Pb01]
MTDSLHNAPIVLDNGSGTIRAGFAGDDLPKCYFPSFVGRPKHLRVLAGALEGEVFIGQKAATELRGLLKIRYPLEHGIVTDWDDMEKIWEYVYSEGLKTMSEEHPVLLTEPPLNPRANRDTAAQILFETFNAPALYTSIQAVLSLYASGRTTGCVMDAGDGVSHAVPVYEGFAIPSSIQRIDVAGRDVTEYMQTLLRKSGYIFHTSAEKEVVRLIKESVSYVALNPKQEEKDWASTKADQSKMAEYILPDGNRLRVGQERFRAPEILFDPEIIGLEYPGIHQIVTDAINRTDLDLRKSLYANIVLSGGSTLTKGFGDRLLSEVKKLAVKDMRIKIFAPPERKYSTWIGGSILAGLSTFRKMWVSIDDWHEDPDIIHKKLT

SEQ ID NO: 19855 - DNA, 3785 bp, Muscodor strobelii
  misc_feature: SGI EST ID NO. CUFF.46497.0
  misc_feature: Variant of the nucleotide sequence at SEQ ID NO 19853
gaattttgcccgttcgacgtcctccctgtgcgtgcaaagccgcccaaaacgctcgctaccttgcgtcttcttgttctaatcttgagccacgaaaccgcagtcagagatcactagcttggaacattattagccaaattcaataacgacaacacaaacgtttacgtgacgacacgagccaacaaacgaacgcgcattcgacgatcctcggcctcttttcttctcttctattcagactttgtattgctaccggagactcgatacgcttcgtgaactgctcgatccacaggatcgacagggagagctgtagtggacgagccgctaagcatcgcctaccatgacggactccctgcacaacgccccaatcgtccttgacaacggctctggcaccatccgagctggtttcgctggcgatgatctgcccaagtgctactttccttcgtttgttggccgtccaaagcatctacgagttctcgccggtgccttagaaggcgaagtctttatcggccagaaagcagcgactgaactgagaggactcctcaaaatccgttatccattagagcatggcattgttactgactgggacgacatggagaagatatgggagtatgtgtatagcgaaggattaaagaccatgagcgaagaacacccggtacttctgaccgagccacccttaaatcctcgcgcaaaccgtgataccgccgcccagatcttgttcgagacattcaatgcacctgccctttacacatccatccaagctgtgttatcgttatacgcgagcggtcgaaccacgggctgtgtcatggacgccggtgatggagtctctcatgccgtgcccgtatacgaaggctttgccattcctagttcgatacagcgaatcgacgttgccggtcgagatgtcaccgagtacatgcagacgctgctccgtaagagcggttatatctttcatacgagtgccgagaaagaggtggtccgcctgataaaagagtccgtctcctacgttgcgctgaacccaaagcaagaggagaaggactgggcaagcacaaaggccgatcagagcaagatggccgagtatatactgcccgatggcaacagactacgtgtaggacaggagcgtttccgcgcccctgagatcctatttgaccctgaaatcatcggcctcgaatacccgggtatccatcagatcgtgaccgatgcaattaatcgaactgatctcgacctgcgcaagtcgctctacgccaacattgtgctctcgggtggaagcacacttacaaagggctttggtgatcggttgctgagcgaggtgaagaagcttgcggttaaggacatgcgtatcaagatcttcgcaccgccggagcggaaatactcgacctggatcggtggcagcattcttgcaggactcagcacatttagaaagatgtgggtcagcatcgatgactggcatgaggaccctgatatcatccacaagaaactgacataaaagaaattctgataatttctccaaatgcaaatgagagaaaacgccttgcatcatgcgtgttcaaaggcagaaaatgcaacaaggcatacttagcacttgtaccttaacatttggcaggtatgaaccattaagctatgccgggtttcagataagaaggtggcgtcagctttacagcaaagcatcaaaatgcattgaatcatcaatagcttgcaaacatcaaccagagccagtattttgatacccacgattggttgcacgctactttgcttccgtctgtcgaaacggggagttaagagcgggatagcaaagacggcagtctagagggggcgaaggagttgtgtctatgatagtgatcatcttatgtagatgaatgatacccaattgttgactgatcatgaaatacacaacgaagtgacaactgccacgtgttgtaattacagtgtgttctataacacgagatgcgtgcgaaatgcatgcgcgtccaaccctcttctcgtatacaatcggtggttacacagtacaggcaatagttgaaatacaattgagattatataattcgcatcttagcgacgtgttgagatagaaactcaataagcaggaaggagcgagtgggataaagcgcaagtcaatgaattcactgaatggtagtggcatatattatggtaaaagacgatgatatgaacttgcaaaaatttccaattcttgagctctaggctatggagagaagagggtatatgggattcgtctaataatccatccgaccatccatccaagcccgccatcaaaccattatatttctcgatgtctttccgtcccggagtctgccagccgggtacaacgctatttacgttgcgggggtatatttgaaagaattcccatcgaaaaacgctcgctcgctcatgcatccgtaaccattggaaaagagaagatagagaaaactttttatcgcctttcgttcgtcgttcatacatagtctttgggactgttaagcaagtatcgtgatccttccgttgcgccgtgctttgagttttttgtgtgtaatgagtaaggtagcgttgtaatgttggttcacagaaagtttttagtgcttgctgaaggcagagctgacgcggtcgaggaaacggccagatcgcgaggagtctgagctggaggcacttgcggcgtcactgcccttgcgtgagacgactgtgggtgcagcggcatcgtagatgtttccggcgccaccacgtccaacatgaccgacgcgcttggcggcgagctggctctggcgcttgtactcgtcatcgaacgacatcactgggcgctcggtagagacatgtgcgtttccagcgccgccccggccggagtggaagtttgatgtagcgggcggtagcaccttggtctccgttgcgacgccgctggatggtgtggttgcgggtgcgcggaagtagttgccggcgccgccacgaccggaatgtgtgtatgtgttctgcttgacggttggatgcggctcagcgacggtgaagcgaggcatggctttgtttggagtgattatactgttttcacccttatgtaattctggatatgaaaacagagtacagcccttgctgtctggtgtagtcgttatatgtatgtcgtgatggtagtggcgtttcaacgatgaatcgttttcgtgtgtatgagtctttctttgtacttacagaacgaaacctacagatccggggggtggtggaaagggcttaatatatctcatcgtgaaggcaaggaaactctttgtcaaggttcaagcccctatgtgctattacgcgagacgttccaaaagaacggacatcgcagcaagccgagccacttgaccagcagagcaacgtgtcacaggaagaaatttgcaattgggtaataagttgtaaaaattgtatgatcgcgagacactacgagggcggaacagcgaatggcgagaccgaatcacgccccgtttcaggctttctggtgtcatcgagcacgtcgactggaaagctgggcgcaaaaaattgcaaaggcttggcgttatggcgaaaagcgcttagcagttaacggcagtgcagtggaatctggggtagccgcgtgatgcaagagactggtaaaattttagctaaactggagttgtcgttacgaaatcggttgtcgaaaagaggatcatgagactccgggaggagttttccatgaataattattaccccatagtttggatcccctggctagcgaccgagctgggcgattgatgaatcaaggctgaacgatgaacaggggtgtcctaggggagactaacggctggccccattgctgtaaattg

SEQ ID NO: 19856 - DNA, 1560 bp, Muscodor strobelii
  misc_feature: SGI cDNA ID NO. 566687
  misc_feature: Encodes the peptide sequence at SEQ ID NO 19857
atgacgtggggaattctggaagataagcacatgggccatgtgcccggcacaattatcctggccgaccaaaacgacgttccaagcgaatatcaatccatccccagagaattacttaaacatggtcacgggcgaaataaacatgtcattttggcaccccagcccagtgattctcccaacgatccgctgaactggccgacatggcgcaaagatctgattctcaccattgtcggtttgtcagcggcagtagttggcgcatacggtcccatgctgtcgcctggctttgtcgtaatcgcagcagatttgaatatcaccgtcaataccttgtctcaggcgacggcctgggttatcctcctcatcggtttatcgttattcatattcaatccaatggcgaagaagattgggcggcgtccggtatatgttatctccagtataatcatgctaagtggaagtatctggggctctctatctaagaactatgggagtttcttagcgtcacggatctatagtggtgtcggcatggctccgtatgaagttctcgtccagtgcactatcgctgatatgtacttcgatcaaggatggaaatggacattcaactggacgtcgatacttttcggagcgctcctgccccttgttgtattgtttgtcccggaaacagcctatcgaaggcaatcttacgaagaacgcctccgagtagcggccaacatgggaaacaataaagatgaggcactagataaaagcgagaagactgcagaacacagtgatgatccatcgccgatatcagagactggggtgcagacagagccgaaagagtcattcgctcagtctataaggctctatagcggtgtctacacgccaacgcctctgtggaaaatatttctgcgccctgtggtgattttctggtatcccgcagtattgtgggcgtttctactgtacggtgcaacgttgacgtggattgttgtcttcagcgtcgtgaacgcggtcatcttcacggctccaccgtacaacttttcggtctcacaaacaggtctcatctcgctatcgccattcatcttaaccttgatagctgaaataatttcgggtccgttgaatgactgggtttgtgtctatctggccaagaagaaccacggcatctacgagcctgagttccgtctgccacccatcattgtctctttcatcatcggaattgtaggcttcttcggattcggggctaccatacactacgagacacactggagtggaccggtgctatgcttcgggttagctaatatgagcctggcgttcgcgaatgcaagtgtgtttggctatgtgatagatgcgcacaaggaactggctgaagaagccttcgtcgctatcaacgcccgcaatttactgacgttcggattgacgtacttcgtcaacgactggctcgcccgcgacggtgtactggcagtatttaatgtgctgggcagtatcttcgtcgcggtcaacgtgttgacgattccattatggatctttggtaagagattcaggggatatatagcccgaaaccagaagctgcacaggttcatgcatgaggactga

SEQ ID NO: 19857 - protein, 519 aa, Muscodor strobelii
  misc_feature: SGI Peptide ID NO. 566687
  misc_feature (76)..(463): Pfam Id: PF07690 Pfam Desc: Major Facilitator Superfamily
  misc_feature (192)..(463): Pfam Id: PF07690 Pfam Desc: Major Facilitator Superfamily
  misc_feature (76)..(189): Pfam Id: PF07690 Pfam Desc: Major Facilitator Superfamily
  misc_feature (1)..(519): NCBI GI: 116205878 Blast Desc: CHGG_02232 [Chaetomium globosum CBS 148.51] gi|88182829|gb|EAQ90297.1| CHGG_02232 [Chaetomium globosum CBS 148.51]
  misc_feature (1)..(519): NCBI GI: 242796418 Blast Desc: cycloheximide resistance protein, [Talaromyces stipitatus ATCC 10500] gi|218719383|gb|EED18803.1| cycloheximide resistance protein, [Talaromyces stipitatus ATCC 10500]
  misc_feature (1)..(519): NCBI GI: 212536662 Blast Desc: cycloheximide resistance protein, [Penicillium marneffei ATCC 18224] gi|210070886|gb|EEA24976.1| cycloheximide resistance protein, [Penicillium marneffei ATCC 18224]
  misc_feature (1)..(519): NCBI GI: 171678131 Blast Desc: protein product [Podospora anserina] gi|170937135|emb|CAP61792.1| protein product [Podospora anserina]
  misc_feature (1)..(518): NCBI GI: 115442636 Blast Desc: conserved [Aspergillus terreus NIH2624] gi|114187994|gb|EAU29694.1| conserved [Aspergillus terreus NIH2624]
  misc_feature (78)..(519): NCBI GI: 145608420 Blast Desc: MGG_03124 [Magnaporthe grisea 70-15] gi|145015901|gb|EDK00391.1| MGG_03124 [Magnaporthe grisea 70-15]
  misc_feature (52)..(519): NCBI GI: 238500485 Blast Desc: conserved [Aspergillus flavus NRRL3357] gi|220693230|gb|EED49576.1| conserved [Aspergillus flavus NRRL3357]
  misc_feature (52)..(519): NCBI GI: 169779799 Blast Desc: [Aspergillus oryzae RIB40] gi|83773103|dbj|BAE63231.1| protein product [Aspergillus oryzae]
  misc_feature (1)..(517): NCBI GI: 212539185 Blast Desc: conserved [Penicillium marneffei ATCC 18224] gi|210069490|gb|EEA23581.1| conserved [Penicillium marneffei ATCC 18224]
  misc_feature (1)..(518): NCBI GI: 169612181 Blast Desc: SNOG_09209 [Phaeosphaeria nodorum SN15] gi|111062281|gb|EAT83401.1| SNOG_09209 [Phaeosphaeria nodorum SN15]
MTWGILEDKHMGHVPGTIILADQNDVPSEYQSIPRELLKHGHGRNKHVILAPQPSDSPNDPLNWPTWRKDLILTIVGLSAAVVGAYGPMLSPGFVVIAADLNITVNTLSQATAWVILLIGLSLFIFNPMAKKIGRRPVYVISSIIMLSGSIWGSLSKNYGSFLASRIYSGVGMAPYEVLVQCTIADMYFDQGWKWTFNWTSILFGALLPLVVLFVPETAYRRQSYEERLRVAANMGNNKDEALDKSEKTAEHSDDPSPISETGVQTEPKESFAQSIRLYSGVYTPTPLWKIFLRPVVIFWYPAVLWAFLLYGATLTWIVVFSVVNAVIFTAPPYNFSVSQTGLISLSPFILTLIAEIISGPLNDWVCVYLAKKNHGIYEPEFRLPPIIVSFIIGIVGFFGFGATIHYETHWSGPVLCFGLANMSLAFANASVFGYVIDAHKELAEEAFVAINARNLLTFGLTYFVNDWLARDGVLAVFNVLGSIFVAVNVLTIPLWIFGKRFRGYIARNQKLHRFMHED

SEQ ID NO: 19858 - DNA, 892 bp, Muscodor strobelii
  misc_feature: SGI EST ID NO. CUFF.46500.0
  misc_feature: Variant of the nucleotide sequence at SEQ ID NO 19856
ctgcgccctgtggtgattttctggtatcccgcagtattgtgggcgtttctactgtacggtgcaacgttgacgtggattgttgtcttcagcgtcgtgaacgcggtcatcttcacggctccaccgtacaacttttcggtctcacaaacaggtctcatctcgctatcgccattcatcttaaccttgatagctgaaataatttcgggtccgttgaatgactgggtttgtgtctatctggccaagaagaaccacggcatctacgagcctgagttccgtctgccacccatcattgtctctttcatcatcggaattgtaggcttcttcggattcggggctaccatacactacgagacacactggagtggaccggtgctatgcttcgggttagctaatatgagcctggcgttcgcgaatgcaagtgtgtttggctatgtgatagatgcgcacaaggaactggctgaagaagccttcgtcgctatcaacgcccgcaatttactgacgttcggattgacgtacttcgtcaacgactggctcgcccgcgacggtgtactggcagtatttaatgtgctgggcagtatcttcgtcgcggtcaacgtgttgacgattccattatggatctttggtaagagattcaggggatatatagcccgaaaccagaagctgcacaggttcatgcatgaggactgagtcaataccgtgaagcgtgtcttacagcgtatcggctatgtcagaaagttggtaacggaaagagagtcttggacatgattgcagagagagggaaaccgcagcgttgtataggtacacagccacaatcgaggatatctcaattataaaattttccctatgtttcgaattggccatattgccattggtcaggcacatgttttgatgatcg

SEQ ID NO: 19859 - DNA, 1548 bp, Muscodor strobelii
  misc_feature: SGI cDNA ID NO. 566688
  misc_feature: Encodes the peptide sequence at SEQ ID NO 19860
atgacgtggggaattctggaagataagcacatgggccatgtgcccggcacaattatcctggccgaccaaaacgacgttccaagcgaatatcaatccatccccagagaattacttaaacatggtcacgggcgaaataaacatgtcattttggcaccccagcccagtgattctcccaacgatccgctgaacgtagcggcagtagttggcgcatacggtcccatgctgtcgcctggctttgtcgtaatcgcagcagatttgaatatcaccgtcaataccttgtctcaggcgacggcctgggttatcctcctcatcggtttatcgttattcatattcaatccaatggcgaagaagattgggcggcgtccggtatatgttatctccagtataatcatgctaagtggaagtatctggggctctctatctaagaactatgggagtttcttagcgtcacggatctatagtggtgtcggcatggctccgtatgaagttctcgtccagtgcactatcgctgatatgtacttcgatcaaggatggaaatggacattcaactggacgtcgatacttttcggagcgctcctgccccttgttgtattgtttgtcccggaaacagcctatcgaaggcaatcttacgaagaacgcctccgagtagcggccaacatgggaaacaataaagatgaggcactagataaaagcgagaagactgcagaacacagtgatgatccatcgccgatatcagagactggggtgcagacagagccgaaagagtcattcgctcagtctataaggctctatagcggtgtctacacgccaacgcctctgtggaaaatatttctgcgccctgtggtgattttctggtatcccgcagtattgtgggcgtttctactgtacggtgcaacgttgacgtggattgttgtcttcagcgtcgtgaacgcggtcatcttcacggctccaccgtacaacttttcggtctcacaaacaggtctcatctcgctatcgccattcatcttaaccttgatagctgaaataatttcgggtccgttgaatgactgggtttgtgtctatctggccaagaagaaccacggcatctacgagcctgagttccgtctgccacccatcattgtctctttcatcatcggaattgtaggcttcttcggattcggggctaccatacactacgagacacactgtagattggtcgctaacctcgactgcattatagggagtggaccggtgctatgcttcgggttagctaatatgagcctggcgttcgcgaatgcaagtgtgtttggctatgtgatagatgcgcacaaggaactggctgaagaagccttcgtcgctatcaacgcccgcaatttactgacgttcggattgacgtacttcgtcaacgactggctcgcccgcgacggtgtactggcagtatttaatgtgctgggcagtatcttcgtcgcggtcaacgtgttgacgattccattatggatctttggtaagagattcaggggatatatagcccgaaaccagaagctgcacaggttcatgcatgaggactga

SEQ ID NO: 19860 - protein, 515 aa, Muscodor strobelii
  misc_feature: SGI Peptide ID NO. 566688
  misc_feature (62)..(459): Pfam Id: PF07690 Pfam Desc: Major Facilitator Superfamily
  misc_feature (177)..(459): Pfam Id: PF07690 Pfam Desc: Major Facilitator Superfamily
  misc_feature (74)..(174): Pfam Id: PF07690 Pfam Desc: Major Facilitator Superfamily
  misc_feature (1)..(515): NCBI GI: 116205878 Blast Desc: CHGG_02232 [Chaetomium globosum CBS 148.51] gi|88182829|gb|EAQ90297.1| CHGG_02232 [Chaetomium globosum CBS 148.51]
  misc_feature (1)..(515): NCBI GI: 242796418 Blast Desc: cycloheximide resistance protein, [Talaromyces stipitatus ATCC 10500] gi|218719383|gb|EED18803.1| cycloheximide resistance protein, [Talaromyces stipitatus ATCC 10500]
  misc_feature (1)..(515): NCBI GI: 212536662 Blast Desc: cycloheximide resistance protein, [Penicillium marneffei ATCC 18224] gi|210070886|gb|EEA24976.1| cycloheximide resistance protein, [Penicillium marneffei ATCC 18224]
  misc_feature (1)..(515): NCBI GI: 171678131 Blast Desc: protein product [Podospora anserina] gi|170937135|emb|CAP61792.1| protein product [Podospora anserina]
  misc_feature (1)..(514): NCBI GI: 115442636 Blast Desc: conserved [Aspergillus terreus NIH2624] gi|114187994|gb|EAU29694.1| conserved [Aspergillus terreus NIH2624]
  misc_feature (65)..(515): NCBI GI: 145608420 Blast Desc: MGG_03124 [Magnaporthe grisea 70-15] gi|145015901|gb|EDK00391.1| MGG_03124 [Magnaporthe grisea 70-15]
  misc_feature (52)..(515): NCBI GI: 238500485 Blast Desc: conserved [Aspergillus flavus NRRL3357] gi|220693230|gb|EED49576.1| conserved [Aspergillus flavus NRRL3357]
  misc_feature (64)..(515): NCBI GI: 169779799 Blast Desc: [Aspergillus oryzae RIB40] gi|83773103|dbj|BAE63231.1| protein product [Aspergillus oryzae]
  misc_feature (1)..(513): NCBI GI: 212539185 Blast Desc: conserved [Penicillium marneffei ATCC 18224] gi|210069490|gb|EEA23581.1| conserved [Penicillium marneffei ATCC 18224]
  misc_feature (1)..(514): NCBI GI: 169612181 Blast Desc: SNOG_09209 [Phaeosphaeria nodorum SN15] gi|111062281|gb|EAT83401.1| SNOG_09209 [Phaeosphaeria nodorum SN15]
MTWGILEDKHMGHVPGTIILADQNDVPSEYQSIPRELLKHGHGRNKHVILAPQPSDSPNDPLNVAAVVGAYGPMLSPGFVVIAADLNITVNTLSQATAWVILLIGLSLFIFNPMAKKIGRRPVYVISSIIMLSGSIWGSLSKNYGSFLASRIYSGVGMAPYEVLVQCTIADMYFDQGWKWTFNWTSILFGALLPLVVLFVPETAYRRQSYEERLRVAANMGNNKDEALDKSEKTAEHSDDPSPISETGVQTEPKESFAQSIRLYSGVYTPTPLWKIFLRPVVIFWYPAVLWAFLLYGATLTWIVVFSVVNAVIFTAPPYNFSVSQTGLISLSPFILTLIAEIISGPLNDWVCVYLAKKNHGIYEPEFRLPPIIVSFIIGIVGFFGFGATIHYETHCRLVANLDCIIGSGPVLCFGLANMSLAFANASVFGYVIDAHKELAEEAFVAINARNLLTFGLTYFVNDWLARDGVLAVFNVLGSIFVAVNVLTIPLWIFGKRFRGYIARNQKLHRFMHED

SEQ ID NO: 19861 - DNA, 892 bp, Muscodor strobelii; identical to SEQ ID NO: 19858
  misc_feature: SGI EST ID NO. CUFF.46500.0
  misc_feature: Variant of the nucleotide sequence at SEQ ID NO 19859

SEQ ID NO: 19862 - DNA, 1428 bp, Muscodor strobelii
  misc_feature: SGI cDNA ID NO. 566689
  misc_feature: Encodes the peptide sequence at SEQ ID NO 19863
atgactacatcagaagcgctatcatcaagcggcctccgcgtcatagtagtgggcgccggttttgcaggcctcacagcagctattgagtgccatcgcaagggacacagcgtaatcttactcgagaaattccccgagctcaagcttctaggcgatataatcagtttcgccccaaatagctcgcggatctttgatcgatggccgggtgtcgcggacaaactcgagcttatcagtcatcgagcagatggactcacaatcaacaattggcttggcgagttcatcctcaaacagacatggtccaaagaagaaaatgacttcggaattagatacgatgggcatcgtggcgagattcatgagattgtttataaccatgccttggagatcggagtcgatgtcaggcttggtgcgagagtcgaggattattttgagaatgatgaagaggcgggtgttatccttgagagtggcgagaagataacggcgaatgtcgtgtttgctgctgaaggcgtgcgcagtaagggaagaaagattgttctgggatatgaggataagcctaaggcatctggatacgccgtgtacaggacttggttcgatgcagatgagatcgcgaaagatccagacctacaattcctgacaaactacggcgataagcatgtcgcttggctgggaccagatgttcactttatcgcagcatctgtgaagaacggcaaggatttctcatgggtctgcacacataaggatgacgaggatatcaaagaaagctggtcactagaagcaccgctatcagacgcacgaaaggttctagaaggctgggacccaatcgtgcagaaaatcctcgatcacacaccatcaccactcatagactggaagctggtgtatcgcgaccccttaccaacatggatatcgcccaagcggcgcatagcgctaatcggggattctgctcacacattcctcccaacctcaatccagggcgcatctcaatcaatggaagacggcgcaacactcgccgtgtgtctctccagagctcaagccactgcaccgacaggcgacggtgtaccggaagccgtcgcaacattcgaagcaatccgttaccagcgcgtccgctcggcgcagaaaactggtgaacagacaagggatatctggcataaagcagatttctcagaggcgaagaaaaacccacagactatgcgtttgagaagagaggcttggttgctagactttgatgctgagatgtatgctaaggagcactatgaagctacggctaaagtgttgagagacaatcctgatgggggagtttttggaagtacggagtgtgcgagggggctacatgcgccggaagggaaggaagggtatcttgagtataacgatactgtgaagaagggtgagacattggagaatggagcgttgtatctagatgatgtaaacaaggtgtag

SEQ ID NO: 19863 - protein, 475 aa, Muscodor strobelii
  misc_feature: SGI Peptide ID NO. 566689
  misc_feature (13)..(292): Pfam Id: PF01266 Pfam Desc: FAD dependent oxidoreductase
  misc_feature (11)..(375): Pfam Id: PF01494 Pfam Desc: FAD binding domain
  misc_feature (13)..(42): Pfam Id: PF01266 Pfam Desc: FAD dependent oxidoreductase
  misc_feature (13)..(42): Pfam Id: PF00890 Pfam Desc: FAD binding domain
  misc_feature (13)..(41): Pfam Id: PF01134 Pfam Desc: Glucose inhibited division protein A
  misc_feature (12)..(42): Pfam Id: PF03486 Pfam Desc: HI0933-like protein
  misc_feature (13)..(42): Pfam Id: PF07992 Pfam Desc: Pyridine nucleotide-disulphide oxidoreductase
  misc_feature (10)..(423): NCBI GI: 242796415 Blast Desc: monoxygenase, [Talaromyces stipitatus ATCC 10500] gi|218719382|gb|EED18802.1| monoxygenase, [Talaromyces stipitatus ATCC 10500]
  misc_feature (1)..(427): NCBI GI: 212536660 Blast Desc: monoxygenase, [Penicillium marneffei ATCC 18224] gi|210070885|gb|EEA24975.1| monoxygenase, [Penicillium marneffei ATCC 18224]
  misc_feature (1)..(423): NCBI GI: 189207398 Blast Desc: monoxygenase [Pyrenophora tritici-repentis Pt-1C-BFP] gi|187976126|gb|EDU42752.1| monoxygenase [Pyrenophora tritici-repentis Pt-1C-BFP]
  misc_feature (1)..(420): NCBI GI: 212532731 Blast Desc: MAK1-like monooxygenase, [Penicillium marneffei ATCC 18224] gi|210071886|gb|EEA25975.1| MAK1-like monooxygenase, [Penicillium marneffei ATCC 18224]
  misc_feature (1)..(423): NCBI GI: 169619189 Blast Desc: SNOG_12789 [Phaeosphaeria nodorum SN15] gi|111058469|gb|EAT79589.1| SNOG_12789 [Phaeosphaeria nodorum SN15]
  misc_feature (8)..(435): NCBI GI: 46115708 Blast Desc: FG03696.1 [Gibberella zeae PH-1]
  misc_feature (6)..(422): NCBI GI: 171682920 Blast Desc: protein product [Podospora anserina] gi|170941419|emb|CAP67070.1| protein product [Podospora anserina]
  misc_feature (1)..(420): NCBI GI: 242776268 Blast Desc: MAK1-like monooxygenase, [Talaromyces stipitatus ATCC 10500] gi|218722430|gb|EED21848.1| MAK1-like monooxygenase, [Talaromyces stipitatus ATCC 10500]
  misc_feature (8)..(416): NCBI GI: 171680066 Blast Desc: protein product [Podospora anserina] gi|170939659|emb|CAP64886.1| protein product [Podospora anserina]
  misc_feature (10)..(413): NCBI GI: 189207751 Blast Desc: monoxygenase [Pyrenophora tritici-repentis Pt-1C-BFP] gi|187976302|gb|EDU42928.1| monoxygenase [Pyrenophora tritici-repentis Pt-1C-BFP]
  misc_feature (14)..(390): SWISSPROT Homolog: EC 1.14.13.24 3-hydroxybenzoate 6-monooxygenase
MTTSEALSSSGLRVIVVGAGFAGLTAAIECHRKGHSVILLEKFPELKLLGDIISFAPNSSRIFDRWPGVADKLELISHRADGLTINNWLGEFILKQTWSKEENDFGIRYDGHRGEIHEIVYNHALEIGVDVRLGARVEDYFENDEEAGVILESGEKITANVVFAAEGVRSKGRKIVLGYEDKPKASGYAVYRTWFDADEIAKDPDLQFLTNYGDKHVAWLGPDVHFIAASVKNGKDFSWVCTHKDDEDIKESWSLEAPLSDARKVLEGWDPIVQKILDHTPSPLIDWKLVYRDPLPTWISPKRRIALIGDSAHTFLPTSIQGASQSMEDGATLAVCLSRAQATAPTGDGVPEAVATFEAIRYQRVRSAQKTGEQTRDIWHKADFSEAKKNPQTMRLRREAWLLDFDAEMYAKEHYEATAKVLRDNPDGGVFGSTECARGLHAPEGKEGYLEYNDTVKKGETLENGALYLDDVNKV

SEQ ID NO: 19864 - DNA, 246 bp, Muscodor strobelii
  misc_feature: SGI cDNA ID NO. 566690
  misc_feature: Reduced expression when VOC is produced
  misc_feature: Encodes the peptide sequence at SEQ ID NO 19865
atgtctccatcaaccctcaaggccgctcgtctagcatctagacaagctctttgggcacctctccgccaacaacgggcactctcatccacaccagccagattctcagctcgtacatctcatcagcgagcagattggggacgtatggcgaaggaaagagttggaaatcttgccatttacgtccctttcatgggaattgtcctcggctggccattaattgctaagtcaataatggacgggcggatgtaa

SEQ ID NO: 19865 - protein, 81 aa, Muscodor strobelii
  misc_feature: SGI Peptide ID NO. 566690
  misc_feature (1)..(81): NCBI GI: 261352148 Blast Desc: VDBG_00684 [Verticillium albo-atrum VaMs.102]
  misc_feature (33)..(81): NCBI GI: 85100995 Blast Desc: NCU04276 [Neurospora crassa OR74A] gi|12718428|emb|CAC28735.1| [Neurospora crassa] gi|28922604|gb|EAA31830.1| [Neurospora crassa OR74A]
  misc_feature (9)..(81): NCBI GI: 171694251 Blast Desc: protein product [Podospora anserina] gi|170947074|emb|CAP73879.1| protein product [Podospora anserina]
  misc_feature: Useful for introducing or modulating the production of volatile compounds
MSPSTLKAARLASRQALWAPLRQQRALSSTPARFSARTSHQRADWGRMAKERVGNLAIYVPFMGIVLGWPLIAKSIMDGRM

SEQ ID NO: 19866 - DNA, 1011 bp, Muscodor strobelii
  misc_feature: SGI EST ID NO. CUFF.46567.0
  misc_feature: Variant of the nucleotide sequence at SEQ ID NO 19864
agcagcttcaatgggataactcagcctgcaggagaaaattgaagaccatacgtacgaacaaacagctaggatggcgaagctaggtagactgatgagattggtataaagaggattcgcgcctggtgctaattgcaagatgtatttccatgcttacagctcatcaaaaaatccagacttcaagtcaggttataactctttcagtaaactctctactccatcgtctgtatataagcaagacatctcaactcgatcgaccatacatatagaagcgccactcaattcatcccatctccctctcagtcacatcatgtctccatcaaccctcaaggccgctcgtctagcatctagacaagctctttgggcacctctccgccaacaacgggcactctcatccacaccagccagattctcagctcgtacatctcatcagcgagcagattggggacgtatggcgaaggaaagagttggaaatcttgccatttacgtccctttcatgggaattgtcctcggctggccattaattgctaagtcaataatggacgggcggatgtaaatcaagtattcgacaacaacagtatgcgagaggagggccggatgcgcatgcatttcgtatgcatttcgagccaagggatgacacataataaatcaacaatttgacgatagacgacgacacattgtaatagtatgatactatatcatgactttttcttactctggcagtattatgccttccaatctgtatatatatctcgtgggcgggttggtccattctacatggcgctcaggggcttggatatacccaaaacaacgtagaacaaaattcatattctaatctaacaaatcttcctacaccttgtttacatcatctagatacaacgctccattctccaatgtctcacccttcttcacagtatcgttatactcaagatacccttccttcccttccggcgcatgtagccccctcgcacactccgtacttccaaaaactcccccatcaggattgtctctcaa

SEQ ID NO: 19867 - DNA, 1425 bp, Muscodor strobelii
  misc_feature: SGI cDNA ID NO. 566691
  misc_feature: Encodes the peptide sequence at SEQ ID NO 19868
atgagccgatccgctactggatcccctgtcattgggactcacgacggccgtttgattagtagcgccatggcccagagtcctatcgcagcagtgattgctccatctatgcaagcatcaaaagaagccactgaaagtctggccggtaggtccgataagcacgttcctctgagagatcctaaatcaaaagaccccgtcctaaggtctattgaagaatatactggctcgcatgcttcgtccattgctgcccaatccaaagaccgtcttgctagaactcagcgagctctatttgaagaccgcaacaatcctataccacagattatgtctacgcaaatgatgcaggcacgagacatggaaagaggacgcacattacccaatggtcctattctcccatcctccgctggcgctacagcgccaaatatactgctatcagaattgcatagaaagcaggatcaaggctcgcgacagcagcaaccaatcataggcgctacgaggaaagcctcggattatataaatagtgaaactgtgtcaattacatcccttacaaaagggggccctctgctaccgccacgttccaacggcttcacagatcacattcagcgtcagcagcctacaattggagaggcaatgaaacgtctcggccagagtaaaccaactgccgtgagaacctctcagaaagcaccacagccacaaatgatcaaatccgtgaatcagttacccatacaacggcagccgacaatacctgtaacagagaaaccgtctccccatgacgtgcctgttaatctactatttttgaaaaatggtatgaatggtataattactaccaacggtacctcgtcgtcgctgcgtcccggacaatggcggaagatgacgcccgaagcacgacgtcagtatcatgtatcacgacatgacccccaaaaattcgacgatgttatttacagcgagaataaccgaccttttcgcccgggcgatgctttgttcggcgtatctctcgatgatttgcattctctgcaacctagcaggcctaaacctcgtcccgcaaagtattgggcccaaataaatcctctagtgcattatacacaagagcgatccgaagcatggatgcggcagaagcagcgagaaatcagagatcggggaaataggaagactcgccttggcaagtacattgagcgaactgcaaagcggacgatggctgccggtgttcccgaattcgactatgatagcctacctcaacgagtcaaagacaatccgaagtgggttgaagcagctaagtttttcttcgaacaggaagaaaagctgaaatccatacgagccaaaaagttccaggaggaacaagctgctctacagggcaaaactagtgaaactgcaactgctacgagcaatggataccacaccgaagatatggacgttgatgctggaaacgagtaa

SEQ ID NO: 19868 - protein, 474 aa, Muscodor strobelii
  misc_feature: SGI Peptide ID NO. 566691
  misc_feature (348)..(439): NCBI GI: 85101003 Blast Desc: NCU04278 [Neurospora crassa OR74A] gi|11611460|emb|CAC18625.1| [Neurospora crassa] gi|28922606|gb|EAA31832.1| [Neurospora crassa OR74A]
  misc_feature (338)..(423): NCBI GI: 116197847 Blast Desc: CHGG_07079 [Chaetomium globosum CBS 148.51] gi|88178358|gb|EAQ85826.1| CHGG_07079 [Chaetomium globosum CBS 148.51]
  misc_feature (335)..(425): NCBI GI: 171694259 Blast Desc: protein product [Podospora anserina] gi|170947078|emb|CAP73883.1| protein product [Podospora anserina]
MSRSATGSPVIGTHDGRLISSAMAQSPIAAVIAPSMQASKEATESLAGRSDKHVPLRDPKSKDPVLRSIEEYTGSHASSIAAQSKDRLARTQRALFEDRNNPIPQIMSTQMMQARDMERGRTLPNGPILPSSAGATAPNILLSELHRKQDQGSRQQQPIIGATRKASDYINSETVSITSLTKGGPLLPPRSNGFTDHIQRQQPTIGEAMKRLGQSKPTAVRTSQKAPQPQMIKSVNQLPIQRQPTIPVTEKPSPHDVPVNLLFLKNGMNGIITTNGTSSSLRPGQWRKMTPEARRQYHVSRHDPQKFDDVIYSENNRPFRPGDALFGVSLDDLHSLQPSRPKPRPAKYWAQINPLVHYTQERSEAWMRQKQREIRDRGNRKTRLGKYIERTAKRTMAAGVPEFDYDSLPQRVKDNPKWVEAAKFFFEQEEKLKSIRAKKFQEEQAALQGKTSETATATSNGYHTEDMDVDAGNE

SEQ ID NO: 19869 - DNA, 2397 bp, Muscodor strobelii
  misc_feature: SGI cDNA ID NO. 566692
  misc_feature: Reduced expression when VOC is produced
  misc_feature: Encodes the peptide sequence at SEQ ID NO 19870
atgagggcaatcgaattggccagtcgtcgtggaggcgcgagtcttcggcaactcgcgacgcgaagccgtggaggggacattgcgcgccctcgttctttcgcaactcccgcctttgacaattcgaacccacgaatcccgccctacctaaaactcatcaagaactatgagaaagtcaaagaggtcttggggagagggtctgccctcacactggccgaaaagattctctacagccatctcgataatgccgaagagtcgctgatgactggcacgaatggtggtcgcaacattagaggcactgcaaatttgaagcttaagcccgaccgagtcgccatgcaggatgcttcggctcagatggctctcttgcagttcatgacatgcaatctgccatctactgctatccctgccagcatccactgcgatcatttgattgtcggcgagaacggcgcaaaactggatctggagtcgggtatcaaggtgaaccaagaggtctttgactttttggagtctgctggaaagaagtatggaatcgagttctggcctcctggcgccggcatcattcatcagagtgtcctggagaattacgccgcccctggtctcatgatgctgggcactgatagccataccccaaatgctgggggtttatcgactatagccataggagtcggtggcgccgatgccgtcgaggctcttgttggcgcgccttgggaattgaaggcaccacgcattctcggcgtaaaattgataaatcagcttagcggctgggcctcaccaaaggacatcatccttaatcttgctggacagctaacagtccgtggtggcacgggatatatcatcgagtattttggacctggagtcgaaacgcttagctgcactggtatggccactgcttgtaatatgggtgctgaagtaggtgctacgacctcgattttcccatttagccccgcccatgttcgatatctcgagtcgacgcatcgtcacgacgtggccgccgaagccaagaagttttctaatgttgtttctctcaaagccgatgagggcgcaaaatacgatgacgttattaccatcgacttagccaaactggaacctcatataaatgggccgttcaccccagatctgtctactcccttgtctcagtttaaacagactgtgcaagaacagaaatggccggagaagctttcagctgggttgattgggagctgcacaaacagctcctacgaagacatgacgcgtgtcgaaggaatggtgagggaagctttggaggctggcgtaaagccagcatcggatttctatatcacacctggtagcgattcaattagggagacactgcggagagatggcccgcttgagactttcgaagcagctggaggcatactgctgtccaatgcatgcggcccttgcatcggccagtggaagcgtttggatggtgtcgagaagggcacaccgaatgcgatcctcacctcatacaaccgcaatttccgtggtcgaaacgatggcaatctagataccatgaactttctcgcctcgcccgaaattgtcacagctatggcatttgccggatctacgacctttaacccgatgactgattcccttagaactgcttccggcgaggagttccgcttcacgcccccatcaggcaaggaaatcccatcacagccattcgaagtggcgcgaccagaatttagggaattagcatctgctcctgattcttcagtcgaagttgccatctcccctagttcctcgaggctcgcgctactcgaacctttcgagtccttccccaactccgagcttacgggactccgtgttctcgtgaaggtcactggcaaatgcacgacggacacaatctccgccgccggtccttggctaaaatacaagggccatcttcctaacatcagcgcgaacacgctgaatactgcgacgaacgctgagaccggtgaggtgaacgtggcgtacgatttagatggcagccaacacacgattcccgagctggggcagcggtggaaagaggcgggtcaaccttggcttgtggtagcggagcacaactacggtgagggtagtgcacgtgaacacgcagctctgcagcccaggtacctcggtgcccgcgttgtcctcactaaaagtttcgctcgtattcacgagacaaacttaaagaaacagggaatggtcccattgacgtttgctaatgaagcggactacgaccgcattaatgcctgcgacgaggtggagacgatcggtctactcgatatgctacgtaatggaggacaaggcgaagtctccttacgcgtaaaaaatgccaagaccggcgaggaagttgttatccctacacgccatgccgtcactaaagatcaggcggagtttattcttgcgggtagcgctctgaacatgttggcggcaaggtaa

SEQ ID NO: 19870 - protein, 798 aa, Muscodor strobelii
  misc_feature: SGI Peptide ID NO. 566692
  misc_feature (69)..(519): Pfam Id: PF00330 Pfam Desc: Aconitase family (aconitate hydratase)
  misc_feature (599)..(728): Pfam Id: PF00694 Pfam Desc: Aconitase C-terminal domain
  misc_feature (1)..(796): NCBI GI: 171694261 Blast Desc: protein product [Podospora anserina] gi|170947079|emb|CAP73884.1| protein product [Podospora anserina]
  misc_feature (1)..(796): NCBI GI: 116197843 Blast Desc: CHGG_07077 [Chaetomium globosum CBS 148.51] gi|88178356|gb|EAQ85824.1| CHGG_07077 [Chaetomium globosum CBS 148.51]
  misc_feature (1)..(796): NCBI GI: 85101011 Blast Desc: NCU04280 [Neurospora crassa OR74A] gi|11611458|emb|CAC18623.1| related to aconitate hydratase precursor [Neurospora crassa] gi|28922608|gb|EAA31834.1| NCU04280
  misc_feature (1)..(796): NCBI GI: 256731748 Blast Desc: [Nectria haematococca mpVI 77-13-4]
  misc_feature (1)..(796): NCBI GI: 46137365 Blast Desc: FG10198.1 [Gibberella zeae PH-1]
  misc_feature (1)..(798): NCBI GI: 39946632 Blast Desc: MGG_08584 [Magnaporthe grisea 70-15] gi|145012444|gb|EDJ97100.1| MGG_08584 [Magnaporthe grisea 70-15]
  misc_feature (31)..(798): NCBI GI: 212528308 Blast Desc: aconitate hydratase, mitochondrial [Penicillium marneffei ATCC 18224] gi|210073709|gb|EEA27796.1| aconitate hydratase, mitochondrial [Penicillium marneffei ATCC 18224]
  misc_feature (1)..(798): NCBI GI: 261352135 Blast Desc: aconitate hydratase [Verticillium albo-atrum VaMs.102]
  misc_feature (31)..(798): NCBI GI: 242766772 Blast Desc: aconitate hydratase, mitochondrial [Talaromyces stipitatus ATCC 10500] gi|218724433|gb|EED23850.1| aconitate hydratase, mitochondrial [Talaromyces stipitatus ATCC 10500]
  misc_feature (44)..(798): NCBI GI: 67526873 Blast Desc: AN3894.2 [Aspergillus nidulans FGSC A4] gi|40739969|gb|EAA59159.1| AN3894.2 [Aspergillus nidulans FGSC A4] gi|259481538|tpe|CBF75152.1| TPA: aconitate hydratase, FGSC
  misc_feature (40)..(795): SWISSPROT Homolog: EC 4.2.1.3 Aconitate hydratase
  misc_feature: Useful for introducing or modulating the production of volatile compounds
MRAIELASRRGGASLRQLATRSRGGDIARPRSFATPAFDNSNPRIPPYLKLIKNYEKVKEVLGRGSALTLAEKILYSHLDNAEESLMTGTNGGRNIRGTANLKLKPDRVAMQDASAQMALLQFMTCNLPSTAIPASIHCDHLIVGENGAKLDLESGIKVNQEVFDFLESAGKKYGIEFWPPGAGIIHQSVLENYAAPGLMMLGTDSHTPNAGGLSTIAIGVGGADAVEALVGAPWELKAPRILGVKLINQLSGWASPKDIILNLAGQLTVRGGTGYIIEYFGPGVETLSCTGMATACNMGAEVGATTSIFPFSPAHVRYLESTHRHDVAAEAKKFSNVVSLKADEGAKYDDVITIDLAKLEPHINGPFTPDLSTPLSQFKQTVQEQKWPEKLSAGLIGSCTNSSYEDMTRVEGMVREALEAGVKPASDFYITPGSDSIRETLRRDGPLETFEAAGGILLSNACGPCIGQWKRLDGVEKGTPNAILTSYNRNFRGRNDGNLDTMNFLASPEIVTAMAFAGSTTFNPMTDSLRTASGEEFRFTPPSGKEIPSQPFEVARPEFRELASAPDSSVEVAISPSSSRLALLEPFESFPNSELTGLRVLVKVTGKCTTDTISAAGPWLKYKGHLPNISANTLNTATNAETGEVNVAYDLDGSQHTIPELGQRWKEAGQPWLVVAEHNYGEGSAREHAALQPRYLGARVVLTKSFARIHETNLKKQGMVPLTFANEADYDRINACDEVETIGLLDMLRNGGQGEVSLRVKNAKTGEEVVIPTRHAVTKDQAEFILAGSALNMLAAR

SEQ ID NO: 19871 - DNA, 6108 bp, Muscodor strobelii
  misc_feature: SGI EST ID NO. CUFF.46569.0
  misc_feature: Variant of the nucleotide sequence at SEQ ID NO 19869
gttcagattgctatgtgaatttcgacaatgagggcaatcgaattggccagtcgtcgtggaggcgcgagtcttcggcaactcgcgacgcgaagccgtggaggggacattgcgcgccctcgttctttcgcaactcccgcctttgacaattcgaacccacgaatcccgccctacctaaaactcatcaagaactatgagaaagtcaaagaggtcttggggagagggtctgccctcacactggccgaaaagattctctacagccatctcgataatgccgaagagtcgctgatgactggcacgaatggtggtcgcaacattagaggcactgcaaatttgaagcttaagcccgaccgagtcgccatgcaggatgcttcggctcagatggctctcttgcagttcatgacatgcaatctgccatctactgctatccctgccagcatccactgcgatcatttgattgtcggcgagaacggcgcaaaactggatctggagtcgggtatcaaggtgaaccaagaggtctttgactttttggagtctgctggaaagaagtatggaatcgagttctggcctcctggcgccggcatcattcatcagagtgtcctggagaattacgccgcccctggtctcatgatgctgggcactgatagccataccccaaatgctgggggtttatcgactatagccataggagtcggtggcgccgatgccgtcgaggctcttgttggcgcgccttgggaattgaaggcaccacgcattctcggcgtaaaattgataaatcagcttagcggctgggcctcaccaaaggacatcatccttaatcttgctggacagctaacagtccgtggtggcacgggatatatcatcgagtattttggacctggagtcgaaacgcttagctgcactggtatggccactgcttgtaatatgggtgctgaagtaggtgctacgacctcgattttcccatttagccccgcccatgttcgatatctcgagtcgacgcatcgtcacgacgtggccgccgaagccaagaagttttctaatgttgtttctctcaaagccgatgagggcgcaaaatacgatgacgttattaccatcgacttagccaaactggaacctcatataaatgggccgttcaccccagatctgtctactcccttgtctcagtttaaacagactgtgcaagaacagaaatggccggagaagctttcagctgggttgattgggagctgcacaaacagctcctacgaagacatgacgcgtgtcgaaggaatggtgagggaagctttggaggctggcgtaaagccagcatcggatttctatatcacacctggtagcgattcaattagggagacactgcggagagatggcccgcttgagactttcgaagcagctggaggcatactgctgtccaatgcatgcggcccttgcatcggccagtggaagcgtttggatggtgtcgagaagggcacaccgaatgcgatcctcacctcatacaaccgcaatttccgtggtcgaaacgatggcaatctagataccatgaactttctcgcctcgcccgaaattgtcacagctatggcatttgccggatctacgacctttaacccgatgactgattcccttagaactgcttccggcgaggagttccgcttcacgcccccatcaggcaaggaaatcccatcacagccattcgaagtggcgcgaccagaatttagggaattagcatctgctcctgattcttcagtcgaagttgccatctcccctagttcctcgaggctcgcgctactcgaacctttcgagtccttccccaactccgagcttacgggactccgtgttctcgtgaaggtcactggcaaatgcacgacggacacaatctccgccgccggtccttggctaaaatacaagggccatcttcctaacatcagcgcgaacacgctgaatactgcgacgaacgctgagaccggtgaggtgaacgtggcgtacgatttagatggcagccaacacacgattcccgagctggggcagcggtggaaagaggcgggtcaaccttggcttgtggtagcggagcacaactacggtgagggtagtgcacgtgaacacgcagctctgcagcccaggtacctcggtgcccgcgttgtcctcactaaaagtttcgctcgtattcacgagacaaacttaaagaaacagggaatggtcccattgacgtttgctaatgaagcggactacgaccgcattaatgcctgcgacgaggtggagacgatcggtctactcgatatgctacgtaatggaggacaaggcgaagtctccttacgcgtaaaaaatgccaagaccggcgaggaagttgttatccctacacgccatgccgtcactaaagatcaggcggagtttattcttgcgggtagcgctctgaacatgttggcggcaaggtaatgataccaaattagagggcagagaagatagttggcgagtatgctatgataccaaaaaggaaaagttaatctccgaaggaggggaaaataatttatatatgctatcaagatgaacattcagacgaagaacaaaaatgtaaaaattcaaacgtacttgcaagcattatgtgaagacaacaagaacttcgccttggtttgaaaatcttatatacattacaacgcacgatgggcatggcttcaattgttgttacatgcaacgatgaccttctatatacgttttgatgccatgccgccttatgctcgtcgctatatcactcatttacaagtactcccacccgcatcaatgcaatgtccatgccgctcctactaggcgaagaagctcatctcgctgcgcgagaccctcttgcatttcatccccttcgaaaacgcaaaatgcatgagcttatatagcgcagctgatactgttcagcggccatacgtcccttcgtatctctctcctgagctatggtagctcgtcccaaagactccacgtcttagcggcgaaagacgaagcgttagcatgcgaatgatccgtgtgttatatgtccaggcgcatcgcgtgaagtcatttgtccaacttcgaatctctgactacgaatgccacctataagatcgcactggcatccccaagccgcaactctatgagcgcgtatgaaaaatgaggatgatatggaaagttttttatacaagcgttatacaaatcggtgttgtgctagagaggcggatcttactcgtttccagcatcaacgtccatatcttcggtgtggtatccattgctcgtagcagttgcagtttcactagttttgccctgtagagcagcttgttcctcctggaactttttggctcgtatggatttcagcttttcttcctgttcgaagaaaaacttagctgcttcaacccacttcggattgtctttgactcgttgaggtaggctatcatagtcgaattcgggaacaccggcagccatcgtccgctttgcagttcgctcaatgtacttgccaaggcgagtcttcctatttccccgatctctgatttctcgctgcttctgccgcatccatgcttcggatcgctcttgtgtataatgcactagaggatttatttgggcccaatactttgcgggacgaggtttaggcctgctaggttgcagagaatgcaaatcatcgagagatacgccgaacaaagcatcgcccgggcgaaaaggtcggttattctcgctgtaaataacatcgtcgaatttttgggggtcatgtcgtgatacatgatactgacgtcgtgcttcgggcgtcatcttccgccattgtccgggacgcagcgacgacgaggtaccgttggtagtaattataccattcataccatttttcaaaaatagtagattaacaggcacgtcatggggagacggtttctctgttacaggtattgtcggctgccgttgtatgggtaactgattcacggatttgatcatttgtggctgtggtgctttctgagaggttctcacggcagttggtttactctggccgagacgtttcattgcctctccaattgtaggctgctgacgctgaatgtgatctgtgaagccgttggaacgtggcggtagcagagggcccccttttgtaagggatgtaattgacacagtttcactatttatataatccgaggctttcctcgtagcgcctatgattggttgctgctgtcgcgagccttgatcctgctttctatgcaattctgatagcagtatatttggcgctgtagcgccagcggaggatgggagaataggaccattgggtaatgtgcgtcctctttccatgtctcgtgcctgcatcatttgcgtagacataatctgtggtataggattgttgcggtcttcaaatagagctcgctgagttctagcaagacggtctttggattgggcagcaatggacgaagcatgcgagccagtatattcttcaatagaccttaggacggggtcttttgatttaggatctctcagaggaacgtgcttatcggacctaccggccagactttcagtggcttcttttgatgcttgcatagatggagcaatcactgctgcgataggactctgggccatggcgctactaatcaaacggccgtcgtgagtcccaatgacaggggatccagtagcggatcggctcatgagtcttagatgagtgtccgaatgaaacggtgcagagttcttctcatttataggaaatggatgggatataaacacgttttggtttacgtgatcgtcaactggtgggtatggtttggacggtatcgtattgcgtgatgttgaacgctcagaagcatttggcttcgatctgttgctaaaggattcacgagatccattttgatgttccccagggagatggccattttgctcgtgagttatgtgtcttggcccggatccactactaggctcctggctatgaccattttgcccatttagggaatgtctaaatcgtgttgcattatgtgaatcccaataatgcaggttgtttggaggtacttgattgttcaacgtcctatacggcgattcaatacgcgcattagtcgaaagacgcatctgcccattgttcataataccattgataccgttgtcttttgatgaaaagctgtgaccaggatgtggcaatgcaggtggcggttcatcatccccggtaagatcaatgggctctgaacgagtgtgtccattgtagttagaagcccgtgcattcgagcttgatgctgtcgttggtcggctggaattactagcagagcgctctcttgttttggagatgtcgttcgtcatctcgttcttcttagggcgtaatgcgaacccgtccacagcaccaagattttgagagcgtggttctgggggtttcaacaaaccacctcttttcaaagaaggaggtacaagatttggagataaggggagccccctcacaccactgggacttgggtacaattctgattgcttcgaggtatttgagagacgaggctttttagcaggtcgcccgctgcccggtgaagtctctgagaccaatgccccaatagtatgtcgccctacacttgttggagaagccgcaccattcaattgttgcttagtacctttccttgctgtgcctttaacaggaagctgtttcttttgattggaaggagacagcggctcagaagtattgcgcgaggaaccgttttgaatatttgactcgtgggtctgggttggcgtagaaatcctgggagcatttatcggggtgaaccgagaatttgtgtctggaacgcgatggtttgccatattcgaatgaatagcgtgacgggaccgtgggagctgagcgcattctttggcgtctcgactttcctgatggctccgacagtattgccgtccagatgcatattcttggcagccgccttgttgacacctaggaaatatctggtgcgactttcgcgtgtccatagtagaattaagaatcaacgtgacagtattgtaacaaaccagatcacatgctgaagtacgattctgatgtcgtaccgcagcctataagaataagtacgggtcgcatttctaatatctggtcagattccgcacgtagatgagttggcgtgaccaggttgtcatatcgctcaaacatgagatgagttttgttgatacctccattcactccgaattgtg

SEQ ID NO: 19872 - DNA, 1650 bp, Muscodor strobelii
  misc_feature: SGI cDNA ID NO. 566693
  misc_feature: Elevated expression when VOC is produced
  misc_feature: Encodes the peptide sequence at SEQ ID NO 19873
atgccggctacgtggatttacccagtcgtggcccttttgagttacgcgatatatcgcctcctccagattggtagcagaccgaaggactaccctccaggaccacctacggttccaattctgggtaacttgcaccaaatgcccctcgaggatggacacgttcagttcaagaaatgggccgaggaatatggaccagtatactctctgatgcttgggacacggtgtatgattgtcttcaattcggatcaagccgttaaggatactttcgacaagaagagctctatctactcttccagacctgaggtatatattgcacgaactgttggcggttctcacaaggttgatggcggctatcgcgttctgaacatgccctacggtgatcgatggcgaatggcccaccgtgtctatcacagtattctcaacgtcagggccgctaaaagcttcgttccttaccaagacctcgaaaacaaacagatgcttcagggtttcctcgacaagccggaagggtttatcgaccatcttcgtcgctattctttctctttgaccacccaaatgatctatggtttccgtactcctactatcgatgattggaggctaaaggctttgtaccacaaccttcaccagttttcaaaggcaatgggcacaggtgtcgccgttttccttgatttcttcccgtggctccgtgtgctcccggattctattaccaagagtcgaggagtcgccaagggcctgcacgagatcgagttgaagttccacaaaggcaactggatggatgtcaagaagaagctcaaggctggtaccgctaagccgtcgctttgcgtcgatttgattaaagcccaagacgccgagggtttctcggacgagcaggctggatatatcgccggaaatcttcttgaggcaggagccgacaccactgctgctcagctcaccggatttgtccaagcaatgcttttataccccgaagtccagaagaaggcccaagaggaacttgaccgtgtctgtggtaaccggatgccgactatggatgattgggatgagctgccatacattcgcgcttgcatgaaggagaccaaccgatggatgccgacagctattctcggtatcgcacacgctgtcaccagggatgacgagtatatgggctataagatccctaaggacgctatgtgcgtcgtgaatgtctgggctattcacatggaccccaagcgccaccccaacccatcagcctttgaccctatgcgatatatcgacgacaataccacctccctcgagtcttcacagcagcgcgacgtcactaaacgcgataacttcctctttggtgtcggccgtcgtatctgccagggtatgcacattgccgaccggtcaatgttcctcgccatttctcgtctcctctggtctttccatatggaaactagcctcgacaaagatgggaaacccatcgtaccggatccaaccaagctcatccagggtatgcttgtgcaacccgagccttatccagccactatcgttgctcgaacccaagcgcatgccgacaccatccgcaaggagtgggccgatgcattcgcccttctggatgccgaggagcaatggagagagatccccaagggtatgcccctgtccacgtacgaacctgctgcggctggtgagttggactaa

SEQ ID NO: 19873 - protein, 549 aa, Muscodor strobelii
  misc_feature: SGI Peptide ID NO. 566693
  misc_feature (31)..(500): Pfam Id: PF00067 Pfam Desc: Cytochrome P450
  misc_feature (10)..(528): NCBI GI: 119483586 Blast Desc: Cytochrome P450 oxidoreductase, [Neosartorya fischeri NRRL 181] gi|119409852|gb|EAW19799.1| Cytochrome P450 oxidoreductase, [Neosartorya fischeri NRRL 181]
  misc_feature (6)..(532): NCBI GI: 255944711 Blast Desc: Pc20g05940 [Penicillium chrysogenum Wisconsin 54-1255] gi|211587858|emb|CAP85923.1| Pc20g05940 [Penicillium chrysogenum Wisconsin 54-1255]
  misc_feature (6)..(547): NCBI GI: 171678956 Blast Desc: protein product [Podospora anserina] gi|170937549|emb|CAP62206.1| protein product [Podospora anserina]
  misc_feature (16)..(528): NCBI GI: 240111106 Blast Desc: Cytochrome P450 family protein [Coccidioides posadasii C735 delta SOWgp]
  misc_feature (7)..(542): NCBI GI: 242773378 Blast Desc: cytochrome P450, [Talaromyces stipitatus ATCC 10500] gi|218721847|gb|EED21265.1| cytochrome P450, [Talaromyces stipitatus ATCC 10500]
  misc_feature (18)..(528): NCBI GI: 212530062 Blast Desc: cytochrome P450, [Penicillium marneffei ATCC 18224] gi|210074586|gb|EEA28673.1| cytochrome P450, [Penicillium marneffei ATCC 18224]
  misc_feature (1)..(532): NCBI GI: 259484285 Blast Desc: TPA: cytochrome P450, (Eurofung) [Aspergillus nidulans FGSC A4]
  misc_feature (8)..(530): NCBI GI: 85111866 Blast Desc: NCU11242 [Neurospora crassa OR74A] gi|28925910|gb|EAA34906.1| NCU11242 [Neurospora crassa OR74A] gi|38566928|emb|CAE76231.1| related to O-methylsterigmatocystin
  misc_feature (16)..(528): NCBI GI: 119189783 Blast Desc: CIMG_04939 [Coccidioides immitis RS]
  misc_feature (6)..(534): NCBI GI: 171694638 Blast Desc: protein product [Podospora anserina] gi|170947561|emb|CAP59722.1| protein product [Podospora anserina]
  misc_feature (31)..(503): SWISSPROT Homolog: EC 1.14.14.1 Unspecific monooxygenase
  misc_feature: Useful for introducing or modulating the production of volatile compounds
MPATWIYPVVALLSYAIYRLLQIGSRPKDYPPGPPTVPILGNLHQMPLEDGHVQFKKWAEEYGPVYSLMLGTRCMIVFNSDQAVKDTFDKKSSIYSSRPEVYIARTVGGSHKVDGGYRVLNMPYGDRWRMAHRVYHSILNVRAAKSFVPYQDLENKQMLQGFLDKPEGFIDHLRRYSFSLTTQMIYGFRTPTIDDWRLKALYHNLHQFSKAMGTGVAVFLDFFPWLRVLPDSITKSRGVAKGLHEIELKFHKGNWMDVKKKLKAGTAKPSLCVDLIKAQDAEGFSDEQAGYIAGNLLEAGADTTAAQLTGFVQAMLLYPEVQKKAQEELDRVCGNRMPTMDDWDELPYIRACMKETNRWMPTAILGIAHAVTRDDEYMGYKIPKDAMCVVNVWAIHMDPKRHPNPSAFDPMRYIDDNTTSLESSQQRDVTKRDNFLFGVGRRICQGMHIADRSMFLAISRLLWSFHMETSLDKDGKPIVPDPTKLIQGMLVQPEPYPATIVARTQAHADTIRKEWADAFALLDAEEQWREIPKGMPLSTYEPAAAGELD

SEQ ID NO: 19874 - DNA, 2505 bp, Muscodor strobelii
  misc_feature: SGI EST ID NO. CUFF.46563.0
  misc_feature: Variant of the nucleotide sequence at SEQ ID NO 19872
agcaatcccaaagtcttggtaccgctagagacacatgttgtgcaacctccaatactacaaggactgtgccccttccttcggccggccggcaacaagagcagaggccccaatcagacaggacggactccgggcccgtattgtcgtcgtggaataagcaacgggtcatggatggccctcgccaatgcgcgcatccgtgcgatgtgagatcatgtttccacctatcttacacatcaaatcgacgccagagagcagcgctattgtctagtttagcctgcccaagacggcagaccccctagtaggtagttcccaagatccaaaggggtatggcgaagcagaacgtgccacctagtgcctcggtggaagtgcgccaggcttttctgggagcggtcagatggagtcagacactttgcgatacatcgcttgacctatgttacctatatcagggcttctctcccctcgcttgatgtagccccctttcgagtgaatgttcactgttttcgttgtgacaaaccacgaatctctcacaatgccggctacgtggatttacccagtcgtggcccttttgagttacgcgatatatcgcctcctccagattggtagcagaccgaaggactaccctccaggaccacctacggttccaattctgggtaacttgcaccaaatgcccctcgaggatggacacgttcagttcaagaaatgggccgaggaatatggaccagtatactctctgatgcttgggacacggtgtatgattgtcttcaattcggatcaagccgttaaggatactttcgacaagaagagctctatctactcttccagacctgaggtatatattgcacgaactgttggcggttctcacaaggttgatggcggctatcgcgttctgaacatgccctacggtgatcgatggcgaatggcccaccgtgtctatcacagtattctcaacgtcagggccgctaaaagcttcgttccttaccaagacctcgaaaacaaacagatgcttcagggtttcctcgacaagccggaagggtttatcgaccatcttcgtcgctattctttctctttgaccacccaaatgatctatggtttccgtactcctactatcgatgattggaggctaaaggctttgtaccacaaccttcaccagttttcaaaggcaatgggcacaggtgtcgccgttttccttgatttcttcccgtggctccgtgtgctcccggattctattaccaagagtcgaggagtcgccaagggcctgcacgagatcgagttgaagttccacaaaggcaactggatggatgtcaagaagaagctcaaggctggtaccgctaagccgtcgctttgcgtcgatttgattaaagcccaagacgccgagggtttctcggacgagcaggctggatatatcgccggaaatcttcttgaggcaggagccgacaccactgctgctcagctcaccggatttgtccaagcaatgcttttataccccgaagtccagaagaaggcccaagaggaacttgaccgtgtctgtggtaaccggatgccgactatggatgattgggatgagctgccatacattcgcgcttgcatgaaggagaccaaccgatggatgccgacagctattctcggtatcgcacacgctgtcaccagggatgacgagtatatgggctataagatccctaaggacgctatgtgcgtcgtgaatgtctgggctattcacatggaccccaagcgccaccccaacccatcagcctttgaccctatgcgatatatcgacgacaataccacctccctcgagtcttcacagcagcgcgacgtcactaaacgcgataacttcctctttggtgtcggccgtcgtatctgccagggtatgcacattgccgaccggtcaatgttcctcgccatttctcgtctcctctggtctttccatatggaaactagcctcgacaaagatgggaaacccatcgtaccggatccaaccaagctcatccagggtatgcttgtgcaacccgagccttatccagccactatcgttgctcgaacccaagcgcatgccgacaccatccgcaaggagtgggccgatgcattcgcccttctggatgccgaggagcaatggagagagatccccaagggtatgcccctgtccacgtacgaacctgctgcggctggtgagttggactaagcaatgaggctgaatttcatggattgcaattttttttttggaggtgcatggggcgctcggagtcgtttatagaatgggttggggcggtcacatacgcaattggacaagcagtgataaatctgctgcgagacttgtctgcgcatggggttacgatatttaggtagctggttcggccctaaattttggtgctttggcattattttcatgacgatatgcacggggataccaaagaaaggttcggggatacgggcagattaggaaatattccacgataccatgcaagcccttataagagaggatagagaaacaattgagttaaaaaagacaca

SEQ ID NO: 19875 - DNA, 3546 bp, Muscodor strobelii
  misc_feature: SGI cDNA ID NO. 566694
  misc_feature: Encodes the peptide sequence at SEQ ID NO 19876
atggcagccgctctcagcctggatcacttccgcgtgggcgagtgcctcggaaagggcgcctttggggctgtgtacaaggcaatccattggggcactgggcaggcagtcgccatcaagcagatcaaactcgataacttgcaaaagggtgagatgcgcatgtttgagtctgaagttgagctactgaagaacttgaaccacgagaacattgtgaaatacattggcttcgtcaagtccccggacaccctccatatccttcttgagtattgtgagaacggctccctacattcgatatgcaaatcctacggcaagttcccggagaatcttgtcggggtctacatggcacaagttctcactgggcttgattatcttcatgaccaaggtgtcctccatggggatatcaaaggcgccaatatcctcactaccaaagatggtcaagtcaagttagccgactttggtgtttcaaccctcactgataaaaacaatatccttgctggtcctagcaaggacaagcagaaagacaaaaaggagaaagacaggcaagtctttgggactccttattggatggctccagaggtaatcgacatgtcgcaatcaaccactgcgtcggatatctggagcttaggctgcactgtcattgagctcttatctggaaagcccccctattatcacatgcagcccctacaagctctcttcgccatagtcaacgatgatcatcctcctctccccgaaggtgtttccttggtcgctagagactttctcatgcagtgcttccagaaggactccaaccttcgaatcaaagcaaagaagctccttaagcatagctggattaaggcttacaagagaaaagatgctcctgtcaccaaacctccgggcaattttgacgaagcagtcgaagaagtcaagcagtggaataaggccttagcttcgtcagataacaactttcgagcatcgtccagctcagaatccaatggacatccattccaggtcaagttacccatgcctatcacgaacaaggccccatttgaacttaaacccagacgcaccgctgaaggtttccaatctcccgaacccgccgatgatggtaattgggatgatgatttcgcaacctccatatcgccaagtgctctacaattatctcatcttaagccccaggataatttcggcggtcagctctctgcagaacgcctaaaagcattcgcgtctctggactattctcgcgatttctcatcaaactatacacagcaacctgctagcgatggtatgacatccaaaaggcctcagccgatagttgaagaagatccagcggagaagacaatccgaccgagccggaagctagtcagacctgtcaaagtcgacgatccgaagatccgccccgccaagacaccatctcctagaaaagtttcttcagcaagccctcgtaagcagcattcacgagcaaagagttcgagtggaaagccaatggggttcacaaaccggccagagctcgctcacagagaaaaaacagccgaggactactctgacctttttgacggcaacgacagtgctttcaaccaaaagctgaacttactaaggaagcctgatacaccccagcttttccatccttcagatcttaccagcctcccacggtcagcacaatcaccatctgcaggtagcagccgtcgaaagacaagttcgcggccatcgatattgcccggtcgatcatttcatagatcgaaatcctcgatcgaaatccagaaatttgctgaatcagacgaagaggacttttccgatgttttcggaccttctcagagtctggtagagaaagcagatagcgagcatggctctgaggatgataatgttatggtactctctaagctatcaaatggatcttggctgggcgatgacgaagacgaagacgatcctttcgcgtccatggaccctcgttgggataatatggactttgaggctaacattgcgcgcgatcgtcacgcccggttagcagaaagagtcgaggaacttgttcggtcgcttaagccaggacagagcgaagacaaactcctggatatatcagcaaaacttttggaaattctttgggaaagtcctgatgtgaagaatatgatcatcagcgcacatggactactgcccattctggagattcttgagccttgcacctttcaaagcaagggcgaaatgatcctaccactgctcaaggttgtcaatgctatcatactcgaggacgttgagcttcaagagaacctctgctttgtcggcggtattccaatcataaccaagttcgcagcactgaagtattctattgggatacggctagaggcagctgcatttatcagacaaatgtattcaacttcgacattgaccttgcagatgtttgtcagtgcgggtggtctgaatgttctcgttggctacttagacgaggattatgcagctcacagagacctcgttttaatcggcgtgaatggcatttggaatgtttttgagcttcagggaccaacaccgaaaaatgatttctgtcgtattttctcccggagcaacattcttgatcctttgagctttgtattgcagcgagtcttggccgagcaagctggaacggagggtgaaatggaggtggctcagctgattgaaggcagaattgccagcattttttaccttttctctcaagccgaaaactatgttaaagagctggtggcaaatcgcaaagtgttgaagagggttctcggcggcctgcgccgaatgacttctgctcaccaaattacaatgctgaaatttgtcagaaatctttcgatgctatccacgacactggacacactacactcggccgacgcaatcgatttgctcattgaattgcttgaacgaagtatgaggaagggccacccgcacttccgtgagatttccaatcaaatcctcaacatcattttcaacctatgtcgactaagcaaagagcgccaggaagatgcggctgttaacggcattgttcccattctactgaagattatgaagaccgatcggccaccgaaagaatttgctttgcctatcctatgcgatatggcgcactgtggacgcaaaggacgtaggtctctgtggcagaataaaggtcttcagttctacatctcgttactgaaagacccctactggcaagtaccagctctagactccattttcgtctggctacaagaagagactgcgaaggtagaggatcaccttatgaaaggaggatttagtgatgccattgcctcgtgctttcgtagtacgaaggctactgcattcgaccctaacctcttggaccctcttttgaagctgcttcgtctctcccctgtgctgggacgttccctggccagaattgacgtgtattctggcattactcgccgactcctgcacaagagaccggttgttcgatcaaacctcttacgtattgtcagaattatcctcgacaacagaggatcggagccccaggaaaagcagctgagcactttgttgatgactatcgagaaccttgccgataaggatcccgccttgttggtgcgaaaccttgcgctaaccgtcatagactag

SEQ ID NO: 19876 - protein, 1181 aa, Muscodor strobelii
  misc_feature: SGI Peptide ID NO. 566694
  misc_feature (10)..(276): Pfam Id: PF00069 Pfam Desc: Protein kinase domain
  misc_feature (10)..(276): Pfam Id: PF07714 Pfam Desc: Protein tyrosine kinase
  misc_feature (10)..(154): Pfam Id: PF07714 Pfam Desc: Protein tyrosine kinase
  misc_feature (187)..(264): Pfam Id: PF07714 Pfam Desc: Protein tyrosine kinase
  misc_feature (11)..(1180): NCBI GI: 239606628 Blast Desc: cell division control protein 15 [Ajellomyces dermatitidis ER-3]
  misc_feature (57)..(1180): NCBI GI: 225560474 Blast Desc: cell division control protein [Ajellomyces capsulatus G186AR]
  misc_feature (7)..(1180): NCBI GI: 169604320 Blast Desc: SNOG_05171 [Phaeosphaeria nodorum SN15] gi|111066442|gb|EAT87562.1| SNOG_05171 [Phaeosphaeria nodorum SN15]
  misc_feature (11)..(890): NCBI GI: 171692243 Blast Desc: protein product [Podospora anserina] gi|170946070|emb|CAP72871.1| protein product [Podospora anserina]
  misc_feature (6)..(1180): NCBI GI: 170089847 Blast Desc: [Laccaria bicolor S238N-H82] gi|164649406|gb|EDR13648.1| [Laccaria bicolor S238N-H82]
  misc_feature (6)..(1180): NCBI GI: 169858742 Blast Desc: CC1G_05008 [Coprinopsis cinerea okayama7#130] gi|116502896|gb|EAU85791.1| CC1G_05008 [Coprinopsis cinerea okayama7#130]
  misc_feature (614)..(1180): NCBI GI: 238491902 Blast Desc: serine-threonine kinase SepH [Aspergillus flavus NRRL3357] gi|220697601|gb|EED53942.1| serine-threonine kinase SepH [Aspergillus flavus NRRL3357]
  misc_feature (7)..(1176): NCBI GI: 145607237 Blast Desc: MGG_04100 [Magnaporthe grisea 70-15] gi|145014829|gb|EDJ99397.1| MGG_04100 [Magnaporthe grisea 70-15]
  misc_feature (48)..(1180): NCBI GI: 261352094 Blast Desc: cell division control protein [Verticillium albo-atrum VaMs.102]
  misc_feature (7)..(1180): NCBI GI: 85102922 Blast Desc: NCU01335 [Neurospora crassa OR74A] gi|16944338|emb|CAC18225.2| related to septation (sepH) gene [Neurospora crassa] gi|28922966|gb|EAA32185.1| NCU01335 crassa
MAAALSLDHFRVGECLGKGAFGAVYKAIHWGTGQAVAIKQIKLDNLQKGEMRMFESEVELLKNLNHENIVKYIGFVKSPDTLHILLEYCENGSLHSICKSYGKFPENLVGVYMAQVLTGLDYLHDQGVLHGDIKGANILTTKDGQVKLADFGVSTLTDKNNILAGPSKDKQKDKKEKDRQVFGTPYWMAPEVIDMSQSTTASDIWSLGCTVIELLSGKPPYYHMQPLQALFAIVNDDHPPLPEGVSLVARDFLMQCFQKDSNLRIKAKKLLKHSWIKAYKRKDAPVTKPPGNFDEAVEEVKQWNKALASSDNNFRASSSSESNGHPFQVKLPMPITNKAPFELKPRRTAEGFQSPEPADDGNWDDDFATSISPSALQLSHLKPQDNFGGQLSAERLKAFASLDYSRDFSSNYTQQPASDGMTSKRPQPIVEEDPAEKTIRPSRKLVRPVKVDDPKIRPAKTPSPRKVSSASPRKQHSRAKSSSGKPMGFTNRPELAHREKTAEDYSDLFDGNDSAFNQKLNLLRKPDTPQLFHPSDLTSLPRSAQSPSAGSSRRKTSSRPSILPGRSFHRSKSSIEIQKFAESDEEDFSDVFGPSQSLVEKADSEHGSEDDNVMVLSKLSNGSWLGDDEDEDDPFASMDPRWDNMDFEANIARDRHARLAERVEELVRSLKPGQSEDKLLDISAKLLEILWESPDVKNMIISAHGLLPILEILEPCTFQSKGEMILPLLKVVNAIILEDVELQENLCFVGGIPIITKFAALKYSIGIRLEAAAFIRQMYSTSTLTLQMFVSAGGLNVLVGYLDEDYAAHRDLVLIGVNGIWNVFELQGPTPKNDFCRIFSRSNILDPLSFVLQRVLAEQAGTEGEMEVAQLIEGRIASIFYLFSQAENYVKELVANRKVLKRVLGGLRRMTSAHQITMLKFVRNLSMLSTTLDTLHSADAIDLLIELLERSMRKGHPHFREISNQILNIIFNLCRLSKERQEDAAVNGIVPILLKIMKTDRPPKEFALPILCDMAHCGRKGRRSLWQNKGLQFYISLLKDPYWQVPALDSIFVWLQEETAKVEDHLMKGGFSDAIASCFRSTKATAFDPNLLDPLLKLLRLSPVLGRSLARIDVYSGITRRLLHKRPVVRSNLLRIVRIILDNRGSEPQEKQLSTLLMTIENLADKDPALLVRNLALTVID

SEQ ID NO: 19877 - DNA, 4165 bp, Muscodor strobelii
  misc_feature: SGI EST ID NO. CUFF.46551.0
  misc_feature: Variant of the nucleotide sequence at SEQ ID NO 19875
gttcaaagaccatgacgtggcagcacatttttgtatggaaagaaactataaactccgctgaggtgcagttgctgtgcagaatgcactgtagtttggtagcgacccctgtagcagagccctacggctcggcgcgctagggacctaacgtcaggcaccttccatcgctgaccccactactgctagactctttcatcccagcaacattcgtcgccgccccaccatcacgccgacaacagcttcacctgccgtcctgctctcccaactcccctatgagtgctcgctcggcgccatggcagccgctctcagcctggatcacttccgcgtgggcgagtgcctcggaaagggcgcctttggggctgtgtacaaggcaatccattggggcactgggcaggcagtcgccatcaagcagatcaaactcgataacttgcaaaagggtgagatgcgcatgtttgagtctgaagttgagctactgaagaacttgaaccacgagaacattgtgaaatacattggcttcgtcaagtccccggacaccctccatatccttcttgagtattgtgagaacggctccctacattcgatatgcaaatcctacggcaagttcccggagaatcttgtcggggtctacatggcacaagttctcactgggcttgattatcttcatgaccaaggtgtcctccatggggatatcaaaggcgccaatatcctcactaccaaagatggtcaagtcaagttagccgactttggtgtttcaaccctcactgataaaaacaatatccttgctggtcctagcaaggacaagcagaaagacaaaaaggagaaagacaggcaagtctttgggactccttattggatggctccagaggtaatcgacatgtcgcaatcaaccactgcgtcggatatctggagcttaggctgcactgtcattgagctcttatctggaaagcccccctattatcacatgcagcccctacaagctctcttcgccatagtcaacgatgatcatcctcctctccccgaaggtgtttccttggtcgctagagactttctcatgcagtgcttccagaaggactccaaccttcgaatcaaagcaaagaagctccttaagcatagctggattaaggcttacaagagaaaagatgctcctgtcaccaaacctccgggcaattttgacgaagcagtcgaagaagtcaagcagtggaataaggccttagcttcgtcagataacaactttcgagcatcgtccagctcagaatccaatggacatccattccaggtcaagttacccatgcctatcacgaacaaggccccatttgaacttaaacccagacgcaccgctgaaggtttccaatctcccgaacccgccgatgatggtaattgggatgatgatttcgcaacctccatatcgccaagtgctctacaattatctcatcttaagccccaggataatttcggcggtcagctctctgcagaacgcctaaaagcattcgcgtctctggactattctcgcgatttctcatcaaactatacacagcaacctgctagcgatggtatgacatccaaaaggcctcagccgatagttgaagaagatccagcggagaagacaatccgaccgagccggaagctagtcagacctgtcaaagtcgacgatccgaagatccgccccgccaagacaccatctcctagaaaagtttcttcagcaagccctcgtaagcagcattcacgagcaaagagttcgagtggaaagccaatggggttcacaaaccggccagagctcgctcacagagaaaaaacagccgaggactactctgacctttttgacggcaacgacagtgctttcaaccaaaagctgaacttactaaggaagcctgatacaccccagcttttccatccttcagatcttaccagcctcccacggtcagcacaatcaccatctgcaggtagcagccgtcgaaagacaagttcgcggccatcgatattgcccggtcgatcatttcatagatcgaaatcctcgatcgaaatccagaaatttgctgaatcagacgaagaggacttttccgatgttttcggaccttctcagagtctggtagagaaagcagatagcgagcatggctctgaggatgataatgttatggtactctctaagctatcaaatggatcttggctgggcgatgacgaagacgaagacgatcctttcgcgtccatggaccctcgttgggataatatggactttgaggctaacattgcgcgcgatcgtcacgcccggttagcagaaagagtcgaggaacttgttcggtcgcttaagccaggacagagcgaagacaaactcctggatatatcagcaaaacttttggaaattctttgggaaagtcctgatgtgaagaatatgatcatcagcgcacatggactactgcccattctggagattcttgagccttgcacctttcaaagcaagggcgaaatgatcctaccactgctcaaggttgtcaatgctatcatactcgaggacgttgagcttcaagagaacctctgctttgtcggcggtattccaatcataaccaagttcgcagcactgaagtattctattgggatacggctagaggcagctgcatttatcagacaaatgtattcaacttcgacattgaccttgcagatgtttgtcagtgcgggtggtctgaatgttctcgttggctacttagacgaggattatgcagctcacagagacctcgttttaatcggcgtgaatggcatttggaatgtttttgagcttcagggaccaacaccgaaaaatgatttctgtcgtattttctcccggagcaacattcttgatcctttgagctttgtattgcagcgagtcttggccgagcaagctggaacggagggtgaaatggaggtggctcagctgattgaaggcagaattgccagcattttttaccttttctctcaagccgaaaactatgttaaagagctggtggcaaatcgcaaagtgttgaagagggttctcggcggcctgcgccgaatgacttctgctcaccaaattacaatgctgaaatttgtcagaaatctttcgatgctatccacgacactggacacactacactcggccgacgcaatcgatttgctcattgaattgcttgaacgaagtatgaggaagggccacccgcacttccgtgagatttccaatcaaatcctcaacatcattttcaacctatgtcgactaagcaaagagcgccaggaagatgcggctgttaacggcattgttcccattctactgaagattatgaagaccgatcggccaccgaaagaatttgctttgcctatcctatgcgatatggcgcactgtggacgcaaaggacgtaggtctctgtggcagaataaaggtcttcagttctacatctcgttactgaaagacccctactggcaagtaccagctctagactccattttcgtctggctacaagaagagactgcgaaggtagaggatcaccttatgaaaggaggatttagtgatgccattgcctcgtgctttcgtagtacgaaggctactgcattcgaccctaacctcttggaccctcttttgaagctgcttcgtctctcccctgtgctgggacgttccctggccagaattgacgtgtattctggcattactcgccgactcctgcacaagagaccggttgttcgatcaaacctcttacgtattgtcagaattatcctcgacaacagaggatcggagccccaggaaaagcagctgagcactttgttgatgactatcgagaaccttgccgataaggatcccgccttgttggtgcgaaaccttgcgctaaccgtcatagactagaaacctgtggcagtggatggacagggtgcaagtcagcatacttgagagtcgattgatggcaagatgagcaattatccatgcatagccgacgagtacaagcatcacgatgctggtgaagggaatgtataattttaactggtattgaaggtcacgagacatgtataattagttatggcacgagcctggcctatgggaaggaacaacaacacgtgagaccaactgaaacggttttcagtaagaggaacgatgaaaaataatgattggtcatagaacgcggactccaatagaattcgtagtctaaaggtgtcatttcatgatacactatgtgca

SEQ ID NO: 19878 - DNA, 3462 bp, Muscodor strobelii
  misc_feature: SGI cDNA ID NO. 566695
  misc_feature: Encodes the peptide sequence at SEQ ID NO 19879
atggcagccgctctcagcctggatcacttccgcgtgggcgagtgcctcggaaagggcgcctttggggctgtgtacaaggcaatccattggggcactgggcaggcagtcgccatcaagcagatcaaactcgataacttgcaaaagggtgagatgcgcatgtttgagtctgaagttgagctactgaagaacttgaaccacgagaacattgtgaaatacattggcttcgtcaagtccccggacaccctccatatccttcttgagtattgtgagaacggctccctacattcgatatgcaaatcctacggcaagttcccggagaatcttgtcggggtctacatggcacaagttctcactgggcttgattatcttcatgaccaaggtgtcctccatggggatatcaaaggcgccaatatcctcactaccaaagatggtcaagtcaagttagccgactttggtgtttcaaccctcactgataaaaacaatatccttgctggtcctagcaaggacaagcagaaagacaaaaaggagaaagacaggcaagtctttgggactccttattggatggctccagaggtaatcgacatgtcgcaatcaaccactgcgtcggatatctggagcttaggctgcactgtcattgagctcttatctggaaagcccccctattatcacatgcagcccctacaagctctcttcgccatagtcaacgatgatcatcctcctctccccgaaggtgtttccttggtcgctagagactttctcatgcagtgcttccagaaggactccaaccttcgaatcaaagcaaagaagctccttaagcatagctggattaaggcttacaagagaaaagatgctcctgtcaccaaacctccgggcaattttgacgaagcagtcgaagaagtcaagcagtggaataaggccttagcttcgtcagataacaactttcgagcatcgtccagctcagaatccaatggacatccattccaggtcaagttacccatgcctatcacgaacaaggccccatttgaacttaaacccagacgcaccgctgaaggtttccaatctcccgaacccgccgatgatggtaattgggatgatgatttcgcaacctccatatcgccaagtgctctacaattatctcatcttaagccccaggataatttcggcggtcagctctctgcagaacgcctaaaagcattcgcgtctctggactattctcgcgatttctcatcaaactatacacagcaacctgctagcgatggtatgacatccaaaaggcctcagccgatagttgaagaagatccagcggagaagacaatccgaccgagccggaagctagtcagacctgtcaaagtcgacgatccgaagatccgccccgccaagacaccatctcctagaaaagtttcttcagcaagccctcgtaagcagcattcacgagcaaagagttcgagtggaaagccaatggggttcacaaaccggccagagctcgctcacagagaaaaaacagccgaggactactctgacctttttgacggcaacgacagtgctttcaaccaaaagctgaacttactaaggaagcctgatacaccccagcttttccatccttcagatcttaccagcctcccacgatcgaaatcctcgatcgaaatccagaaatttgctgaatcagacgaagaggacttttccgatgttttcggaccttctcagagtctggtagagaaagcagatagcgagcatggctctgaggatgataatgttatggtactctctaagctatcaaatggatcttggctgggcgatgacgaagacgaagacgatcctttcgcgtccatggaccctcgttgggataatatggactttgaggctaacattgcgcgcgatcgtcacgcccggttagcagaaagagtcgaggaacttgttcggtcgcttaagccaggacagagcgaagacaaactcctggatatatcagcaaaacttttggaaattctttgggaaagtcctgatgtgaagaatatgatcatcagcgcacatggactactgcccattctggagattcttgagccttgcacctttcaaagcaagggcgaaatgatcctaccactgctcaaggttgtcaatgctatcatactcgaggacgttgagcttcaagagaacctctgctttgtcggcggtattccaatcataaccaagttcgcagcactgaagtattctattgggatacggctagaggcagctgcatttatcagacaaatgtattcaacttcgacattgaccttgcagatgtttgtcagtgcgggtggtctgaatgttctcgttggctacttagacgaggattatgcagctcacagagacctcgttttaatcggcgtgaatggcatttggaatgtttttgagcttcagggaccaacaccgaaaaatgatttctgtcgtattttctcccggagcaacattcttgatcctttgagctttgtattgcagcgagtcttggccgagcaagctggaacggagggtgaaatggaggtggctcagctgattgaaggcagaattgccagcattttttaccttttctctcaagccgaaaactatgttaaagagctggtggcaaatcgcaaagtgttgaagagggttctcggcggcctgcgccgaatgacttctgctcaccaaattacaatgctgaaatttgtcagaaatctttcgatgctatccacgacactggacacactacactcggccgacgcaatcgatttgctcattgaattgcttgaacgaagtatgaggaagggccacccgcacttccgtgagatttccaatcaaatcctcaacatcattttcaacctatgtcgactaagcaaagagcgccaggaagatgcggctgttaacggcattgttcccattctactgaagattatgaagaccgatcggccaccgaaagaatttgctttgcctatcctatgcgatatggcgcactgtggacgcaaaggacgtaggtctctgtggcagaataaaggtcttcagttctacatctcgttactgaaagacccctactggcaagtaccagctctagactccattttcgtctggctacaagaagagactgcgaaggtagaggatcaccttatgaaaggaggatttagtgatgccattgcctcgtgctttcgtagtacgaaggctactgcattcgaccctaacctcttggaccctcttttgaagctgcttcgtctctcccctgtgctgggacgttccctggccagaattgacgtgtattctggcattactcgccgactcctgcacaagagaccggttgttcgatcaaacctcttacgtattgtcagaattatcctcgacaacagaggatcggagccccaggaaaagcagctgagcactttgttgatgactatcgagaaccttgccgataaggatcccgccttgttggtgcgaaaccttgcgctaaccgtcatagactag

SEQ ID NO: 19879 - protein, 1153 aa, Muscodor strobelii
  misc_feature: SGI Peptide ID NO. 566695
  misc_feature (10)..(276): Pfam Id: PF00069 Pfam Desc: Protein kinase domain
  misc_feature (10)..(276): Pfam Id: PF07714 Pfam Desc: Protein tyrosine kinase
  misc_feature (10)..(154): Pfam Id: PF07714 Pfam Desc: Protein tyrosine kinase
  misc_feature (187)..(264): Pfam Id: PF07714 Pfam Desc: Protein tyrosine kinase
  misc_feature (7)..(1148): NCBI GI: 145607237 Blast Desc: MGG_04100 [Magnaporthe grisea 70-15] gi|145014829|gb|EDJ99397.1| MGG_04100 [Magnaporthe grisea 70-15]
  misc_feature (7)..(1152): NCBI GI: 85102922 Blast Desc: NCU01335 [Neurospora crassa OR74A] gi|16944338|emb|CAC18225.2| related to septation (sepH) gene [Neurospora crassa] gi|28922966|gb|EAA32185.1| NCU01335 crassa
  misc_feature (48)..(1152): NCBI GI: 261352094 Blast Desc: cell division control protein [Verticillium albo-atrum VaMs.102]
  misc_feature (7)..(1142): NCBI GI: 156059402 Blast Desc: SS1G_03713 [Sclerotinia sclerotiorum 1980] gi|154701500|gb|EDO01239.1| SS1G_03713 [Sclerotinia sclerotiorum 1980]
  misc_feature (11)..(1152): NCBI GI: 256731880 Blast Desc: [Nectria haematococca mpVI 77-13-4]
  misc_feature (10)..(1152): NCBI GI: 46137731 Blast Desc: FG10381.1 [Gibberella zeae PH-1]
  misc_feature (56)..(1152): NCBI GI: 154310222 Blast Desc: BC1G_07031 [Botryotinia fuckeliana B05.10] gi|150851592|gb|EDN26785.1| BC1G_07031 [Botryotinia fuckeliana B05.10]
  misc_feature (7)..(1152): NCBI GI: 6531993 Blast Desc: septation [Emericella nidulans]
  misc_feature (7)..(1152): NCBI GI: 145256666 Blast Desc: An04g01130 [Aspergillus niger] gi|134058385|emb|CAK38570.1| protein product [Aspergillus niger]
  misc_feature (7)..(1148): NCBI GI: 242765875 Blast Desc: serine-threonine kinase SepH [Talaromyces stipitatus ATCC 10500] gi|218724258|gb|EED23675.1| serine-threonine kinase SepH [Talaromyces stipitatus ATCC 10500]
MAAALSLDHFRVGECLGKGAFGAVYKAIHWGTGQAVAIKQIKLDNLQKGEMRMFESEVELLKNLNHENIVKYIGFVKSPDTLHILLEYCENGSLHSICKSYGKFPENLVGVYMAQVLTGLDYLHDQGVLHGDIKGANILTTKDGQVKLADFGVSTLTDKNNILAGPSKDKQKDKKEKDRQVFGTPYWMAPEVIDMSQSTTASDIWSLGCTVIELLSGKPPYYHMQPLQALFAIVNDDHPPLPEGVSLVARDFLMQCFQKDSNLRIKAKKLLKHSWIKAYKRKDAPVTKPPGNFDEAVEEVKQWNKALASSDNNFRASSSSESNGHPFQVKLPMPITNKAPFELKPRRTAEGFQSPEPADDGNWDDDFATSISPSALQLSHLKPQDNFGGQLSAERLKAFASLDYSRDFSSNYTQQPASDGMTSKRPQPIVEEDPAEKTIRPSRKLVRPVKVDDPKIRPAKTPSPRKVSSASPRKQHSRAKSSSGKPMGFTNRPELAHREKTAEDYSDLFDGNDSAFNQKLNLLRKPDTPQLFHPSDLTSLPRSKSSIEIQKFAESDEEDFSDVFGPSQSLVEKADSEHGSEDDNVMVLSKLSNGSWLGDDEDEDDPFASMDPRWDNMDFEANIARDRHARLAERVEELVRSLKPGQSEDKLLDISAKLLEILWESPDVKNMIISAHGLLPILEILEPCTFQSKGEMILPLLKVVNAIILEDVELQENLCFVGGIPIITKFAALKYSIGIRLEAAAFIRQMYSTSTLTLQMFVSAGGLNVLVGYLDEDYAAHRDLVLIGVNGIWNVFELQGPTPKNDFCRIFSRSNILDPLSFVLQRVLAEQAGTEGEMEVAQLIEGRIASIFYLFSQAENYVKELVANRKVLKRVLGGLRRMTSAHQITMLKFVRNLSMLSTTLDTLHSADAIDLLIELLERSMRKGHPHFREISNQILNIIFNLCRLSKERQEDAAVNGIVPILLKIMKTDRPPKEFALPILCDMAHCGRKGRRSLWQNKGLQFYISLLKDPYWQVPALDSIFVWLQEETAKVEDHLMKGGFSDAIASCFRSTKATAFDPNLLDPLLKLLRLSPVLGRSLARIDVYSGITRRLLHKRPVVRSNLLRIVRIILDNRGSEPQEKQLSTLLMTIENLADKDPALLVRNLALTVID

SEQ ID NO: 19880 - DNA, 4165 bp, Muscodor strobelii; identical to SEQ ID NO: 19877
  misc_feature: SGI EST ID NO. CUFF.46551.0
  misc_feature: Variant of the nucleotide sequence at SEQ ID NO 19878

SEQ ID NO: 19881 - DNA, 2250 bp, Muscodor strobelii
  misc_feature: SGI cDNA ID NO. 566696
  misc_feature: Encodes the peptide sequence at SEQ ID NO 19882
atgaatactgatccgcatgttaccaacattgccactggtgcccgtcaccctcgacgcactcgtcaaggcaaacacgcacgccagaagcgcttcaaagcccgcaagtattgctctcagtatagtcgcacaggagcctttgatattttggagtatgattcccaagatgagaagcaagaagtcattgcttcgaaagagccaaaaccaccgcgttcaatgattgaggacggcatgacttgggctgagcgagtcgcctggagccctcatcaacggacgatggctcttccctcatccccagttattgatagatgcccggttattcaggatttcaaaacatcatctaaggacgaatggtggaaagagaagcctagccaggaaacgaacaccatagtcgatgttgagaccaaagccagccttaacagaaaacttattcgggagcatctcaaacggactcgtccattcgaaccacgagacgggccgtttgtcgtcacattctcccgctatcacactcgggagtctacgttcttccaacatagtgcgacctttgcagaggccgcaagattgctcagcaacgatgtgagcatccgtggtgtcacatatgacgaaaatgataaagactgtggacaatacatcattatcgacctcgcccaaggccaccaacagaacaatgaggcggcaaagaaacgtcttttctgcatttatctcgctatccgtgtatgggcttcctgccgtggagaggagaaatttgacgaaaataagactctgccagtgcttctccgcaataagtataacaacgagtcttcgaagactcattctgagcatcaagatacctcgccgcctaatcccaatatcactcatacggcggactatcacaatggcaaaaaccaagtcaaggatagcgacgaaggtacatcccgagaaactcgaggctatgttcttgagcctcagatgcctaatcccacatatggacagcttggcatcccactacccgacgacctcagtcagtcccagttcgagctgattacaaaaagttttcttgaggccgaatacgttctcaacaaggatgtgtggatcgagggccatcaggacaacgcgggcagatacattgttatcggacctcttttcaattctcatcaaagtgccaacgaaaactccgcgagactttggcaaatatttctcgacatcctcgaatgggctacggagggaccactgtattacgacatgccacttcctagttttcttagacaaaagcaggatcgcatattctcaagtgttcagagcacttttcaatctaagactgcggttttccctccacgtttttatgctcctccggcatcctatgtgccatcctccgccccagacgactgttcggtgcacgatgccaggagtcgagccctgacagacgagatacgtgccctaacagagcagaacaaagtcctgatatcacgtattaccgcccttaccgaaaaacttgagaaaaatcacctgtctcagcctcaagcctctacaccagcaaatgtacacagcgaccttcgtcgcccatgtaccgaggcagacgtacgttcacgttcctatacgcccccgcgctcccgcaacacatcccccgaatacgactacccgtacaaactaggaccagacggtatttaccgaaggcctcgcccctacctaagttacgacagcggagacgaatccagagacgaagcactcgcacgtgagatcaatcaatactgggccgagcatagaaggaccaacgaatatgagaatctaagtgacgacgactattactacaatccagactacgacgatcgcgttgattgccgtactatcaaatgcaaaggaaacgcagcgcacgaaccgttctcgcgctgcttagaatatgaacataacaccgacctgcgagtccctgtcaaggacagggaagacaagtggtcagaagtgtcttcgagaattgggtcagattgggaaaaatgcacggggactgaaacagagcagggtcgatgtggcgcaagtgatgcagatgcagatgtgtcaacaactgcacttgatcaagactcagagatagagatcgaggtagaacgcatcgaggatgaaaataccattgatcgggattcccaactccgggtgggcgaaccatcctgcgatgcggacgtcttgttagcagcaagcatcatggaagaagacagcgaccaaggctggggaacgatgttcgtcaagtgctcaacaaagcaaggagatgagcaagacgaaaattaa

SEQ ID NO: 19882 - protein, 749 aa, Muscodor strobelii
  misc_feature: SGI Peptide ID NO. 566696
MNTDPHVTNIATGARHPRRTRQGKHARQKRFKARKYCSQYSRTGAFDILEYDSQDEKQEVIASKEPKPPRSMIEDGMTWAERVAWSPHQRTMALPSSPVIDRCPVIQDFKTSSKDEWWKEKPSQETNTIVDVETKASLNRKLIREHLKRTRPFEPRDGPFVVTFSRYHTRESTFFQHSATFAEAARLLSNDVSIRGVTYDENDKDCGQYIIIDLAQGHQQNNEAAKKRLFCIYLAIRVWASCRGEEKFDENKTLPVLLRNKYNNESSKTHSEHQDTSPPNPNITHTADYHNGKNQVKDSDEGTSRETRGYVLEPQMPNPTYGQLGIPLPDDLSQSQFELITKSFLEAEYVLNKDVWIEGHQDNAGRYIVIGPLFNSHQSANENSARLWQIFLDILEWATEGPLYYDMPLPSFLRQKQDRIFSSVQSTFQSKTAVFPPRFYAPPASYVPSSAPDDCSVHDARSRALTDEIRALTEQNKVLISRITALTEKLEKNHLSQPQASTPANVHSDLRRPCTEADVRSRSYTPPRSRNTSPEYDYPYKLGPDGIYRRPRPYLSYDSGDESRDEALAREINQYWAEHRRTNEYENLSDDDYYYNPDYDDRVDCRTIKCKGNAAHEPFSRCLEYEHNTDLRVPVKDREDKWSEVSSRIGSDWEKCTGTETEQGRCGASDADADVSTTALDQDSEIEIEVERIEDENTIDRDSQLRVGEPSCDADVLLAASIMEEDSDQGWGTMFVKCSTKQGDEQDEN

SEQ ID NO: 19883 - DNA, 1356 bp, Muscodor strobelii
  misc_feature: SGI cDNA ID NO. 566697
  misc_feature: Encodes the peptide sequence at SEQ ID NO 19884
atgggtctccctctcttcactgcccctgtcgaatcagacatcccatctaagcccgccgcaaagagccctgtagacccagctcatggccgcaccccgatccgtcgcggcttcgagcgccgccgcactgcgcacgatgtagcccgcgatgtccgcgagcaccgcttgcgcatgcttgccactcttgagcccgacaacgatctcctcgctgcccaccccagcgcccgcaatgacgcctcgcggtcgtcttcgtcttcggcaagggcgagactcgaggcgcgacgtgcttcccgcctccgagaacaggccgagcaagcacgtattgacgaaatagccgaccatgaaatggctagagccttgcgccgagccaacgactccgacgaggatctgacaacagctcgtgagcgccacatggccgagcacgaagcggcacgacaacaagcagtcagccatcctcctatcctgatcacagcttcgtctgctaacctaccgtatgtgtaccaggctgccatgcacagagcagaacaaagaagaatcgagtcttcattgcgccacggcattggtcgttcgcgcccctccagtctcttgtctccgcattcgcacatccatccctcgccctatccatcctatcgaccacacactactctcccgcggcgcgacgatctgtctttcgcggatggtagtgacgacactgactggcgccgacctaccgatttgcttcgggccgcttcagcccgcgttcgttacgtcgatgggctcggagatcgagaccgcagcctgagtcctgatgccgacggagcttgggacactctgcagtccactcttaccccggatcctcagccccccagcgtcggctcctccttcgcctccactaatgcctctgccgcggcgtcgcagagtgccgaagcaacatctctcaacacctccatcaccgacacagagcctccgtgcgacccaatccctgataacgacgattctgatgccgaatacaccccggcctcgatgaccgctgaaaattggcgatcactgcgtcacacttccgactcggccgatcgctcaatcagcgctacctcggtaccgcgactgcgcgctgaatccgcaagaccatcccccccatatggcacgcggtcttacgctgacgtggctgccgacttgcaagaggagatgcagtcaaggcagtcgcccgaagcccctgatgtatccggcaccgctgccgaagccgagaggtggctgtcaggtatgcaccggataatacgcgggcttgcctcctcccgtgacattcccgatgagtggtggacgcaggctggtctgtcccgctccatgtcgtgggaagagggttcgatcccggaaggcatctag

SEQ ID NO: 19884 - protein, 451 aa, Muscodor strobelii
  misc_feature: SGI Peptide ID NO. 566697
  misc_feature (249)..(443): NCBI GI: 171692245 Blast Desc: protein product [Podospora anserina] gi|170946071|emb|CAP72872.1| protein product [Podospora anserina]
  misc_feature (249)..(443): NCBI GI: 116206732 Blast Desc: CHGG_02659 [Chaetomium globosum CBS 148.51] gi|88183256|gb|EAQ90724.1| CHGG_02659 [Chaetomium globosum CBS 148.51]
  misc_feature (249)..(445): NCBI GI: 39944180 Blast Desc: [Magnaporthe grisea 70-15] gi|145014830|gb|EDJ99398.1| [Magnaporthe grisea 70-15]
  misc_feature (249)..(446): NCBI GI: 121706590 Blast Desc: conserved [Aspergillus clavatus NRRL 1] gi|119399705|gb|EAW10131.1| conserved [Aspergillus clavatus NRRL 1]
  misc_feature (241)..(290): NCBI GI: 256731879 Blast Desc: NECHADRAFT_100665 [Nectria haematococca mpVI 77-13-4]
  misc_feature (249)..(446): NCBI GI: 145256659 Blast Desc: An04g01110 [Aspergillus niger] gi|134058383|emb|CAK38568.1| protein product [Aspergillus niger]
  misc_feature (249)..(440): NCBI GI: 212528626 Blast Desc: conserved [Penicillium marneffei ATCC 18224] gi|210073868|gb|EEA27955.1| conserved [Penicillium marneffei ATCC 18224]
  misc_feature (249)..(441): NCBI GI: 85102926 Blast Desc: NCU01336 [Neurospora crassa OR74A] gi|16944339|emb|CAC18226.2| [Neurospora crassa] gi|28922967|gb|EAA32186.1| [Neurospora crassa OR74A]
  misc_feature (249)..(440): NCBI GI: 169773883 Blast Desc: [Aspergillus oryzae RIB40] gi|83769271|dbj|BAE59408.1| protein product [Aspergillus oryzae]
  misc_feature (249)..(440): NCBI GI: 238491908 Blast Desc: conserved [Aspergillus flavus NRRL3357] gi|220697604|gb|EED53945.1| conserved [Aspergillus flavus NRRL3357]
MGLPLFTAPVESDIPSKPAAKSPVDPAHGRTPIRRGFERRRTAHDVARDVREHRLRMLATLEPDNDLLAAHPSARNDASRSSSSSARARLEARRASRLREQAEQARIDEIADHEMARALRRANDSDEDLTTARERHMAEHEAARQQAVSHPPILITASSANLPYVYQAAMHRAEQRRIESSLRHGIGRSRPSSLLSPHSHIHPSPYPSYRPHTTLPRRDDLSFADGSDDTDWRRPTDLLRAASARVRYVDGLGDRDRSLSPDADGAWDTLQSTLTPDPQPPSVGSSFASTNASAAASQSAEATSLNTSITDTEPPCDPIPDNDDSDAEYTPASMTAENWRSLRHTSDSADRSISATSVPRLRAESARPSPPYGTRSYADVAADLQEEMQSRQSPEAPDVSGTAAEAERWLSGMHRIIRGLASSRDIPDEWWTQAGLSRSMSWEEGSIPEGI

SEQ ID NO: 19885 - DNA, 2484 bp, Muscodor strobelii
  misc_feature: SGI EST ID NO. CUFF.46766.2
  misc_feature: Variant of the nucleotide sequence at SEQ ID NO 19883
aacttgatgtctggtatatctatttcctagtaacagtttcatgtacactcctttcccaagagatcgatgatttgatatcgaaacaggcagtatttcataaattgggtgatcattccaatttgtttgttgggggcagttgcgttgatcgtctagtctccctgcgtgccggctcttgcactctcgtatgacctggtcgcggtattcacatccatttcgttgcgattgaggcaggaactccacttctcagacgccactctgattggcgcgcagcacaatcgattggcgttgatcgcggacaggcggtgggtccggtacctctcgtgtaggcacgcgtcgcatgcagcgcgaagtcactgcgctctcgcctccgccgcccgcgtctgacgccccagcaccccagcatcgcgcagcggtcccttctgttatgaagaaagggcgacggagcagcacggtcgcatttcgccgccctcgtcaaactcgtcacctcccgccatcctcttttttatccaattccagccatcacccgcagaccttacccttcatcacctcatcaacctccaacccctcgaatcctctatcggtttcccatcgcatagccatcgcataaccgacaccacaaacggcgcatatccgtcgcgcatcgctgtgcatcatctccgttcattcattgccgtgtattttattttgcgagtgcctttgcgctgtgattttggtcgcctcccgccgtcgtcgccctgccagttgttcgttcgcggatcacgctcccactggtcctctcgcagcagtccaatccatacccctacccatcctgtctagtggtagcgttagccctgcaacgcacgcgcaacctcgctcactatgggtctccctctcttcactgcccctgtcgaatcagacatcccatctaagcccgccgcaaagagccctgtagacccagctcatggccgcaccccgatccgtcgcggcttcgagcgccgccgcactgcgcacgatgtagcccgcgatgtccgcgagcaccgcttgcgcatgcttgccactcttgagcccgacaacgatctcctcgctgcccaccccagcgcccgcaatgacgcctcgcggtcgtcttcgtcttcggcaagggcgagactcgaggcgcgacgtgcttcccgcctccgagaacaggccgagcaagcacgtattgacgaaatagccgaccatgaaatggctagagccttgcgccgagccaacgactccgacgaggatctgacaacagctcgtgagcgccacatggccgagcacgaagcggcacgacaacaagcagctgccatgcacagagcagaacaaagaagaatcgagtcttcattgcgccacggcattggtcgttcgcgcccctccagtctcttgtctccgcattcgcacatccatccctcgccctatccatcctatcgaccacacactactctcccgcggcgcgacgatctgtctttcgcggatggtagtgacgacactgactggcgccgacctaccgatttgcttcgggccgcttcagcccgcgttcgttacgtcgatgggctcggagatcgagaccgcagcctgagtcctgatgccgacggagcttgggacactctgcagtccactcttaccccggatcctcagccccccagcgtcggctcctccttcgcctccactaatgcctctgccgcggcgtcgcagagtgccgaagcaacatctctcaacacctccatcaccgacacagagcctccgtgcgacccaatccctgataacgacgattctgatgccgaatacaccccggcctcgatgaccgctgaaaattggcgatcactgcgtcacacttccgactcggccgatcgctcaatcagcgctacctcggtaccgcgactgcgcgctgaatccgcaagaccatcccccccatatggcacgcggtcttacgctgacgtggctgccgacttgcaagaggagatgcagtcaaggcagtcgcccgaagcccctgatgtatccggcaccgctgccgaagccgagaggtggctgtcaggtatgcaccggataatacgcgggcttgcctcctcccgtgacattcccgatgagtggtggacgcaggctggtctgtcccgctccatgtcgtgggaagagggttcgatcccggaaggcatctagcagggacagaaatattgaggggaaaaatattgtattttatgagatggttcattttgacgtggcatggcgaggcgttcaggtcgaatttcgaattggcgaaaacacgtgcgcaagattacgaaaaaagagcttggtgggatatctgctgaaaagatctggaggcggtctcagctggaagttttcatttacgacagctatctcgatgaagcatttgcttttcttgctatacttctacgctgtacatattacatttgacgaaattgaagctggccagacagggaaattgtctgatggcctttgcttggaacacgaaaattgtttttctctcac

SEQ ID NO: 19886 - DNA, 1230 bp, Muscodor strobelii
  misc_feature: SGI cDNA ID NO. 566698
  misc_feature: Elevated expression when VOC is produced
  misc_feature: Encodes the peptide sequence at SEQ ID NO 19887
atgattgagctgggactcgcccgtatcaatgccctccttaaaaataccccacaaacatggaaagccatccacgttgccggcactaatggcaagggctcaatatgtgcatatctcaataatatgctcgccgccaatcatgtgttgcgtggcaaattcacctcacctcatctgatagaccggtgggactgcatcaccataaatgacaacgccgtttcggagtccaagtttcgccattttgaaaatcttatcatcaagcgaaacgaagaccagcgtttaggcgccagcgagtttgagttgctgacagccactgctttcgaaattttcgaggctgagaagatcgaagtcggtgttattgaggttggcttgggtggaagacttgatgccaccaatgcgttgaagcacaagtccgccactatcatatctaagattgggctagatcaccagtccttcttaggcaacacccttgaagagatagccttacagaaggctgggattatgcaagccggcgtaccttgtgttgtcgatgccagcaacgcatcaccagtcctagaggcggtacgagtgaatgctggtactctcaaaggggtcacggttcatcctgcagacctcaaaactacccctttaccctcggaacctgagtatcaagaactcgagcctcatcaacagcagaatttactgtgtgcatataatgcgttccgactcgcatttccctctaataccatgtctacagacggccttctcacggcagctatccaagcgacctggccgggtagactacaatcaatcagcgttgaacctctctgcggtaagacggaaaatgcgcttctagacggtgctcataacccacagtccgcagaggcgctctcgtcatacgttcagaaacggttgcgtaccgaaggtaaacctgtaacatgggttctcgctgcgtcagcggggaaagatctagcaaaaatattgaaaataattttacgggatgacgatcgcgtggctgctgtagaattcggccccgttgatggcatgccttgggtgaagcctatggcaacgtcgagcattcttcaagctgtcgatgatcttgctgtttcgatccctaaacgccacgatgcgaaaggagagctgataggggccctaaaatgggctaatgaaacatctgctggtggtcctcttgtgatcgccggcagtctatatctggtgtctgatattctcaagctcttgcgagcgtccgaatcataa

SEQ ID NO: 19887 - protein, 409 aa, Muscodor strobelii
  misc_feature: SGI Peptide ID NO. 566698
  misc_feature (1)..(409): NCBI GI: 85102930 Blast Desc: NCU01337 [Neurospora crassa OR74A] gi|11595607|emb|CAC18227.1| related to tetrahydrofolylpolyglutamate synthase [Neurospora crassa] crassa
  misc_feature (1)..(408): NCBI GI: 169773881 Blast Desc: [Aspergillus oryzae RIB40] gi|238491906|ref|XP_002377190.1| dihydrofolate synthetase Fol3 [Aspergillus flavus NRRL3357] gi|83769270|dbj|BAE59407.1| protein
  misc_feature (1)..(409): NCBI GI: 115398285 Blast Desc: conserved [Aspergillus terreus NIH2624] gi|114192925|gb|EAU34625.1| conserved [Aspergillus terreus NIH2624]
  misc_feature (1)..(405): NCBI GI: 67528372 Blast Desc: AN4384.2 [Aspergillus nidulans FGSC A4] gi|40741111|gb|EAA60301.1| AN4384.2 [Aspergillus nidulans FGSC A4] gi|259482806|tpe|CBF77637.1| TPA: FPGS, folylpolyglutamate
  misc_feature (1)..(390): NCBI GI: 171692247 Blast Desc: protein product [Podospora anserina] gi|170946072|emb|CAP72873.1| protein product [Podospora anserina]
  misc_feature (1)..(408): NCBI GI: 255949836 Blast Desc: Pc22g17760 [Penicillium chrysogenum Wisconsin 54-1255] gi|211592702|emb|CAP99064.1| Pc22g17760 [Penicillium chrysogenum Wisconsin 54-1255]
  misc_feature (1)..(405): NCBI GI: 39976143 Blast Desc: MGG_06002 [Magnaporthe grisea 70-15] gi|145011724|gb|EDJ96380.1| MGG_06002 [Magnaporthe grisea 70-15]
  misc_feature (1)..(408): NCBI GI: 145256662 Blast Desc: An04g01120 [Aspergillus niger] gi|134058384|emb|CAK38569.1| protein product [Aspergillus niger]
  misc_feature (1)..(408): NCBI GI: 212528632 Blast Desc: dihydrofolate synthetase Fol3 [Penicillium marneffei ATCC 18224] gi|210073871|gb|EEA27958.1| dihydrofolate synthetase Fol3 [Penicillium marneffei ATCC 18224]
  misc_feature (1)..(409): NCBI GI: 119188109 Blast Desc: CIMG_04102 [Coccidioides immitis RS]
  misc_feature (2)..(405): SWISSPROT Homolog: EC 6.3.2.17 Tetrahydrofolate synthase
  misc_feature: Useful for introducing or modulating the production of volatile compounds
MIELGLARINALLKNTPQTWKAIHVAGTNGKGSICAYLNNMLAANHVLRGKFTSPHLIDRWDCITINDNAVSESKFRHFENLIIKRNEDQRLGASEFELLTATAFEIFEAEKIEVGVIEVGLGGRLDATNALKHKSATIISKIGLDHQSFLGNTLEEIALQKAGIMQAGVPCVVDASNASPVLEAVRVNAGTLKGVTVHPADLKTTPLPSEPEYQELEPHQQQNLLCAYNAFRLAFPSNTMSTDGLLTAAIQATWPGRLQSISVEPLCGKTENALLDGAHNPQSAEALSSYVQKRLRTEGKPVTWVLAASAGKDLAKILKIILRDDDRVAAVEFGPVDGMPWVKPMATSSILQAVDDLAVSIPKRHDAKGELIGALKWANETSAGGPLVIAGSLYLVSDILKLLRASES

SEQ ID NO: 19888 - DNA, 1710 bp, Muscodor strobelii
  misc_feature: SGI EST ID NO. CUFF.46554.0
  misc_feature: Variant of the nucleotide sequence at SEQ ID NO 19886
cagcacatacagcatcaaacatctccatatcacacattgcaacaacccgatgactcattcctcagtgtaaacaagttaaagagcacaaagacacaagcaacgacgacacaggcggcgacacatgaaatttttatgggcttggcgtctcacaggacatttccaacccgccatctgtctggcgcgggccgccgacatcgccgagcacaccaaaggctttctgacatattgatagaaacggagatgagctgaacacaacaacgcccaattactttcagagaagatgattgagctgggactcgcccgtatcaatgccctccttaaaaataccccacaaacatggaaagccatccacgttgccggcactaatggcaagggctcaatatgtgcatatctcaataatatgctcgccgccaatcatgtgttgcgtggcaaattcacctcacctcatctgatagaccggtgggactgcatcaccataaatgacaacgccgtttcggagtccaagtttcgccattttgaaaatcttatcatcaagcgaaacgaagaccagcgtttaggcgccagcgagtttgagttgctgacagccactgctttcgaaattttcgaggctgagaagatcgaagtcggtgttattgaggttggcttgggtggaagacttgatgccaccaatgcgttgaagcacaagtccgccactatcatatctaagattgggctagatcaccagtccttcttaggcaacacccttgaagagatagccttacagaaggctgggattatgcaagccggcgtaccttgtgttgtcgatgccagcaacgcatcaccagtcctagaggcggtacgagtgaatgctggtactctcaaaggggtcacggttcatcctgcagacctcaaaactacccctttaccctcggaacctgagtatcaagaactcgagcctcatcaacagcagaatttactgtgtgcatataatgcgttccgactcgcatttccctctaataccatgtctacagacggccttctcacggcagctatccaagcgacctggccgggtagactacaatcaatcagcgttgaacctctctgcggtaagacggaaaatgcgcttctagacggtgctcataacccacagtccgcagaggcgctctcgtcatacgttcagaaacggttgcgtaccgaaggtaaacctgtaacatgggttctcgctgcgtcagcggggaaagatctagcaaaaatattgaaaataattttacgggatgacgatcgcgtggctgctgtagaattcggccccgttgatggcatgccttgggtgaagcctatggcaacgtcgagcattcttcaagctgtcgatgatcttgctgtttcgatccctaaacgccacgatgcgaaaggagagctgataggggccctaaaatgggctaatgaaacatctgctggtggtcctcttgtgatcgccggcagtctatatctggtgtctgatattctcaagctcttgcgagcgtccgaatcataaaagtgtatgtttttggttccaaccggactcaactccggtttcacgaagactactcatctatccatatgacttggtgtctgtttgcaccgttatgactgtatataaacctgtgacatataagatcttacttgaacatacaatggcccaagcatgatcattgcgaaatggcatgctaagacggaatgataacatgaagcctg

SEQ ID NO: 19889 - DNA, 771 bp, Muscodor strobelii
  misc_feature: SGI cDNA ID NO. 566699
  misc_feature: Encodes the peptide sequence at SEQ ID NO 19890
atgacaataattaggcgcatgacagcgtctccgagacacttgatcataatatgctgccacggcatctggcgaggtggtccgacaaaaggcttcgatgaagcagagtggctcatcgcccctttccaagcgggggagacgtcgactttcattgagcatatcaaagctggactgcgcgttttgcagaaagatgaatgttcttttttggtgttttctggcggcccaacacgaagagagacagaactgtccgaagcagagagttacttcaagctcgcagaggccaacgattacttcggcatctgcgaccctaagtttgctattgcaaggatcctggtcgaaagttctgcgctcgactcctactccaacgtgctgatgtctctcggtctattcttccacaacactcataccttccccgagaagataacaatcgtcagccatggcttcaagaaagaacgacttgtcgactgtcattgtgccgctataggttttcctctaagccgtgtggatttcgttggagttgatccaccgggtatgattgatggatctaacgtggctgctatcgaggggaatgagaaagctgtccttgagtggcgagcggatcctcatggaaagagtgaggggttgatcgggaagaggaagatccggaatccgtggtgtataccgcagcgtatcttttatttggactatgatcgcgatcgcagtggtgttcagtggaccttagctgaggatggccaagaatacctcgtcgaggatcagcttggacttcacggttag

SEQ ID NO: 19890 - protein, 256 aa, Muscodor strobelii
  misc_feature: SGI Peptide ID NO. 566699
  misc_feature (10)..(224): NCBI GI: 256732267 Blast Desc: NECHADRAFT_104563 [Nectria haematococca mpVI 77-13-4]
  misc_feature (10)..(243): NCBI GI: 261352091 Blast Desc: conserved [Verticillium albo-atrum VaMs.102]
  misc_feature (12)..(254): NCBI GI: 145607239 Blast Desc: MGG_12148 [Magnaporthe grisea 70-15] gi|145014831|gb|EDJ99399.1| MGG_12148 [Magnaporthe grisea 70-15]
  misc_feature (7)..(249): NCBI GI: 164426300 Blast Desc: NCU01338 [Neurospora crassa OR74A] gi|157071279|gb|EAA32188.2| conserved [Neurospora crassa OR74A]
  misc_feature (13)..(229): NCBI GI: 46137725 Blast Desc: FG10378.1 [Gibberella zeae PH-1]
  misc_feature (12)..(249): NCBI GI: 171692247 Blast Desc: protein product [Podospora anserina] gi|170946072|emb|CAP72873.1| protein product [Podospora anserina]
  misc_feature (7)..(249): NCBI GI: 11595608 Blast Desc: conserved [Neurospora crassa]
  misc_feature (13)..(214): NCBI GI: 145242166 Blast Desc: An09g04130 [Aspergillus niger] gi|134078274|emb|CAK96855.1| protein product [Aspergillus niger]
  misc_feature (11)..(214): NCBI GI: 67524105 Blast Desc: AN2510.2 [Aspergillus nidulans FGSC A4] gi|40744839|gb|EAA63995.1| AN2510.2 [Aspergillus nidulans FGSC A4] gi|259487936|tpe|CBF86998.1| TPA: DUF218 domain protein FGSC
  misc_feature (13)..(214): NCBI GI: 255938291 Blast Desc: Pc13g15200 [Penicillium chrysogenum Wisconsin 54-1255] gi|211584536|emb|CAP92589.1| Pc13g15200 [Penicillium chrysogenum Wisconsin 54-1255]
MTIIRRMTASPRHLIIICCHGIWRGGPTKGFDEAEWLIAPFQAGETSTFIEHIKAGLRVLQKDECSFLVFSGGPTRRETELSEAESYFKLAEANDYFGICDPKFAIARILVESSALDSYSNVLMSLGLFFHNTHTFPEKITIVSHGFKKERLVDCHCAAIGFPLSRVDFVGVDPPGMIDGSNVAAIEGNEKAVLEWRADPHGKSEGLIGKRKIRNPWCIPQRIFYLDYDRDRSGVQWTLAEDGQEYLVEDQLGLHG

SEQ ID NO: 19891 - DNA, 2783 bp, Muscodor strobelii
  misc_feature: SGI EST ID NO. CUFF.46690.1
  misc_feature: Variant of the nucleotide sequence at SEQ ID NO 19889
acagtctattcttcgacatcaatctaagtccagatgcgcatgcttgggacgtagaacctagtactggcttcacatacatacgaaccgactaggaatcgtatcaaaagctcccttccattatcttcacttcaattgcaatgtcactcagcgcatgacagcgtctccgagacacttgatcataatatgctgccacggcatctggcgaggtggtccgacaaaaggcttcgatgaagcagagtggctcatcgcccctttccaagcgggggagacgtcgactttcattgagcatatcaaagctggactgcgcgttttgcagaaagatgaatgttcttttttggtgttttctggcggcccaacacgaagagagacagaactgtccgaagcagagagttacttcaagctcgcagaggccaacgattacttcggcatctgcgaccctaagtttgctattgcaaggatcctggtcgaaagttctgcgctcgactcctactccaacgtgctgatgtctctcggtctattcttccacaacactcataccttccccgagaagataacaatcgtcagccatggcttcaagaaagaacgacttgtcgactgtcattgtgccgctataggttttcctctaagccgtgtggatttcgttggagttgatccaccgggtatgattgatggatctaacgtggctgctatcgaggggaatgagaaagctgtccttgagtggcgagcggatcctcatggaaagagtgaggggttgatcgggaagaggaagatccggaatccgtggtgtataccgcagcgtatcttttatttggactatgatcgcgatcgcagtggtgttcagtggaccttagctgaggatggccaagaatacctcgtcgaggatgttcctcagccttggtcctttggtgagaagacacacaagacgccgctaccgaacaaatcgaaacctagcagcttggacttcacggttagacctggaaccctagatcttcgatgataccgccttgtcagaggcatcaaacgacttcaccgtatccaacacaaatctcgtcgcatccttgagcatctcatcattgaacacgtgcccaactcccggatacagattatcctcgacgtagacgtttccctccttccaccagccgcccgtggcattcttgaagaaatcgagaaagtctttaccatctttatacggaacaagtctatcggcacctccggacagaatctgtatcctcttccctttgatcctcgagtctaatatcggccgtattctgtccttctcagcatccgaggggtccttagggactacccctgtaccgaaaagaagacccttcgcgtcgaacttcctacacgtcgcgacgagcgactcggggaagtctttactccctatgaatgacgcgccctcgtctgcggtgtacgtctggagtttagaccggcgtgctcggtctttcatcaagcctgcgaataatcagccatgcatttctataccaaagacttcaccctctcccccctccaaagcttactcatataatccggacaaccaataacaacaactcccgcagtaaccctcggctcagcaaaaagcagctgccaagtcacatgaccgcccaaactaatgcccaacacaacattctgatcaattctcctctttccctcagcgggcgcacccggtccatcaccagctccaaagatataggacggcagcgcatccatgagatgcatggtatccaccactgtgccgtttaccgttgtgaacatatcctgggcatgtgtcttattccccttgttccaggattcgttgttcagatcgtttactaggcgggacccgtggtttcgcacgtcgattgatactgctattaatccccgagggcttgcactggaggtgatggtgttgttgtacgtggagatcatatgatgcgcaatgtacgccatgtcttcgcgcttgcgaagacggccgtgttggagccataagcaggatattgaggttgaggtcgggggtagctctgaaagtccgtagatgtcgacttggagaccggtgatgtgtagtgtggttttggagactgtgggggcggtttgggtggcggttagggggttgtagtctgtcattttgatggggtattgagaatctaagggttcttggaaatggtaaactcgagattatgagatttgtaaaaatgagattctgtttacattgatataaagagtgatctcatgaattgcatgatgtcgttgagttgagcgatctcggcttggcaatctccattttggcggggttcgaacctcgggccgttgcatgacgggcgaggacgggtacaccagccggatggatccgacatctcgttacatagcaggtacctcatctcaaggcggtttggggtaatggttaaatcgaatggctcgtttcattgtaggtaacaacttgactgtgtcaagtctgaggcgccatattgaacgttgaacgatatatgcggtcgctcatctcggatgacgacacctgtagggaaaaaagcgccgctgggctgggttgggttttatctactacatttttgaggcgcagcgctttatcgagacgttaaatagacagcaagaatctcgtgaattccgagtttcgatagcttcgccattgttttaatgtgagctcgtattcagattcaagatagccatctcgaaacgacccccagcggacttgtaggttaaaggagtagtgagggattctcgggaatgcataagggtgtgtattccctcaattcaattaggaaagctacatatttgaaaaggaaagaaag

SEQ ID NO: 19892 - DNA, 1056 bp, Muscodor strobelii
  misc_feature: SGI cDNA ID NO. 566700
  misc_feature: Encodes the peptide sequence at SEQ ID NO 19893
atgacagactacaaccccctaaccgccacccaaaccgcccccacagtctccaaaaccacactacacatcaccggtctccaagtcgacatctacggactttcagagctacccccgacctcaacctcaatatcctgcttatggctccaacacggccgtcttcgcaagcgcgaagacatggcgtacattgcgcatcatatgatctccacgtacaacaacaccatcacctccagtgcaagccctcggggattaatagcagtatcaatcgacgtgcgaaaccacgggtcccgcctagtaaacgatctgaacaacgaatcctggaacaaggggaataagacacatgcccaggatatgttcacaacggtaaacggcacagtggtggataccatgcatctcatggatgcgctgccgtcctatatctttggagctggtgatggaccgggtgcgcccgctgagggaaagaggagaattgatcagaatgttgtgttgggcattagtttgggcggtcatgtgacttggcagctgctttttgctgagccgagggttactgcgggagttgttgttattggttgtccggattatatgagcttgatgaaagaccgagcacgccggtctaaactccagacgtacaccgcagacgagggcgcgtcattcatagggagtaaagacttccccgagtcgctcgtcgcgacgtgtaggaagttcgacgcgaagggtcttcttttcggtacaggggtagtccctaaggacccctcggatgctgagaaggacagaatacggccgatattagactcgaggatcaaagggaagaggatacagattctgtccggaggtgccgatagacttgttccgtataaagatggtaaagactttctcgatttcttcaagaatgccacgggcggctggtggaaggagggaaacgtctacgtcgaggataatctgtatccgggagttgggcacgtgttcaatgatgagatgctcaaggatgcgacgagatttgtgttggatacggtgaagtcgtttgatgcctctgacaaggcggtatcatcgaagatctag

SEQ ID NO: 19893 - protein, 351 aa, Muscodor strobelii
  misc_feature: SGI Peptide ID NO. 566700
  misc_feature (6)..(339): NCBI GI: 261352090 Blast Desc: conserved [Verticillium albo-atrum VaMs.102]
  misc_feature (6)..(351): NCBI GI: 116206738 Blast Desc: CHGG_02662 [Chaetomium globosum CBS 148.51] gi|88183259|gb|EAQ90727.1| CHGG_02662 [Chaetomium globosum CBS 148.51]
  misc_feature (5)..(337): NCBI GI: 169597297 Blast Desc: SNOG_01433 [Phaeosphaeria nodorum SN15] gi|111069962|gb|EAT91082.1| SNOG_01433 [Phaeosphaeria nodorum SN15]
  misc_feature (1)..(338): NCBI GI: 46137723 Blast Desc: FG10377.1 [Gibberella zeae PH-1]
  misc_feature (13)..(337): NCBI GI: 171692249 Blast Desc: protein product [Podospora anserina] gi|170946073|emb|CAP72874.1| protein product [Podospora anserina]
  misc_feature (15)..(342): NCBI GI: 85102938 Blast Desc: NCU01339 [Neurospora crassa OR74A] gi|16944340|emb|CAC18229.2| [Neurospora crassa] gi|28922970|gb|EAA32189.1| [Neurospora crassa OR74A]
  misc_feature (5)..(339): NCBI GI: 225685124 Blast Desc: conserved [Paracoccidioides brasiliensis Pb03]
  misc_feature (5)..(339): NCBI GI: 226294441 Blast Desc: conserved [Paracoccidioides brasiliensis Pb18]
  misc_feature (11)..(346): NCBI GI: 255945171 Blast Desc: Pc20g08300 [Penicillium chrysogenum Wisconsin 54-1255] gi|211588088|emb|CAP86159.1| Pc20g08300 [Penicillium chrysogenum Wisconsin 54-1255]
  misc_feature (1)..(348): NCBI GI: 67525971 Blast Desc: AN3443.2 [Aspergillus nidulans FGSC A4] gi|40743797|gb|EAA62983.1| AN3443.2 [Aspergillus nidulans FGSC A4]
MTDYNPLTATQTAPTVSKTTLHITGLQVDIYGLSELPPTSTSISCLWLQHGRLRKREDMAYIAHHMISTYNNTITSSASPRGLIAVSIDVRNHGSRLVNDLNNESWNKGNKTHAQDMFTTVNGTVVDTMHLMDALPSYIFGAGDGPGAPAEGKRRIDQNVVLGISLGGHVTWQLLFAEPRVTAGVVVIGCPDYMSLMKDRARRSKLQTYTADEGASFIGSKDFPESLVATCRKFDAKGLLFGTGVVPKDPSDAEKDRIRPILDSRIKGKRIQILSGGADRLVPYKDGKDFLDFFKNATGGWWKEGNVYVEDNLYPGVGHVFNDEMLKDATRFVLDTVKSFDASDKAVSSKI

SEQ ID NO: 19894 - DNA, 2899 bp, Muscodor strobelii
  misc_feature: SGI EST ID NO. CUFF.46691.2
  misc_feature: Variant of the nucleotide sequence at SEQ ID NO 19892
ctttctttccttttcaaatatgtagctttcctaattgaattgagggaatacacacccttatgcattcccgagaatccctcactactcctttaacctacaagtccgctgggggtcgtttcgagatggctatcttgaatctgaatacgagctcacattaaaacaatggcgaagctatcgaaactcggaattcacgagattcttgctgtctatttaacgtctcgataaagcgctgcgcctcaaaaatgtagtagataaaacccaacccagcccagcggcgcttttttccctacaggtgtcgtcatccgagatgagcgaccgcatatatcgttcaacgttcaatatggcgcctcagacttgacacagtcaagttgttacctacaatgaaacgagccattcgatttaaccattaccccaaaccgccttgagatgaggtacctgctatgtaacgagatgtcggatccatccggctggtgtacccgtcctcgcccgtcatgcaacggcccgaggttcgaaccccgccaaaatggagattgccaagccgagatcgctcaactcaacgacatcatgcaattcatgagatcactctttatatcaatgtaaacagaatctcatttttacaaatctcataatctcgagtttaccatttccaagaacccttagattctcaataccccatcaaaatgacagactacaaccccctaaccgccacccaaaccgcccccacagtctccaaaaccacactacacatcaccggtctccaagtcgacatctacggactttcagagctacccccgacctcaacctcaatatcctgcttatggctccaacacggccgtcttcgcaagcgcgaagacatggcgtacattgcgcatcatatgatctccacgtacaacaacaccatcacctccagtgcaagccctcggggattaatagcagtatcaatcgacgtgcgaaaccacgggtcccgcctagtaaacgatctgaacaacgaatcctggaacaaggggaataagacacatgcccaggatatgttcacaacggtaaacggcacagtggtggataccatgcatctcatggatgcgctgccgtcctatatctttggagctggtgatggaccgggtgcgcccgctgagggaaagaggagaattgatcagaatgttgtgttgggcattagtttgggcggtcatgtgacttggcagctgctttttgctgagccgagggttactgcgggagttgttgttattggttgtccggattatatgagcttgatgaaagaccgagcacgccggtctaaactccagacgtacaccgcagacgagggcgcgtcattcatagggagtaaagacttccccgagtcgctcgtcgcgacgtgtaggaagttcgacgcgaagggtcttcttttcggtacaggggtagtccctaaggacccctcggatgctgagaaggacagaatacggccgatattagactcgaggatcaaagggaagaggatacagattctgtccggaggtgccgatagacttgttccgtataaagatggtaaagactttctcgatttcttcaagaatgccacgggcggctggtggaaggagggaaacgtctacgtcgaggataatctgtatccgggagttgggcacgtgttcaatgatgagatgctcaaggatgcgacgagatttgtgttggatacggtgaagtcgtttgatgcctctgacaaggcggtatcatcgaagatctagggttccaggtctaaccgtgaagtccaagctgctaggtttcgatttgttcggtagcggcgtcttgtgtgtcttctcaccaaaggaccaaggctgaggaacatcctcgacgaggtattcttggccatcctcagctaaggtccactgaacaccactgcgatcgcgatcatagtccaaataaaagatacgctgcggtatacaccacggattccggatcttcctcttcccgatcaacccctcactctttccatgaggatccgctcgccactcaaggacagctttctcattcccctcgatagcagccacgttagatccatcaatcatacccggtggatcaactccaacgaaatccacacggcttagaggaaaacctatagcggcacaatgacagtcgacaagtcgttctttcttgaagccatggctgacgattgttatcttctcggggaaggtatgagtgttgtggaagaatagaccgagagacatcagcacgttggagtaggagtcgagcgcagaactttcgaccaggatccttgcaatagcaaacttagggtcgcagatgccgaagtaatcgttggcctctgcgagcttgaagtaactctctgcttcggacagttctgtctctcttcgtgttgggccgctagaagatgatcgttttagtacgtaatcataagagaagctcaacagtagaataaagatgggtgatacttgtactgtcacaaactattaccgcttgaagtgagactcacccagaaaacaccaaaaaagaacattcatctttctgcaaaacgcgcagtccagctttgatatgctcaatgaaagtcgacgtctcccccgcttggaaaggggcgatgagccactctgcttcatcgaagccttttgtcggaccacctcgccagatgccgtggcagcatattatgatcaagtgtctcggagacgctgtcatgcgcctaattattgtcattttctattggatctattggagacgttgtggtcaatggtgggaggacaacagaactcactgagtgacattgcaattgaagtgaagataatggaagggagcttttgatacgattcctagtcggttcgtatgtatgtgaagccagtactaggttctacgtcccaagcatgcgcatctggacttagattgatgtcgaagaatagactgt

SEQ ID NO: 19895 - DNA, 852 bp, Muscodor strobelii
  misc_feature: SGI cDNA ID NO. 566701
  misc_feature: Elevated expression when VOC is produced
  misc_feature: Encodes the peptide sequence at SEQ ID NO 19896
atgaaacaagacaaaggtcctgagccatacactgaatcagagaccgaagaaacgttcatgtgcggcgttgaacccgtctgtgccgaacccgtctttcccgctggaacggatgagcgtcagttatatctacaaaaagagctcgacagctggcaagcagcacatgatgcgactacaataaaagattggtctcgactaggcgctttttacttcaacattctcgccacatatcataccatggcgtctatcttagtgaataccctgacatggcctgcctgcgaaacaatctacgacttccacatcaacaagtggttgactctgatcacgcaattaatcggtatctatactgaccaccggactgacgaatcgcaatggcatcacgatctaatgagagaagtccccgacaaagtctcatcgacaacaggggacaaggggtggatccccttgctctatttcgtgggaatcaaatgtcgcgtacatcgcatcaggaagcaagccattatgctgctaaatgctgtaccccataaagaggggatgtgggatagtgacctcatcagcgctgttatcgaagaagttatgaggattgaagagggtgatttctacgttggtcttgataaaggcgacgacttccttcctagcgatatcccgactgcggaagattttacactgccatctttaccagagaataatcgtttgatcgatgtcaagattgggttaccggagaatccggaggggatcatgacattgaactacggggtaagaaatgaggaggatttccagacgagacgatgcatgaagttctatgacttgagtacgcaggtctggtatgatacgggagacttctacagtacctag

SEQ ID NO: 19896 - protein, 283 aa, Muscodor strobelii
  misc_feature: SGI Peptide ID NO. 566701
  misc_feature (24)..(248): NCBI GI: 119476592 Blast Desc: C6 zinc finger domain protein [Neosartorya fischeri NRRL 181] gi|119407363|gb|EAW17312.1| C6 zinc finger domain protein [Neosartorya fischeri NRRL 181]
  misc_feature (24)..(270): NCBI GI: 70996861 Blast Desc: conserved [Aspergillus fumigatus Af293] gi|66850821|gb|EAL91147.1| conserved [Aspergillus fumigatus Af293] gi|159127084|gb|EDP52200.1| conserved [Aspergillus A1163]
  misc_feature (70)..(277): NCBI GI: 256729146 Blast Desc: NECHADRAFT_80102 [Nectria haematococca mpVI 77-13-4]
  misc_feature (38)..(277): NCBI GI: 242821979 Blast Desc: conserved [Talaromyces stipitatus ATCC 10500] gi|218712712|gb|EED12137.1| conserved [Talaromyces stipitatus ATCC 10500]
  misc_feature (33)..(274): NCBI GI: 212533391 Blast Desc: conserved [Penicillium marneffei ATCC 18224] gi|210072216|gb|EEA26305.1| conserved [Penicillium marneffei ATCC 18224]
  misc_feature (40)..(279): NCBI GI: 242798010 Blast Desc: conserved [Talaromyces stipitatus ATCC 10500] gi|218716425|gb|EED15846.1| conserved [Talaromyces stipitatus ATCC 10500]
  misc_feature (72)..(253): NCBI GI: 255936121 Blast Desc: Pc13g06530 [Penicillium chrysogenum Wisconsin 54-1255] gi|211583707|emb|CAP91722.1| Pc13g06530 [Penicillium chrysogenum Wisconsin 54-1255]
  misc_feature (77)..(276): NCBI GI: 261354220 Blast Desc: C6 zinc finger domain-containing protein [Verticillium albo-atrum VaMs.102]
  misc_feature (43)..(249): NCBI GI: 256728964 Blast Desc: NECHADRAFT_80151 [Nectria haematococca mpVI 77-13-4]
  misc_feature (38)..(260): NCBI GI: 145242388 Blast Desc: An09g04980 [Aspergillus niger] gi|134078359|emb|CAK40351.1| protein product [Aspergillus niger]
  misc_feature: Useful for introducing or modulating the production of volatile compounds
MKQDKGPEPYTESETEETFMCGVEPVCAEPVFPAGTDERQLYLQKELDSWQAAHDATTIKDWSRLGAFYFNILATYHTMASILVNTLTWPACETIYDFHINKWLTLITQLIGIYTDHRTDESQWHHDLMREVPDKVSSTTGDKGWIPLLYFVGIKCRVHRIRKQAIMLLNAVPHKEGMWDSDLISAVIEEVMRIEEGDFYVGLDKGDDFLPSDIPTAEDFTLPSLPENNRLIDVKIGLPENPEGIMTLNYGVRNEEDFQTRRCMKFYDLSTQVWYDTGDFYST

SEQ ID NO: 19897 - DNA, 4632 bp, Muscodor strobelii
  misc_feature: SGI EST ID NO. CUFF.46687.0
  misc_feature: Variant of the nucleotide sequence at SEQ ID NO 19895
gcgcacctgtccaattgacctgggaggattagcgatgccgtcaatctggtggagccaaggtgattcccaaaataatccaacgcagcaacatgagcatccaatcataacctacgaaatgcgagccgcccaatcggagattttgtaggtcccccagcgttatggcgtacaagcgaatcagagtaaagcaagggagcgagcaccagttatctagacgacgacaaaggtgagacgacaagctgagaagactttccggcacctaccctttcttagtacagctcttcaatgaacctctgtcgtctacattgcgcgaaattggcctaagtcgttcatcaggagcctatcctttagtattgagaccccactaatcgacgacatggttagccaaggcggtccgaagaagaaagtgaagacgggatgtcgtacatgcaaaactcgtcgggtcaaatgtgatgaaggtcgcccggcctgccatcgctgcgtttcaactgggcgaacgtgcgatggctatggtgtatggggtggcggtgggaacacactgacacacagatcagctgctgcaaggacagctttgaaagctagctccctcccatgcgatttattccgctcttttagtgaaatgactgtgcaggaggaacattgttttaaatggtttcgctatcgaacctttgtcaagctgcccctcccgatcatcacgccgttttggcatacactcgttttccaaggctgtatgtcgatctactgcatcatgctagagcggaactacgcttcttcgggtggtaacgtattgtatgggtacctagactaacgtgatatcttccttctagctgccatcgaaccagcaattcttcatgctgtcattgcacttagcgcagcgcatcgcaatgaaaccatgaaacaagacaaaggtcctgagccatacactgaatcagagaccgaagaaacgttcatggcttgtcatcacttagaccaaatactaatccagatcatgctgctgggagagcagtgctcattaccacaacagtgcggcgttgaacccgtctgtgccgaacccgtctttcccgctggaacggatgagcgtcagttatatctacaaaaagagctcgacagctggcaagcagcacatgatgcgactacaataaaagattggtctcgactaggcgctttttacttcaacattctcgccacatatcataccatggcgtctatcttagtgaataccctgacatggcctgcctgcgaaacaatctacgacttccacatcaacaagtggttgactctgatcacgcaattaatcggtatctatactgaccaccggactgacgaatcgcaatggcatcacgatctaatgagagaagtccccgacaaagtctcatcgacaacaggggacaaggggtggatccccttgctctatttcgtgggaatcaaatgtcgcgtacatcgcatcaggaagcaagccattatgctgctaaatgctgtaccccataaagaggggatgtgggatagtgacctcatcagcgctgttatcgaagaagttatgaggattgaagagggtgatttctacgttggtcttgataaaggcgacgacttccttcctagcgatatcccgactgcggaagattttacactgccatctttaccagagaataatcgtttgatcgatgtcaagattgggttaccggagaatccggaggggatcatgacattgaactacggggtaagaaatgaggaggatttccagacgagacgatgcatgaagttctatgacttgagtacgcaggtctggtatgatacgggagacttctacagtacctagaccatcatgatcatgatatattccttcttgcccaatgcatggaccttcaacttcagggccgtggtaatagtgatgcagcaatcggggcttacaatgcaaccagcattaaacccctctatagaaatattactaccagaacaggcagcgtgcacgggccattgcgcctgcctatccactacgtatgtcgttaaagttcttgtatggaggttcatcaactcaatacatgtactgttcgtacaacaggatcaaaccgggttctcaacacgctcatttcatctgaattctcttgtttcgtttctgctcaattttcaattgttgctaattgtatctaaaatcgccggtcttcgttcattaaaggtccacattttggttctggtgtgcagctgccacgggtcaacagaaggacatggaaggaggtggtatatcaaacagggctcagcttcgttgataggatcaaccaagcagcgaaaactgagccagctctcatcctctttttaatctgtgatggatccttctgatgactcgttgcgctcagggccgacagaggatgatgttcaaagcattggtaggtcttcgcaaggacatccctcccaagaccaggcagcgaccctgcccgattcacaagatgaagccggtcttgaggggcatcggaacatgatgctagcgagcttgctcgaagattattatcgcaatcgagcattagagttcctaaacacgacaaatccggatcaaaattatacccgacagtcgccagaggtccagatcgttgcccgtcgtttgtttgagcaagctagccaactgctctcgtcgaacggtttactcccgtctgccgcaacagctgatgagtctcgaacaacgcggcgccaatacctagctggtcttgacagcctcgtcgctggttcgcaggcaccaaatgcgcttaactcgatgcgtgacctggtggctcaggcttcgcaactcacaataggtgatcccactgctgacttgcaattaacattgcatcaaccggcgccggttcgcagtcattataaatcgtctttcagagaagactgcttgctaggaagagggggctttggcaaagtctatcagtgttacaacttattggatcagaagacctacgcggtgaagaaaatcctcctgtcgccgaagctggtgaaaagcttttgtgatggcaaacacgaagaactgcaacacattttgagagaggtcaaagcaatggcaatgcttgatcatcctaacgttgtccgttatcatgctacgtggtttgaggagcctcaacaaccaccaactgcagtccaaaacgcacttgatcaagtcggcaaccaacctcaaaggcaacgccggccgcttttacttgacagtagaccgttcgacgaattcagtagccagtcatcattgcatgccccgtcgctggagcaatctgttggccagagtattgtcttcggagaagatacggcgtcaaatccatctgtgggtcacagtattgtgtttggcgacgatattacgtcggatcccaaagcgcccataggaggcaataatgcacagtctgtgaagctgggatggtctgaaggcgacatggccgactccgatgatatcgattcgacctcggcttctgaaagtaatctcttcactgatggtaggagtgattccggacctgctacccagcaatctcctgattccggacacataccgcccgcattgtacatacagatgtcaatgtatccaatgagcttgtcgcaatttttatctccgacatcgtcccgttccacaagcttgcggcactgtttccatcttgccccgaccctccgcctcctctcctctatacacgacggactgcaatacattcatagcaaagggttgatacacagggatatcaaaccgggaaatatctttctgtctgctcctgaggcggacttcgactccggctcttgcaatctttcctgtaaactatgcgcgaatcccgattgcggggaaactcgatcaccatcgcgattcttgaacccccggattggagactttggtctcgtacatcaactggcgcatggcgacgtaccaggatcctctccaagctcctcggaatcgcaaaagggggcgggaactacatattatcagccaccggatattggcgagaagaatgagaagatcgatatatttgcgctcggcattgtcttcaccgagctactttgtagatgcgacactgctatggaacgcgctaggatgctcatgggattgcaagaaggcgaccttcccccgggactccagaagatgattaaggatgagggtcatgcaactgagacggcggacttggttgtacagttgctgtcatctatgatcgagaaagacgctaagcagaggtggtcggggtcccaagtacgcgatgctcttcgagatttgctgagtaggtgcaaggactagtagtcgttgaccgcgtcagagatgtcatgaagcacaagcacggaaacggggttcggactttgacatgtacataactagtattatacccagataccccgtataaacaagtgaagcagtatgcaagtgctgcaatttgctgcaagttgctgcaccattacgtatcacattacatacctgaggtacatcacccgtgaaatggtgaatagtagaacagccgtctaattagcgaaattagcgaagtcactctaagccgtcatgatgcttgcgtacctagagactacacaaaaaagaccaaggcgaagagaacccccttaaagacacatgcttgccattgtatgtgatattacctatgcccatgtttaaaagtcaccgtataatcctcacaccatccacaatcatccccg

SEQ ID NO: 19898 - DNA, 1911 bp, Muscodor strobelii
  misc_feature: SGI cDNA ID NO. 566702
  misc_feature: Encodes the peptide sequence at SEQ ID NO 19899
atggatccttctgatgactcgttgcgctcagggccgacagaggatgatgttcaaagcattggtaggtcttcgcaaggacatccctcccaagaccaggcagcgaccctgcccgattcacaagatgaagccggtcttgaggggcatcggaacatgatgctagcgagcttgctcgaagattattatcgcaatcgagcattagagttcctaaacacgacaaatccggatcaaaattatacccgacagtcgccagaggtccagatcgttgcccgtcgtttgtttgagcaagctagccaactgctctcgtcgaacggtttactcccgtctgccgcaacagctgatgagtctcgaacaacgcggcgccaatacctagctggtcttgacagcctcgtcgctggttcgcaggcaccaaatgcgcttaactcgatgcgtgacctggtggctcaggcttcgcaactcacaataggtgatcccactgctgacttgcaattaacattgcatcaaccggcgccggttcgcagtcattataaatcgtctttcagagaagactgcttgctaggaagagggggctttggcaaagtctatcagtgttacaacttattggatcagaagacctacgcggtgaagaaaatcctcctgtcgccgaagctggtgaaaagcttttgtgatggcaaacacgaagaactgcaacacattttgagagaggtcaaagcaatggcaatgcttgatcatcctaacgttgtccgttatcatgctacgtggtttgaggagcctcaacaaccaccaactgcagtccaaaacgcacttgatcaagtcggcaaccaacctcaaaggcaacgccggccgcttttacttgacagtagaccgttcgacgaattcagtagccagtcatcattgcatgccccgtcgctggagcaatctgttggccagagtattgtcttcggagaagatacggcgtcaaatccatctgtgggtcacagtattgtgtttggcgacgatattacgtcggatcccaaagcgcccataggaggcaataatgcacagtctgtgaagctgggatggtctgaaggcgacatggccgactccgatgatatcgattcgacctcggcttctgaaagtaatctcttcactgatggtaggagtgattccggacctgctacccagcaatctcctgattccggacacataccgcccgcattgtacatacagatgtcaatgtatccaatgagcttgtcgcaatttttatctccgacatcgtcccgttccacaagcttgcggcactgtttccatcttgccccgaccctccgcctcctctcctctatacacgacggactgcaatacattcatagcaaagggttgatacacagggatatcaaaccgggaaatatctttctgtctgctcctgaggcggacttcgactccggctcttgcaatctttcctgtaaactatgcgcgaatcccgattgcggggaaactcgatcaccatcgcgattcttgaacccccggattggagactttggtctcgtacatcaactggcgcatggcgacgtaccaggatcctctccaagctcctcggaatcgcaaaagggggcgggaactacatattatcagccaccggatattggcgagaagaatgagaagatcgatatatttgcgctcggcattgtcttcaccgagctactttgtagatgcgacactgctatggaacgcgctaggatgctcatgggattgcaagaaggcgaccttcccccgggactccagaagatgattaaggatgagggtcatgcaactgagacggcggacttggttgtacagttgctgtcatctatgatcgagaaagacgctaagcagaggtggtcggggtcccaagtacgcgatgctcttcgagatttgctgagtaggtgcaaggactag

SEQ ID NO: 19899 - protein, 636 aa, Muscodor strobelii
  misc_feature: SGI Peptide ID NO. 566702
  misc_feature (179)..(627): Pfam Id: PF00069 Pfam Desc: Protein kinase domain
  misc_feature (179)..(253): Pfam Id: PF00069 Pfam Desc: Protein kinase domain
  misc_feature (396)..(562): Pfam Id: PF00069 Pfam Desc: Protein kinase domain
  misc_feature (179)..(251): Pfam Id: PF07714 Pfam Desc: Protein tyrosine kinase
  misc_feature (43)..(632): NCBI GI: 67900668 Blast Desc: AN7321.2 [Aspergillus nidulans FGSC A4] gi|40742182|gb|EAA61372.1| AN7321.2 [Aspergillus nidulans FGSC A4] gi|259483326|tpe|CBF78621.1| TPA: protein kinase, nidulans
  misc_feature (42)..(635): NCBI GI: 145258922 Blast Desc: An04g08580 [Aspergillus niger] gi|134074831|emb|CAK38945.1| protein product [Aspergillus niger]
  misc_feature (43)..(632): NCBI GI: 258566830 Blast Desc: [Uncinocarpus reesii 1704] gi|237905605|gb|EEP80006.1| [Uncinocarpus reesii 1704]
  misc_feature (43)..(636): NCBI GI: 240107046 Blast Desc: kinase domain containing protein [Coccidioides posadasii C735 delta SOWgp]
  misc_feature (46)..(576): NCBI GI: 238841383 Blast Desc: translation initiation factor eIF-2 alpha chain kinase [Microsporum canis CBS 113480]
  misc_feature (148)..(631): NCBI GI: 212530836 Blast Desc: protein kinase, [Penicillium marneffei ATCC 18224] gi|210074973|gb|EEA29060.1| protein kinase, [Penicillium marneffei ATCC 18224]
  misc_feature (46)..(631): NCBI GI: 71002636 Blast Desc: protein kinase [Aspergillus fumigatus Af293] gi|66853637|gb|EAL93961.1| protein kinase, [Aspergillus fumigatus Af293] gi|159130053|gb|EDP55167.1| protein kinase, [Aspergillus
  misc_feature (46)..(631): NCBI GI: 242817397 Blast Desc: protein kinase, [Talaromyces stipitatus ATCC 10500] gi|218713413|gb|EED12837.1| protein kinase, [Talaromyces stipitatus ATCC 10500]
  misc_feature (173)..(632): NCBI GI: 238502529 Blast Desc: serine-threonine protein kinase, [Aspergillus flavus NRRL3357] gi|220691308|gb|EED47656.1| serine-threonine protein kinase, [Aspergillus flavus NRRL3357]
  misc_feature (168)..(631): NCBI GI: 121716881 Blast Desc: protein kinase, [Aspergillus clavatus NRRL 1] gi|119404097|gb|EAW14514.1| protein kinase, [Aspergillus clavatus NRRL 1]
MDPSDDSLRSGPTEDDVQSIGRSSQGHPSQDQAATLPDSQDEAGLEGHRNMMLASLLEDYYRNRALEFLNTTNPDQNYTRQSPEVQIVARRLFEQASQLLSSNGLLPSAATADESRTTRRQYLAGLDSLVAGSQAPNALNSMRDLVAQASQLTIGDPTADLQLTLHQPAPVRSHYKSSFREDCLLGRGGFGKVYQCYNLLDQKTYAVKKILLSPKLVKSFCDGKHEELQHILREVKAMAMLDHPNVVRYHATWFEEPQQPPTAVQNALDQVGNQPQRQRRPLLLDSRPFDEFSSQSSLHAPSLEQSVGQSIVFGEDTASNPSVGHSIVFGDDITSDPKAPIGGNNAQSVKLGWSEGDMADSDDIDSTSASESNLFTDGRSDSGPATQQSPDSGHIPPALYIQMSMYPMSLSQFLSPTSSRSTSLRHCFHLAPTLRLLSSIHDGLQYIHSKGLIHRDIKPGNIFLSAPEADFDSGSCNLSCKLCANPDCGETRSPSRFLNPRIGDFGLVHQLAHGDVPGSSPSSSESQKGAGTTYYQPPDIGEKNEKIDIFALGIVFTELLCRCDTAMERARMLMGLQEGDLPPGLQKMIKDEGHATETADLVVQLLSSMIEKDAKQRWSGSQVRDALRDLLSRCKD

SEQ ID NO: 19900 - DNA, 2564 bp, Muscodor strobelii
  misc_feature: SGI EST ID NO. CUFF.46687.2
  misc_feature: Variant of the nucleotide sequence at SEQ ID NO 19898
cgttgacatagcttcatgcatcttggtctctattgcaaccaagtgacttgtcactggtatccttcaacatacaacacacatgcatcgccatgtgcatcccctcgttgcctacttcaaatcccctttgtcctgttcatgtgcatgtcaaatgacttgcatgctcttttgatttctcttttgcctatatctgtcaagcattttgcgatttgatttgatgaaatcccatgttcttgctgacgttcctgctcattagagccagctctcatcctctttttaatctgtgatggatccttctgatgactcgttgcgctcagggccgacagaggatgatgttcaaagcattggtaggtcttcgcaaggacatccctcccaagaccaggcagcgaccctgcccgattcacaagatgaagccggtcttgaggggcatcggaacatgatgctagcgagcttgctcgaagattattatcgcaatcgagcattagagttcctaaacacgacaaatccggatcaaaattatacccgacagtcgccagaggtccagatcgttgcccgtcgtttgtttgagcaagctagccaactgctctcgtcgaacggtttactcccgtctgccgcaacagctgatgagtctcgaacaacgcggcgccaatacctagctggtcttgacagcctcgtcgctggttcgcaggcaccaaatgcgcttaactcgatgcgtgacctggtggctcaggcttcgcaactcacaataggtgatcccactgctgacttgcaattaacattgcatcaaccggcgccggttcgcagtcattataaatcgtctttcagagaagactgcttgctaggaagagggggctttggcaaagtctatcagtgttacaacttattggatcagaagacctacgcggtgaagaaaatcctcctgtcgccgaagctggtgaaaagcttttgtgatggcaaacacgaagaactgcaacacattttgagagaggtcaaagcaatggcaatgcttgatcatcctaacgttgtccgttatcatgctacgtggtttgaggagcctcaacaaccaccaactgcagtccaaaacgcacttgatcaagtcggcaaccaacctcaaaggcaacgccggccgcttttacttgacagtagaccgttcgacgaattcagtagccagtcatcattgcatgccccgtcgctggagcaatctgttggccagagtattgtcttcggagaagatacggcgtcaaatccatctgtgggtcacagtattgtgtttggcgacgatattacgtcggatcccaaagcgcccataggaggcaataatgcacagtctgtgaagctgggatggtctgaaggcgacatggccgactccgatgatatcgattcgacctcggcttctgaaagtaatctcttcactgatggtaggagtgattccggacctgctacccagcaatctcctgattccggacacataccgcccgcattgtacatacagatgtcaatgtatccaatgagcttgtcgcaatttttatctccgacatcgtcccgttccacaagcttgcggcactgtttccatcttgccccgaccctccgcctcctctcctctatacacgacggactgcaatacattcatagcaaagggttgatacacagggatatcaaaccgggaaatatctttctgtctgctcctgaggcggacttcgactccggctcttgcaatctttcctgtaaactatgcgcgaatcccgattgcggggaaactcgatcaccatcgcgattcttgaacccccggattggagactttggtctcgtacatcaactggcgcatggcgacgtaccaggatcctctccaagctcctcggaatcgcaaaagggggcgggaactacatattatcagccaccggatattggcgagaagaatgagaagatcgatatatttgcgctcggcattgtcttcaccgagctactttgtagatgcgacactgctatggaacgcgctaggatgctcatgggattgcaagaaggcgaccttcccccgggactccagaagatgattaaggatgagggtcatgcaactgagacggcggacttggttgtacagttgctgtcatctatgatcgagaaagacgctaagcagaggtggtcggggtcccaagtacgcgatgctcttcgagatttgctgagtaggtgcaaggactagtagtcgttgaccgcgtcagagatgtcatgaagcacaagcacggaaacggggttcggactttgacatgtacataactagtattatacccagataccccgtataaacaagtgaagcagtatgcaagtgctgcaatttgctgcaagttgctgcaccattacgtatcacattacatacctgaggtacatcacccgtgaaatggtgaatagtagaacagccgtctaattagcgaaattagcgaagtcactctaagccgtcatgatgcttgcgtacctagagactacacaaaaaagaccaaggcgaagagaacccccttaaagacacatgcttgccattgtatgtgatattacctatgcccatgtttaaaagtcac

SEQ ID NO: 19901 - DNA, 1476 bp, Muscodor strobelii
  misc_feature: SGI cDNA ID NO. 566703
  misc_feature: Encodes the peptide sequence at SEQ ID NO 19902
atgtcaactcaatccttacacgcgggcagctttgccctactagctattttgatttccccgctttactatgtggcacagagtgtatatcgctacttcttccaccctctggccaggtatccaggcccgaaacttgctgcagtctccgaattttggcacatctggtcgatgttcactggccgagaagcgttcattatccgggacctccaccagcaatacggagatgtggtgcgcgttgggccaaatgagctctcgtttgcttcctcacaggcttaccaagacgtttatggccatatttccaaaggaaagactagattcttgaagacagaattctatgataacggtgacccaaatcctcgcattactagtgcgatagatccggcggttcacgctcgacagcgcaaagcgctctccaatgcttttagcgccaaatcccttcgcgatcaggaagatgttgttcaaaagtacatgaacatgctcgtacaacaaatatcgaaccttggagaagatggaaagaaggccctcaatatgtccgtagtgttcaattggttgacatttgacatcattggcgatctggcttttggagaaccatttggcgcagtagaggagggtcgcacaccgttctgggttggtctcatcctcgatgctaccttcacagctttgatgtcgaccatgttgaagagaaagctcccactggtgaagaaccttgtaccctacatgatggggaaaggcgcagacgagaagcgcaaggcgcactatgggatgagtatagagaaggcacgaaagcgcattcaagccggggatactggacgtgatgacttcttctctcatatgctaaagaagggcacaatgagcgaaggagaaatcgtgagtcaagcttcgacgcttatagttgccggatcggaaacaacagcgacttcactcgccggaacaacgtggcacctacttaagaaccctaaagtcctgtccaaactccaggacgaagttcgtggtgcattcgataatctcgatcagatcaccggagatagcactggaagactgacatatcttcatggggtgattgaggaaagcctacgcttattcccgcctgctggattcggtcttccacgacactcaccaggggctctggtagacggccactacgttcctcccggaactacagtttcagtaagtccactgctgatgacgcgcgatgctcgttattggcatgacccggagtcattcatccccgagagatggattggagagggtctcaatgatgagaggaaagcaagtcagcccttcagcactggaccgagggcttgtcttggcatcaatctggcgtatatggaaatgagaatcatcctcgccaagatagtattcgcctatgactgggagcttgcacaaccgctcgatacgtggatggagtcatgtgttaatagactcctgtgggagaagcctgacttaatggttaaataccgtccccgcgaggcagtctag

SEQ ID NO: 19902 - protein, 491 aa, Muscodor strobelii
  misc_feature: SGI Peptide ID NO. 566703
  misc_feature (40)..(485): Pfam Id: PF00067 Pfam Desc: Cytochrome P450
  misc_feature (125)..(485): Pfam Id: PF00067 Pfam Desc: Cytochrome P450
  misc_feature (21)..(487): NCBI GI: 46138361 Blast Desc: FG10695.1 [Gibberella zeae PH-1]
  misc_feature (68)..(486): NCBI GI: 156054726 Blast Desc: SS1G_06211 [Sclerotinia sclerotiorum 1980] gi|154703991|gb|EDO03730.1| SS1G_06211 [Sclerotinia sclerotiorum 1980]
  misc_feature (11)..(485): NCBI GI: 154289577 Blast Desc: BC1G_16084 [Botryotinia fuckeliana B05.10] gi|150849019|gb|EDN24212.1| BC1G_16084 [Botryotinia fuckeliana B05.10] gi|169635728|emb|CAP58782.1| cytochrome P40 monooxygenase
  misc_feature (68)..(487): NCBI GI: 154296440 Blast Desc: BC1G_13046 [Botryotinia fuckeliana B05.10] gi|150843407|gb|EDN18600.1| BC1G_13046 [Botryotinia fuckeliana B05.10]
  misc_feature (21)..(490): NCBI GI: 67522561 Blast Desc: AN1737.2 [Aspergillus nidulans FGSC A4] gi|40744867|gb|EAA64023.1| AN1737.2 [Aspergillus nidulans FGSC A4] gi|259487082|tpe|CBF85469.1| TPA: cytochrome P450, (Eurofung)
  misc_feature (20)..(488): NCBI GI: 255936151 Blast Desc: Pc13g06690 [Penicillium chrysogenum Wisconsin 54-1255] gi|211583722|emb|CAP91738.1| Pc13g06690 [Penicillium chrysogenum Wisconsin 54-1255]
  misc_feature (17)..(488): NCBI GI: 259485758 Blast Desc: TPA: cytochrome P450, (Eurofung) [Aspergillus nidulans FGSC A4]
  misc_feature (21)..(489): NCBI GI: 256725278 Blast Desc: NECHADRAFT_45567 [Nectria haematococca mpVI 77-13-4]
  misc_feature (14)..(487): NCBI GI: 121716300 Blast Desc: benzoate 4-monooxygenase cytochrome P450 [Aspergillus clavatus NRRL 1] gi|119403916|gb|EAW14333.1| benzoate 4-monooxygenase cytochrome P450 [Aspergillus clavatus NRRL 1]
  misc_feature (13)..(486): NCBI GI: 119481647 Blast Desc: benzoate 4-monooxygenase cytochrome P450 [Neosartorya fischeri NRRL 181] gi|119409006|gb|EAW18955.1| benzoate 4-monooxygenase cytochrome P450 [Neosartorya fischeri NRRL 181]
  misc_feature (40)..(465): SWISSPROT Homolog: EC 1.14.13.12 Benzoate 4-monooxygenase
MSTQSLHAGSFALLAILISPLYYVAQSVYRYFFHPLARYPGPKLAAVSEFWHIWSMFTGREAFIIRDLHQQYGDVVRVGPNELSFASSQAYQDVYGHISKGKTRFLKTEFYDNGDPNPRITSAIDPAVHARQRKALSNAFSAKSLRDQEDVVQKYMNMLVQQISNLGEDGKKALNMSVVFNWLTFDIIGDLAFGEPFGAVEEGRTPFWVGLILDATFTALMSTMLKRKLPLVKNLVPYMMGKGADEKRKAHYGMSIEKARKRIQAGDTGRDDFFSHMLKKGTMSEGEIVSQASTLIVAGSETTATSLAGTTWHLLKNPKVLSKLQDEVRGAFDNLDQITGDSTGRLTYLHGVIEESLRLFPPAGFGLPRHSPGALVDGHYVPPGTTVSVSPLLMTRDARYWHDPESFIPERWIGEGLNDERKASQPFSTGPRACLGINLAYMEMRIILAKIVFAYDWELAQPLDTWMESCVNRLLWEKPDLMVKYRPREAV

SEQ ID NO: 19903 - DNA, 2067 bp, Muscodor strobelii
  misc_feature: SGI EST ID NO. CUFF.46611.0
  misc_feature: Variant of the nucleotide sequence at SEQ ID NO 19901
taccatgcagcgtgctgcaccatgtaactccccgtcgtggtaaccctaccagccaaggaaggaaattccaaaattcacggacaaggtccacatttgatgtgtttcgttctgcggcttcttgccggccccgcgcaatggcctgcgcgtttcgaataatgatctagggctgcggcatatatcatgaggaagaggaccgggagacatatatgttactggcccggccgtttcttggttatatgaggagagttatagtagagaagggttaaactaggtgctcctcgatcaacatcattatttggtaatatgtcgtctactatgtcaactcaatccttacacgcgggcagctttgccctactagctattttgatttccccgctttactatgtggcacagagtgtatatcgctacttcttccaccctctggccaggtatccaggcccgaaacttgctgcagtctccgaattttggcacatctggtcgatgttcactggccgagaagcgttcattatccgggacctccaccagcaatacggagatgtggtgcgcgttgggccaaatgagctctcgtttgcttcctcacaggcttaccaagacgtttatggccatatttccaaaggaaagactagattcttgaagacagaattctatgataacggtgacccaaatcctcgcattactagtgcgatagatccggcggttcacgctcgacagcgcaaagcgctctccaatgcttttagcgccaaatcccttcgcgatcaggaagatgttgttcaaaagtacatgaacatgctcgtacaacaaatatcgaaccttggagaagatggaaagaaggccctcaatatgtccgtagtgttcaattggttgacatttgacatcattggcgatctggcttttggagaaccatttggcgcagtagaggagggtcgcacaccgttctgggttggtctcatcctcgatgctaccttcacagctttgatgtcgaccatgttgaagagaaagctcccactggtgaagaaccttgtaccctacatgatggggaaaggcgcagacgagaagcgcaaggcgcactatgggatgagtatagagaaggcacgaaagcgcattcaagccggggatactggacgtgatgacttcttctctcatatgctaaagaagggcacaatgagcgaaggagaaatcgtgagtcaagcttcgacgcttatagttgccggatcggaaacaacagcgacttcactcgccggaacaacgtggcacctacttaagaaccctaaagtcctgtccaaactccaggacgaagttcgtggtgcattcgataatctcgatcagatcaccggagatagcactggaagactgacatatcttcatggggtgattgaggaaagcctacgcttattcccgcctgctggattcggtcttccacgacactcaccaggggctctggtagacggccactacgttcctcccggaactacagtttcagtaagtccactgctgatgacgcgcgatgctcgttattggcatgacccggagtcattcatccccgagagatggattggagagggtctcaatgatgagaggaaagcaagtcagcccttcagcactggaccgagggcttgtcttggcatcaatctggcgtatatggaaatgagaatcatcctcgccaagatagtattcgcctatgactgggagcttgcacaaccgctcgatacgtggatggagtcatgtgttaatagactcctgtgggagaagcctgacttaatggttaaataccgtccccgcgaggcagtctaggaagctgtatccatttataatggaaagatcgcgacgaaagatgccagaaacgcgtacagggaaaataggaatggcggcaaattgatttagcgttgatgcatgtaagaaggatgcccattgacaagtgttacagccgatcaaactaatctacaaaaggctcacaacaacagagttttcaagacacgaaaagatgcatcaaatgtttatttaatcatgatatagcaatctattataggctatattaggtgactacacggtctactaaaccattgcaga

SEQ ID NO: 19904 - DNA, 948 bp, Muscodor strobelii
  misc_feature: SGI cDNA ID NO. 566704
  misc_feature: Encodes the peptide sequence at SEQ ID NO 19905
atgagtttcgatcaatcgaccggctccgatgtatcaggagtgcccgccggggtgccgcctccgggagtagctcccaacttgtcggacccaactacattatcaactccagcattcgcggttctaggcgtcttcctcgcactaatgttgattgcggttttcacccgcgtctatgtctgtgctcgcttgtctaggagctgggaatggaatgattatgcctgcttcgttgctgcgatcggctcagtagcgcatggcattgtctacattgtctacatctctgtatcatataacaaccagttcacctctataagcggcatcacttatctattcaccatcttcttcaccaagctgtcgattctgctgctttataatgtcatattcggcgccaatcgtagctttcggcgttgtgtgctcattaccattgtcatcattagcctcttctacgtgccgctcactgctgtttcgattgcctttacagctcgctgcaatatcgattgggtgatcagaaatcctctcagtgtacttgcgaatttctgtaactctttcacgggccctttgctctacactaatgccgccttcgctgttgctacggacttttggctcttgtctttaccagtaccaatcatatggaaacttcacatcacactgaaacagaaactcggactcggggcagtcttcgctggtggcttaggagcttgcggtgcgagtttggcacggcttatcgtgatcctggtaatctctcagaacatttcactcgaaccgattttggaattaaacacaatcgccgagttaagtgtcgcagagctcaacattggtattatcgtggcctgcgccccttgtttccctctcttttatgaacatgtgcgcaaatctatcgcctcgtttcgaagtccggaagatattcgattttcgaaggtccagactcatgacgacatcgtctcgttccattga

SEQ ID NO: 19905 - protein, 315 aa, Muscodor strobelii
  misc_feature: SGI Peptide ID NO. 566704
  misc_feature (15)..(288): NCBI GI: 67902906 Blast Desc: AN8440.2 [Aspergillus nidulans FGSC A4] gi|40747906|gb|EAA67062.1| AN8440.2 [Aspergillus nidulans FGSC A4]
  misc_feature (14)..(243): NCBI GI: 238846065 Blast Desc: [Microsporum canis CBS 113480]
  misc_feature (10)..(280): NCBI GI: 145252774 Blast Desc: An16g05920 [Aspergillus niger] gi|134083454|emb|CAK46932.1| protein product [Aspergillus niger]
  misc_feature (12)..(294): NCBI GI: 242761452 Blast Desc: conserved [Talaromyces stipitatus ATCC 10500] gi|218723378|gb|EED22795.1| conserved [Talaromyces stipitatus ATCC 10500]
  misc_feature (12)..(299): NCBI GI: 156057637 Blast Desc: SS1G_04550 [Sclerotinia sclerotiorum 1980] gi|154702335|gb|EDO02074.1| SS1G_04550 [Sclerotinia sclerotiorum 1980]
  misc_feature (39)..(289): NCBI GI: 242804820 Blast Desc: conserved [Talaromyces stipitatus ATCC 10500] gi|218717798|gb|EED17219.1| conserved [Talaromyces stipitatus ATCC 10500]
  misc_feature (15)..(313): NCBI GI: 50949206 Blast Desc: G protein-coupled receptor alpha [Botryotinia fuckeliana]
  misc_feature (14)..(290): NCBI GI: 154304111 Blast Desc: BC1G_09691 [Botryotinia fuckeliana B05.10] gi|150854326|gb|EDN29518.1| BC1G_09691 [Botryotinia fuckeliana B05.10]
  misc_feature (177)..(288): NCBI GI: 259484383 Blast Desc: TPA: conserved [Aspergillus nidulans FGSC A4]
  misc_feature (18)..(307): NCBI GI: 171679834 Blast Desc: protein product [Podospora anserina] gi|170939543|emb|CAP64770.1| protein product [Podospora anserina]
MSFDQSTGSDVSGVPAGVPPPGVAPNLSDPTTLSTPAFAVLGVFLALMLIAVFTRVYVCARLSRSWEWNDYACFVAAIGSVAHGIVYIVYISVSYNNQFTSISGITYLFTIFFTKLSILLLYNVIFGANRSFRRCVLITIVIISLFYVPLTAVSIAFTARCNIDWVIRNPLSVLANFCNSFTGPLLYTNAAFAVATDFWLLSLPVPIIWKLHITLKQKLGLGAVFAGGLGACGASLARLIVILVISQNISLEPILELNTIAELSVAELNIGIIVACAPCFPLFYEHVRKSIASFRSPEDIRFSKVQTHDDIVSFH

SEQ ID NO: 19906 - DNA, 614 bp, Muscodor strobelii
  misc_feature: SGI EST ID NO. CUFF.46588.0
  misc_feature: Variant of the nucleotide sequence at SEQ ID NO 19904
cacaactcttcaacagctacgcgtcgccgaattagctctgacagaatgagtttcgatcaatcgaccggctccgatgtatcaggagtgcccgccggggtgccgcctccgggagtagctcccaacttgtcggacccaactacattatcaactccagcattcgcggttctaggcgtcttcctcgcactaatgttgattgcggttttcacccgcgtctatgtctgtgctcgcttgtctaggagctgggaatggaatgattgtaagacaatttgtgatttatgctagggaacctacaagtttgctaacagatcgcgtcacggtaaagatgcctgcttcgttgctgcggtatgtcgtgttacgaatttcggtatcaacaaagaatgtgtagtagggctcatgacgcgtgcagatcggctcagtagcgcatggcattgtctacattgtctgtaaggtgaccaaattactaaatggaaagacggtcttggtctgatggtttttctcagtccagatacaacaccctttgcgacatgtatatgacgaaacgatatcagacatctctgtatcatataacaaccagttcacctctataagcggcatcacttatctattcaccatct

SEQ ID NO: 19907 - DNA, 1563 bp, Muscodor strobelii
  misc_feature: SGI cDNA ID NO. 566705
  misc_feature: Encodes the peptide sequence at SEQ ID NO 19908
atgggcgatatcttttcggcagcagatcaggttgttgcatggcttggagaggaggacgaacatactcctctgactcttcggacaatcgaagaaataggtagagcgatgccccaagacctttgccctggcgagacacccattaaagcctggcttgatgctgttactcatatatggtcgcgtgatatcgaagtagaggaattgctatttagtcgacctttggaagcgctatacaagcttctgtcacggccatattggtccagaagttggatagtccaagagctggtagtggctcgcgagacagtcttcatactcggtcagacaatcatccaatatgctgctctcgagaagcttgcacttctccatcgtcgagtgaatgactacaaggctataccatatgatacgcgcttagcgttatggcgaggtttgagcccagattcaagctcgctaaccgcagtatacttgttgagagatcagttgcacagacgcggtccttctccagaggcagtcttgggtatggccggaggcatgtttgcgaccgatccgagggataaggtttttgcattctatgggctgggtctgacgtccgtatttcctgattacgcggcttctgttgatgttgtttactcgcaatttgcgaaagaggctgtagacggaggccttgcctcccaactctgggaaaaagctggcattggactacttacaagagagacggaattctctcggtcgctaccatcttgggttcccgacctacgctcgttacaacaacatcggatcgatgcactttcgctgttctcgcaagacttcagcgctaataaagacttggacgataaacacgcggatattgatgactatctccgcctctgttgctcgggctacatcgtagataaggtcactatggtatttcggaaacccacgaacccccaagatttcattaccaacatccttagcgagttacacaacatttggtctgacgaaaatccaatgcttcctgcaacaccagtctccgcgattcttagggcaatcctagttgattgcgcagaccttatctacaagaagcgactaaaagatgacaagaaagcgttcatacaatttgccacggcgtttctgttcatgtttgcacggccacatgaagatccgggtgaagaaaaagcgattgtatttcctccagagagtgagatcagttctcttgactatcttcatgaacaattcttccctggcgatcctgtagacaagatagagaccgagctctggccgtccgcatttcaagacatctgggtaaacagattagactatacagtcgcaaggcgcctgggcatcgcgattcagcaatctttctctctatttttgactgcagatggaagactgggtaggggaccagcgaaaatgcagactggcgatgagatatttgtactaccggtttgcgaagtcccagtagcactcagaaagacagatggtgaatactctctcgttggagtctgttttgttcttagtttgatggatggcgaagttgctgatatggtgaagggggagacacttaagccggttttgaccaagatcggttaa

SEQ ID NO: 19908 - protein, 520 aa, Muscodor strobelii
  misc_feature: SGI Peptide ID NO. 566705
  misc_feature (1)..(510): NCBI GI: 256724547 Blast Desc: NECHADRAFT_88232 [Nectria haematococca mpVI 77-13-4]
  misc_feature (1)..(515): NCBI GI: 70985958 Blast Desc: Ankyrin and HET domain protein [Aspergillus fumigatus Af293] gi|66846112|gb|EAL86445.1| Ankyrin and HET domain protein [Aspergillus fumigatus Af293]
  misc_feature (77)..(514): NCBI GI: 171679990 Blast Desc: protein product [Podospora anserina] gi|170939621|emb|CAP64848.1| protein product [Podospora anserina]
  misc_feature (1)..(510): NCBI GI: 256724627 Blast Desc: NECHADRAFT_84376 [Nectria haematococca mpVI 77-13-4]
  misc_feature (1)..(515): NCBI GI: 159128383 Blast Desc: Ankyrin and HET domain protein [Aspergillus fumigatus A1163]
  misc_feature (1)..(513): NCBI GI: 256721216 Blast Desc: NECHADRAFT_101059 [Nectria haematococca mpVI 77-13-4]
  misc_feature (1)..(513): NCBI GI: 46139107 Blast Desc: FG11068.1 [Gibberella zeae PH-1]
  misc_feature (1)..(308): NCBI GI: 256722665 Blast Desc: NECHADRAFT_87188 [Nectria haematococca mpVI 77-13-4]
  misc_feature (1)..(316): NCBI GI: 46112797 Blast Desc: FG02900.1 [Gibberella zeae PH-1]
  misc_feature (1)..(501): NCBI GI: 256731925 Blast Desc: NECHADRAFT_80792 [Nectria haematococca mpVI 77-13-4]
MGDIFSAADQVVAWLGEEDEHTPLTLRTIEEIGRAMPQDLCPGETPIKAWLDAVTHIWSRDIEVEELLFSRPLEALYKLLSRPYWSRSWIVQELVVARETVFILGQTIIQYAALEKLALLHRRVNDYKAIPYDTRLALWRGLSPDSSSLTAVYLLRDQLHRRGPSPEAVLGMAGGMFATDPRDKVFAFYGLGLTSVFPDYAASVDVVYSQFAKEAVDGGLASQLWEKAGIGLLTRETEFSRSLPSWVPDLRSLQQHRIDALSLFSQDFSANKDLDDKHADIDDYLRLCCSGYIVDKVTMVFRKPTNPQDFITNILSELHNIWSDENPMLPATPVSAILRAILVDCADLIYKKRLKDDKKAFIQFATAFLFMFARPHEDPGEEKAIVFPPESEISSLDYLHEQFFPGDPVDKIETELWPSAFQDIWVNRLDYTVARRLGIAIQQSFSLFLTADGRLGRGPAKMQTGDEIFVLPVCEVPVALRKTDGEYSLVGVCFVLSLMDGEVADMVKGETLKPVLTKIG

SEQ ID NO: 19909 - DNA, 437 bp, Muscodor strobelii
  misc_feature: SGI EST ID NO. CUFF.46593.0
  misc_feature: Variant of the nucleotide sequence at SEQ ID NO 19907
gcttgatgctgttactcatatatggtcgcgtgatatcgaagtagaggaattgctatttagtcgacctttggaagcgctatacaagcttctgtcacggccatattggtccagaagttggatagtccaagagctggtagtggctcgcgagacagtcttcatactcggtcagacaatcatccaatatgctgctctcgagaagcttgcacttctccatcgtcgagtgaatgactacaaggctataccatatgatacgcgcttagcgttatggcgaggtttgagcccagattcaagctcgctaaccgcagtatacttgttgagagatcagttgcacagacgcggtccttctccagaggcagtcttgggtatggccggaggcatgtttgcgaccgatccgagggataaggtttttgcattctatgggctgggtctgacgtccg

SEQ ID NO: 19910 - DNA, 2301 bp, Muscodor strobelii
  misc_feature: SGI cDNA ID NO. 566706
  misc_feature: Encodes the peptide sequence at SEQ ID NO 19911
atgatgcagctcttggatgatgttggtgaaaccgaacctctttcggcggcgagagctctgactaagggctcaattgaagagcctaaaaaacccccagcatctgttgaagacaagaagaatcgttactctatggtcattagcgaatgggactctcgtactggggaattcaaagagaaccctttgtcaatggagcgcgcggaaccaatgccgttcggacctgacaactggaacagtcgagcattcatctttcgcaagctcacgggtacacgtagatcccgtctagatgcggacgacctctcatcagggtccgaggttgagataatatttccgccacttcagaagctgctagggggcattacatctaagtggggatggccggaacaagtcacaagatgtgcgagtccctatactccgctcatacactcttgggaacatgcgcagagagaagcaaatacattctctgtcgagctgcccaatactgcgtctgacgaagaaaagagggcctatgaggatgacaaggttgccagagaggatttgaaagaattgcttcggatcatctctgagtcatccggtgacgtacgtttggatcgatatttcaagaaccgtgatacattcctaagcgagggcacaattacacacgatgctctttggactttgtttcccgctggaacattagtcttcagcaaaccatgtcatgatgaagagcaaatttttgttgttgaccacagtgatggctttgttgcagacgatgacacatttcaaatcgtctgtttctgttttgattgggacggcggaagattcagaagagtatcattccagctgagaattgatggatggggaggagatcggaggaacgtgacgggtcttccattttatcccctcaaattctataaagagggcgaagatactcagcagcagtctattgaagcactcaagagtcgtttaatcgagcgaggccaaatatacgtagatctttgcaaggcggagaaaggaaagcaaatgttcaactaccaggatggcgatgcttatttcaaccaaggaggaacattcttgcagcaaccggcaaaagattggaaccctgacttggattaccaccgaaaaggctcgtcttccgggacctcgactcacggtgagggcacaatatcaggcccaggtgcaaattggaagcatgtcgatggtgcaatcattgttgatttcgcgtcgtttttgacataccagccaagcggtacacctgttctcggagaccttgaaatgtacaagagatctctagttgaactgtctctagagcgacgccgtaacaaaatttttagggatttgtacagactagattgggacagacacctgactggcaccgatccgactgatgaacaatatctttgttgtccgccaagggtcctcggctacgcattgaaacaaaaggcttgggtgcagctccttgtaagacatatcaaaagcgccgacgaggccaacgacaatacattcatcaacaaattgcaattagacgatgatactaaagagctcatttcgaaatctgtgaaggcgcattccgaatcgcgaaagcgagaccagggtactgctactcaaggccttgacgacttcgcgccgggaaagggccgaggtctggtcattatgctatacggacagcctggggttggcaaaacattgacagcagagagcgttgccgagatgacaagcaaacctttactttcggttggcgtgtctgatatcgggattgaagggcataaggtcgacatgaatctacaaaaggtattcgctttggctgggctgtgggaagctgtcttgctttttgacgaagccgacgtatttcttgaagcaagaggagaaggtgataatgatcttcggaggaacgctatggtttcagtgttgttgcgtgtcctcgaatattacgaagggatactcattttgacaacaaatcggatgagatcactcgacatcgctgtccaaagtcgtattcacgtagcggtcaaattcgcagagttaacccctgaccaaaagagcaacatattcaaggcattcctcgaccaacttgcggagaaaaggcttgttgagaaccatacagacctcatgaaatgggtcaacaaggagggaaagaaatttgacttcaacggccgtcaaattcgaaatatcatttcaaccgcactgggtctcgcgcgggcagagagcaggactctgcagagggatgatttagtaatggttgcgagacagacagaccttttcaagagggacttggcaacccaggaagctgtatacagagacaggcaaattactcaacgagcttaa

SEQ ID NO: 19911 - protein, 766 aa, Muscodor strobelii
  misc_feature: SGI Peptide ID NO. 566706
  misc_feature (542)..(726): Pfam Id: PF00004 Pfam Desc: ATPase family associated with various cellular activities (AAA)
  misc_feature (452)..(729): NCBI GI: 242788508 Blast Desc: 26S protease regulatory subunit, [Talaromyces stipitatus ATCC 10500] gi|218721380|gb|EED20799.1| 26S protease regulatory subunit, [Talaromyces stipitatus ATCC 10500]
  misc_feature (149)..(750): NCBI GI: 258565107 Blast Desc: conserved [Uncinocarpus reesii 1704] gi|237906999|gb|EEP81400.1| conserved [Uncinocarpus reesii 1704]
  misc_feature (149)..(750): NCBI GI: 121711591 Blast Desc: AAA family ATPase, [Aspergillus clavatus NRRL 1] gi|119401562|gb|EAW11985.1| AAA family ATPase, [Aspergillus clavatus NRRL 1]
  misc_feature (205)..(750): NCBI GI: 145237308 Blast Desc: An07g02150 [Aspergillus niger] gi|134075769|emb|CAK39306.1| protein product [Aspergillus niger]
  misc_feature (205)..(750): NCBI GI: 238482701 Blast Desc: AAA family ATPase, [Aspergillus flavus NRRL3357] gi|220700639|gb|EED56977.1| AAA family ATPase, [Aspergillus flavus NRRL3357]
  misc_feature (205)..(750): NCBI GI: 169766068 Blast Desc: [Aspergillus oryzae RIB40] gi|83765360|dbj|BAE55503.1| protein product [Aspergillus oryzae]
  misc_feature (110)..(737): NCBI GI: 189209339 Blast Desc: conserved [Pyrenophora tritici-repentis Pt-1C-BFP] gi|187977095|gb|EDU43721.1| conserved [Pyrenophora tritici-repentis Pt-1C-BFP]
  misc_feature (205)..(750): NCBI GI: 159123296 Blast Desc: AFUB_091330 [Aspergillus fumigatus A1163]
  misc_feature (205)..(750): NCBI GI: 146324856 Blast Desc: AAA family ATPase [Aspergillus fumigatus Af293] gi|129556625|gb|EBA27293.1| AAA family ATPase, [Aspergillus fumigatus Af293]
  misc_feature (205)..(750): NCBI GI: 238841612 Blast Desc: cylicin-1 [Microsporum canis CBS 113480]
MMQLLDDVGETEPLSAARALTKGSIEEPKKPPASVEDKKNRYSMVISEWDSRTGEFKENPLSMERAEPMPFGPDNWNSRAFIFRKLTGTRRSRLDADDLSSGSEVEIIFPPLQKLLGGITSKWGWPEQVTRCASPYTPLIHSWEHAQREANTFSVELPNTASDEEKRAYEDDKVAREDLKELLRIISESSGDVRLDRYFKNRDTFLSEGTITHDALWTLFPAGTLVFSKPCHDEEQIFVVDHSDGFVADDDTFQIVCFCFDWDGGRFRRVSFQLRIDGWGGDRRNVTGLPFYPLKFYKEGEDTQQQSIEALKSRLIERGQIYVDLCKAEKGKQMFNYQDGDAYFNQGGTFLQQPAKDWNPDLDYHRKGSSSGTSTHGEGTISGPGANWKHVDGAIIVDFASFLTYQPSGTPVLGDLEMYKRSLVELSLERRRNKIFRDLYRLDWDRHLTGTDPTDEQYLCCPPRVLGYALKQKAWVQLLVRHIKSADEANDNTFINKLQLDDDTKELISKSVKAHSESRKRDQGTATQGLDDFAPGKGRGLVIMLYGQPGVGKTLTAESVAEMTSKPLLSVGVSDIGIEGHKVDMNLQKVFALAGLWEAVLLFDEADVFLEARGEGDNDLRRNAMVSVLLRVLEYYEGILILTTNRMRSLDIAVQSRIHVAVKFAELTPDQKSNIFKAFLDQLAEKRLVENHTDLMKWVNKEGKKFDFNGRQIRNIISTALGLARAESRTLQRDDLVMVARQTDLFKRDLATQEAVYRDRQITQRA

SEQ ID NO: 19912 - DNA, 1269 bp, Muscodor strobelii
  misc_feature: SGI cDNA ID NO. 566707
  misc_feature: Encodes the peptide sequence at SEQ ID NO 19913
atgctcagagcttcctcaaagaacaactgccaagactcactagagacctatgttgcatcggaagagagcaatatgaaagctgcaggtcgccttttaagtcagaggcggtctcgaggtctacgaaagcgcacaacacagttgcaggatttcgcggtgactttcactcaattcttgcgtgcatactcgggaatcgtaagcatcgttcagatcgcagatgcccaatatggaggtgttgcaactgctgcgctgtccttattatttgcgactgtgcgagtgaaagccgacgccgaggagtcgataaatagatgcatgatacatgtctctgatcggatgccagacttcaagtcgtatgaaggtatctaccctgaccccgaattaggtgagctgttggctagagcataccgcgatatcattctcttcgccagaaatgtcaccgtatactttcaggatagcggatttgccttattattacggcaggacacaatgatcgtccgtaacttcgcaaagactctaaaactgcataactatcccatcgaagaagaacgcaataaggatatcatgagagaccaagaaagtctgaaatatcaattcgagcacgaccggcgacgacaaatgctcgacgccgatagcttcttacagatggcgcatggcaagcactggaatgatacggggtcaacattgttgcttttgtacggtcggaacgagcaacaaagcagcaaccacaattcctggttgtcccttgtggcgaccgagttggcccaagaatacgtcagattaaacacatcggtggcgtacgagagatgcagcaagtcaagcacgctcaaactcacgctctcgcagttaattcttcagttccttcaaaggaatcctgcattgatcagagatccgaatgattgtggactagtggacactcagatatcgcggatgggagatgaggatgaaatgatagaagctctccggaaagctcttctgcaagtcatcaacctgcatgctaacagggtatacatcattttgaatcgaccagatctctgcgaagacatgcctgatgggagttgcacggaatacattaggacaatgctatctttagtcaaagagaccactgcggagttgaagatcatgatggtactgaaaaaccttctctcctacagcaatactctctcaacgaaggatgctggtgagcctagctacaccaccgaactaggcgacaaggcaccagtcaccaaattttcgaatggccagacatttctgtcaatggatatccattgttga

SEQ ID NO: 19913 - protein, 422 aa, Muscodor strobelii
  misc_feature: SGI Peptide ID NO. 566707
  misc_feature (35)..(148): NCBI GI: 242788503 Blast Desc: TSTA_039920 [Talaromyces stipitatus ATCC 10500] gi|218721379|gb|EED20798.1| TSTA_039920 [Talaromyces stipitatus ATCC 10500]
MLRASSKNNCQDSLETYVASEESNMKAAGRLLSQRRSRGLRKRTTQLQDFAVTFTQFLRAYSGIVSIVQIADAQYGGVATAALSLLFATVRVKADAEESINRCMIHVSDRMPDFKSYEGIYPDPELGELLARAYRDIILFARNVTVYFQDSGFALLLRQDTMIVRNFAKTLKLHNYPIEEERNKDIMRDQESLKYQFEHDRRRQMLDADSFLQMAHGKHWNDTGSTLLLLYGRNEQQSSNHNSWLSLVATELAQEYVRLNTSVAYERCSKSSTLKLTLSQLILQFLQRNPALIRDPNDCGLVDTQISRMGDEDEMIEALRKALLQVINLHANRVYIILNRPDLCEDMPDGSCTEYIRTMLSLVKETTAELKIMMVLKNLLSYSNTLSTKDAGEPSYTTELGDKAPVTKFSNGQTFLSMDIHC

SEQ ID NO: 19914 - DNA, 1026 bp, Muscodor strobelii
  misc_feature: SGI cDNA ID NO. 566708
  misc_feature: Encodes the peptide sequence at SEQ ID NO 19915
atgttcggctcgttccctcgcgatggaccaccactggacccaccgtcatgtcaagatcaagatccacatacactcctagggtttgacacggacgagttgcaaagcgactttgacttttcgtctgagttccttacgattttcgatgcccaggccagccctctggccggaagcaccggtgaccagataacgcagccgctctccaaattacgtaacgatggcatcattttggactcgtcggaccatgtgcaacactacgagtttgataattctcgaggctggcagtctgacgtgaccacggacagtagcggagcgacagaaatcatcttggtacctgccagtgccgccacgcgctccagtattttcgacccggcgtcatgcggctgctgttgggatgcgttaagcactttcgagtctatccagaacaccctggttaggaagcggaatgaggcggcatccaggcccgacgacctcctccggagtctaaagagagtactatgcgattttgaacgactccttagctgtccgcattgcgtcaccaagtctacttacgcgactcttctcatttttatgtctgccgacatcctctcaagcatgcaggacggatgtcatattcaagttgattattttgacgaaaagggtacaagcagcagcggaacgaacgtttccgtgccaggcggcggctctgaggcactggcatcgcaaccgttactgagacgctcgctcgatagtagccgaaacctactgccatggacggcgcggacggatgtcggaggaacagcatgcgacaaggcgagaaagggagcggccgatttcaaagtcgtcgtcggtaagtggcagttggatgccgacgaccaggtgtctgttattcgaaggttattcttgattagggtgtataagctcttgaacctcctagctcggttgaggaagatggcccaggacaacaaatggtcagcccaagtcgggtatctaggtccagtacaagatgcttgctattcactatcgttacaattagacgatgatagttga

SEQ ID NO: 19915 - protein, 341 aa, Muscodor strobelii
  misc_feature: SGI Peptide ID NO. 566708
  misc_feature (126)..(319): NCBI GI: 50355636 Blast Desc: transcription factor [Phoma betae]
  misc_feature (126)..(319): NCBI GI: 50355607 Blast Desc: transcription factor [Phoma betae]
MFGSFPRDGPPLDPPSCQDQDPHTLLGFDTDELQSDFDFSSEFLTIFDAQASPLAGSTGDQITQPLSKLRNDGIILDSSDHVQHYEFDNSRGWQSDVTTDSSGATEIILVPASAATRSSIFDPASCGCCWDALSTFESIQNTLVRKRNEAASRPDDLLRSLKRVLCDFERLLSCPHCVTKSTYATLLIFMSADILSSMQDGCHIQVDYFDEKGTSSSGTNVSVPGGGSEALASQPLLRRSLDSSRNLLPWTARTDVGGTACDKARKGAADFKVVVGKWQLDADDQVSVIRRLFLIRVYKLLNLLARLRKMAQDNKWSAQVGYLGPVQDACYSLSLQLDDDS

SEQ ID NO: 19916 - DNA, 915 bp, Muscodor strobelii
  misc_feature: SGI cDNA ID NO. 566709
  misc_feature: Elevated expression when VOC is produced
  misc_feature: Encodes the peptide sequence at SEQ ID NO 19917
atggatccaatcgtcactttgcctgtatatgaaggcctcggcatccctctcgtcgtggttatcactggcatcgtcgctgctcgatgctgggttaacacccgtatctctcacggccgactccaggttcacgactatatgtcaattttcggactgaccttcttcgtcgtgacatacgctgtcaacgacattatcatcagaactgtgtcggcctcgtcactagacctaccgctccttttcagactcgccatcatcatcatcattctagtccaaggtactctatggtttactaaggcgcctatcctgtttctttatcttcagctattcggctcgcatagatggcttcggtatatcgcgcgctcagcactcgtcgttgcaggtctaatttacgttgccggtctaatatacactcttgcccggtgtccgatcagtcatatcaccctcgaagcgtatcaggcttgcgcccactctaacacgctcaccggtgtcatatcagggttcgtctctgttatcctcgatgccatcatattcgcgttgcctattcctgtcatcgtcagtctgcagctcgagacgtcaaagaaggttggacttgtcgtcaccttctctgccggtatacttgggattgctgcatccgtagttgctctgtactacaagtatgatgctctctctggggacgggaccgagctcattgctccgatattcttctttgctatcgagggcttcgttgcgttagcagtaggctgcgcgcctgcgatgcggtcgttttggaatcgatacatgatcaaggaagtgctccagggttcgtcatctggctatagctatgtcttggacaaccaacgcaaacctcatcgagacccgcttggttctatctgggatggatccgtagacgataccgaaaggattaggtcaggcttatga

SEQ ID NO: 19917 - protein, 304 aa, Muscodor strobelii
  misc_feature: SGI Peptide ID NO. 566709
  misc_feature (12)..(274): NCBI GI: 169612652 Blast Desc: SNOG_09450 [Phaeosphaeria nodorum SN15] gi|111061595|gb|EAT82715.1| SNOG_09450 [Phaeosphaeria nodorum SN15]
  misc_feature (13)..(298): NCBI GI: 238840889 Blast Desc: conserved [Microsporum canis CBS 113480]
  misc_feature (1)..(264): NCBI GI: 242764820 Blast Desc: TSTA_068860 [Talaromyces stipitatus ATCC 10500] gi|218724045|gb|EED23462.1| TSTA_068860 [Talaromyces stipitatus ATCC 10500]
  misc_feature (82)..(264): NCBI GI: 71002194 Blast Desc: AFUA_2G14450 [Aspergillus fumigatus Af293] gi|66853416|gb|EAL93740.1| AFUA_2G14450 [Aspergillus fumigatus Af293] gi|159129833|gb|EDP54947.1| AFUB_030070 [Aspergillus
  misc_feature (82)..(264): NCBI GI: 119481749 Blast Desc: NFIA_089630 [Neosartorya fischeri NRRL 181] gi|119409057|gb|EAW19006.1| conserved [Neosartorya fischeri NRRL 181]
  misc_feature (87)..(223): NCBI GI: 242766624 Blast Desc: conserved [Talaromyces stipitatus ATCC 10500] gi|218724404|gb|EED23821.1| conserved [Talaromyces stipitatus ATCC 10500]
  misc_feature (62)..(217): NCBI GI: 156041152 Blast Desc: [Sclerotinia sclerotiorum 1980] gi|154695938|gb|EDN95676.1| [Sclerotinia sclerotiorum 1980]
  misc_feature (92)..(284): NCBI GI: 238845707 Blast Desc: conserved [Microsporum canis CBS 113480]
  misc_feature (74)..(303): NCBI GI: 156057637 Blast Desc: SS1G_04550 [Sclerotinia sclerotiorum 1980] gi|154702335|gb|EDO02074.1| SS1G_04550 [Sclerotinia sclerotiorum 1980]
  misc_feature (54)..(302): NCBI GI: 256723574 Blast Desc: NECHADRAFT_42230 [Nectria haematococca mpVI 77-13-4]
  misc_feature: Useful for introducing or modulating the production of volatile compounds
MDPIVTLPVYEGLGIPLVVVITGIVAARCWVNTRISHGRLQVHDYMSIFGLTFFVVTYAVNDIIIRTVSASSLDLPLLFRLAIIIIILVQGTLWFTKAPILFLYLQLFGSHRWLRYIARSALVVAGLIYVAGLIYTLARCPISHITLEAYQACAHSNTLTGVISGFVSVILDAIIFALPIPVIVSLQLETSKKVGLVVTFSAGILGIAASVVALYYKYDALSGDGTELIAPIFFFAIEGFVALAVGCAPAMRSFWNRYMIKEVLQGSSSGYSYVLDNQRKPHRDPLGSIWDGSVDDTERIRSGL

SEQ ID NO: 19918 - DNA, 1064 bp, Muscodor strobelii
  misc_feature: SGI EST ID NO. CUFF.46626.0
  misc_feature: Variant of the nucleotide sequence at SEQ ID NO 19916
gggggatcccaccttgcttatcaattgcacatttggcgactgagaatgaaactctttcaggagggcatccaacggcctgggaggggatttggatgcagaaaaaccagccgttagctctctttctccagtctggttgtgcctcttcttctatggacaggccaactgcaacctggtattttcgtggcgtattgactgaatagaactcgagccttgcacgaaatggatccaatcgtcactttgcctgtatatgaaggcctcggcatccctctcgtcgtggttatcactggcatcgtcgctgctcgatgctgggttaacacccgtatctctcacggccgactccaggttcacgactatatgtcaattttcggactgaccttcttcgtcgtgacatacgctgtcaacgacattatcatcagaactgtgtcggcctcgtcactagacctaccgctccttttcagactcgccatcatcatcatcattctagtccaaggtctaatttacgttgccggtctaatatacactcttgcccggtgtccgatcagtcatatcaccctcgaagcgtatcaggcttgcgcccactctaacacgctcaccggtgtcatatcagggttcgtctctgttatcctcgatgccatcatattcgcgttgcctattcctgtcatcgtcagtctgcagctcgagacgtcaaagaaggttggacttgtcgtcaccttctctgccggtatacttgggattgctgcatccgtagttgctctgtactacaagtatgatgctctctctggggacgggaccgagctcattgctccgatattcttctttgctatcgagggcttcgttgcgttagcagtaggctgcgcgcctgcgatgcggtcgttttggaatcgatacatgatcaaggaagtgctccagggttcgtcatctggctatagctatgtcttggacaaccaacgcaaacctcatcgagacccgcttggttctatctgggatggatccgtagacgataccgaaaggattaggtcaggcttatgatatgagtcatatagtttgcttaaaaacaattaaga

SEQ ID NO: 19919 - DNA, 927 bp, Muscodor strobelii
  misc_feature: SGI cDNA ID NO. 566710
  misc_feature: Encodes the peptide sequence at SEQ ID NO 19920
atgtcgcagacaattgtcgaggccattcctagagagaagccgacaagtcgggctcgggccgactcaaattcgtcgtcatggtcagcatcaggagaagcaaagtggcgcctcgttctcgcgcatgcacccactacagatttcttatacggcgtcctctcaacacacatcttttgcagacctagttgtccatcgagacgaccacggcgggccaatgtccgattcttcgacaccgcggccaaggccgccgcagccggcttccgcgcatgtcgtcgctgcaagcccgaatcaacagacgccgccgacgagtccccccaggcctccgctgcaaagcaggttggcttggcttgcacattcatccaacagcgcaagggcgatgctcagttagtagacatagccgctcacgtcggcctgtcaccgcgatatttccatggactatttaagcaattcgttgggacgacacctggcgtatatgctgcaaatatcaggcagaaacatgccgcacaatcatctgttgtcgagacgccgccttcactgtctgctggctctggaactccgatctcactaacacgcgcttcggggacaccggcaccttcagacggcggagcgcagcctgtcaggtttgcgggaggcgaggcagacatgatgggtctaccatcgatcgacctcggtgcaacggacatgtcgctaatggatttctcaacgcaaatgacaatgggaaacccattcccggagtctttcgacccatgctgggactatataaactttggcgatacgtcgtttcaatctattgatgactgggctttaggcatgtccatgtcgtcagatacacatcttgggccatacgaccaaacactggtgaataaacagtcggaatatatcgatccatcaatgttaagtgcaataacaggaataatgccaccgatataa

SEQ ID NO: 19920 - protein, 308 aa, Muscodor strobelii
  misc_feature: SGI Peptide ID NO. 566710
  misc_feature (114)..(159): Pfam Id: PF00165 Pfam Desc: Bacterial regulatory helix-turn-helix proteins, AraC family
  misc_feature (32)..(95): Pfam Id: PF02805 Pfam Desc: Metal binding domain of Ada
  misc_feature (32)..(207): NCBI GI: 116179316 Blast Desc: CHGG_00286 [Chaetomium globosum CBS 148.51] gi|88184583|gb|EAQ92051.1| CHGG_00286 [Chaetomium globosum CBS 148.51]
  misc_feature (21)..(229): NCBI GI: 238844441 Blast Desc: methylated-DNA-protein-cysteine methyltransferase [Microsporum canis CBS 113480]
  misc_feature (29)..(215): NCBI GI: 258572092 Blast Desc: conserved [Uncinocarpus reesii 1704] gi|237905090|gb|EEP79491.1| conserved [Uncinocarpus reesii 1704]
  misc_feature (29)..(188): NCBI GI: 119181951 Blast Desc: CIMG_06036 [Coccidioides immitis RS]
  misc_feature (29)..(188): NCBI GI: 240109106 Blast Desc: Metal binding domain of Ada family protein [Coccidioides posadasii C735 delta SOWgp]
  misc_feature (28)..(213): NCBI GI: 119498491 Blast Desc: DNA repair and transcription factor Ada, [Neosartorya fischeri NRRL 181] gi|119414167|gb|EAW24106.1| DNA repair and transcription factor Ada, [Neosartorya fischeri NRRL 181]
  misc_feature (28)..(213): NCBI GI: 70998552 Blast Desc: DNA repair and transcription factor Ada [Aspergillus fumigatus Af293] gi|66851634|gb|EAL91960.1| DNA repair and transcription factor Ada, [Aspergillus fumigatus Af293]
  misc_feature (28)..(213): NCBI GI: 159126266 Blast Desc: DNA repair and transcription factor Ada, [Aspergillus fumigatus A1163]
  misc_feature (32)..(158): NCBI GI: 265983529 Blast Desc: methylated-DNA-protein-cysteine methyltransferase [Brucella sp. 83/13] gi|264662121|gb|EEZ32382.1| methylated-DNA-protein-cysteine methyltransferase [Brucella sp.
  misc_feature (30)..(159): NCBI GI: 115438252 Blast Desc: conserved [Aspergillus terreus NIH2624] gi|114188834|gb|EAU30534.1| conserved [Aspergillus terreus NIH2624]
MSQTIVEAIPREKPTSRARADSNSSSWSASGEAKWRLVLAHAPTTDFLYGVLSTHIFCRPSCPSRRPRRANVRFFDTAAKAAAAGFRACRRCKPESTDAADESPQASAAKQVGLACTFIQQRKGDAQLVDIAAHVGLSPRYFHGLFKQFVGTTPGVYAANIRQKHAAQSSVVETPPSLSAGSGTPISLTRASGTPAPSDGGAQPVRFAGGEADMMGLPSIDLGATDMSLMDFSTQMTMGNPFPESFDPCWDYINFGDTSFQSIDDWALGMSMSSDTHLGPYDQTLVNKQSEYIDPSMLSAITGIMPPI

SEQ ID NO: 19921 - DNA, 1107 bp, Muscodor strobelii
  misc_feature: SGI EST ID NO. CUFF.46623.0
  misc_feature: Variant of the nucleotide sequence at SEQ ID NO 19919
tttgcgactccctcaacaaattggccgagatccttatcaacaacagctcttgctcgtttcattaactgcagcatcaatttttgaacggacggaaatcaaaccacgacaatcaaaccataagcaacagcattgggaattgaccctcagaaagagaatatgtcgcagacaattgtcgaggccattcctagagagaagccgacaagtcgggctcgggccgactcaaattcgtcgtcatggtcagcatcaggagaagcaaagtggcgcctcgttctcgcgcatgcacccactacagatttcttatacggcgtcctctcaacacacatcttttgcagacctagttgtccatcgagacgaccacggcgggccaatgtccgattcttcgacaccgcggccaaggccgccgcagccggcttccgcgcatgtcgtcgctgcaagcccgaatcaacagacgccgccgacgagtccccccaggcctccgctgcaaagcaggttggcttggcttgcacattcatccaacagcgcaagggcgatgctcagttagtagacatagccgctcacgtcggcctgtcaccgcgatatttccatggactatttaagcaattcgttgggacgacacctggcgtatatgctgcaaatatcaggcagaaacatgccgcacaatcatctgttgtcgagacgccgccttcactgtctgctggctctggaactccgatctcactaacacgcgcttcggggacaccggcaccttcagacggcggagcgcagcctgtcaggtttgcgggaggcgaggcagacatgatgggtctaccatcgatcgacctcggtgcaacggacatgtcgctaatggatttctcaacgcaaatgacaatgggaaacccattcccggagtctttcgacccatgctgggactatataaactttggcgatacgtcgtttcaatctattgatgactgggctttaggcatgtccatgtcgtcagatacacatcttgggccatacgaccaaacactggtgaataaacagtcggaatatatcgatccatcaatgttaagtgcaataacaggaataatgccaccgatataaaataacacgggttttactgctata

SEQ ID NO: 19922 - DNA, 1413 bp, Muscodor strobelii
  misc_feature: SGI cDNA ID NO. 566711
  misc_feature: Encodes the peptide sequence at SEQ ID NO 19923
atgaatcctttagcaacgtcctatgaactggtgcattaccttggtatatctaagcctaaaataattgccgttgatgccgctttgttatcgaccttgaacgatgctcttcatgcttcgtcgcttgtccgagcgcctctggtaatagtcattgaagatttcacaatgcactcaggcgatgttgataggcccaaattccccaaagattttgtccggttccagacccgatccctacggccattggacttgcggttacgcgataacagacaaattcctgcggcgggtatgtgctttagctccggcacctcagggaaaccaaagggtgtaattctttcacatcacaatcttattgcgtatctactcacaatcagggcaacaaatccccatatccacagctcaaacaccagcgaagtcttctttccatcctttgctcacatttatgggctggtatccgcaatattacttccggtctatgtgggctgtagcatcgtggtcatgacccaattcgagtttctggcatacctgcgaaagtgtgcggaaatcaaagcgactattttgcgcctagtcccggcattagctattcgtatgaccaaggatagccaggtcaaggaacttgatttacggtctgtcaagaatatcatggtgtcaggggcggcactctcatcagatggtgtgtatagaatagccccgttcccttttgagttgattttttcccggaaaggacttctgctgacatgtgtcacaacgatacagacccttcggcaaatgctgagtcctgatgcagccgtactgaacggattcggtatgacggaggccacgataatgatgctgagagagacgcaaagccatagagcaggaagtctcgggcgtcctgtggctggggcttcggtccgcgttgtgaatgatgatctaaatgacgtgaagccgggtcacgtgggcgagtgccttgtcaagggaccaactgtattcatgcggtacaaggaaaatccagaggaaactagcgctacattcacgagtgacggttggctacggacaggcgatatgcttcgcatagggaggaaaaaggaactgatcaagttcaagggaaatcaagtggctcccgccgagattgaagctcttcttttatcgcaccccttagtaaccgaagcgggagtgtttggtatatatgatgctgcgcaggacaccgaactgcccgctggctgcatcgtcctggcgtcgagtgtgaagattgaagatacaagcgaggttatcgaaagtatctcgttatttgtcaagatgcgagtagccccctataagagactgcgaggcggactttttgcggtggaagcattgccgaagggtgccaccggaaaattgctacggagagcattgccggccattgttacagggaaagtaaaattacaggcaaagctctga

SEQ ID NO: 19923 - protein, 470 aa, Muscodor strobelii
  misc_feature: SGI Peptide ID NO. 566711
  misc_feature (7)..(384): Pfam Id: PF00501 Pfam Desc: AMP-binding enzyme
  misc_feature (1)..(349): Pfam Id: PF00501 Pfam Desc: AMP-binding enzyme
  misc_feature (350)..(384): Pfam Id: PF00501 Pfam Desc: AMP-binding enzyme
  misc_feature (64)..(456): NCBI GI: 261354678 Blast Desc: luciferin 4-monooxygenase [Verticillium albo-atrum VaMs.102]
  misc_feature (1)..(458): NCBI GI: 238845716 Blast Desc: acyl-CoA synthetases/AMP-acid ligases II [Microsporum canis CBS 113480]
  misc_feature (1)..(457): NCBI GI: 212533901 Blast Desc: AMP dependent CoA ligase, [Penicillium marneffei ATCC 18224] gi|210072471|gb|EEA26560.1| AMP dependent CoA ligase, [Penicillium marneffei ATCC 18224]
  misc_feature (1)..(456): NCBI GI: 71005304 Blast Desc: UM01171.1 [Ustilago maydis 521] gi|46096722|gb|EAK81955.1| UM01171.1 [Ustilago maydis 521]
  misc_feature (2)..(456): NCBI GI: 119177143 Blast Desc: CIMG_07552 [Coccidioides immitis RS]
  misc_feature (2)..(456): NCBI GI: 240107756 Blast Desc: AMP-binding enzyme, [Coccidioides posadasii C735 delta SOWgp]
  misc_feature (1)..(464): NCBI GI: 212541170 Blast Desc: AMP dependent CoA ligase, [Penicillium marneffei ATCC 18224] gi|210068039|gb|EEA22131.1| AMP dependent CoA ligase, [Penicillium marneffei ATCC 18224]
  misc_feature (93)..(456): NCBI GI: 71020551 Blast Desc: UM04359.1 [Ustilago maydis 521] gi|46100401|gb|EAK85634.1| UM04359.1 [Ustilago maydis 521]
  misc_feature (1)..(456): NCBI GI: 226290820 Blast Desc: 4-coumarate-CoA ligase [Paracoccidioides brasiliensis Pb18]
  misc_feature (1)..(456): NCBI GI: 225681334 Blast Desc: 4-coumarate-CoA ligase [Paracoccidioides brasiliensis Pb03]
  misc_feature (97)..(458): SWISSPROT Homolog: EC 6.2.1.12 4-coumarate--CoA ligase
MNPLATSYELVHYLGISKPKIIAVDAALLSTLNDALHASSLVRAPLVIVIEDFTMHSGDVDRPKFPKDFVRFQTRSLRPLDLRLRDNRQIPAAGMCFSSGTSGKPKGVILSHHNLIAYLLTIRATNPHIHSSNTSEVFFPSFAHIYGLVSAILLPVYVGCSIVVMTQFEFLAYLRKCAEIKATILRLVPALAIRMTKDSQVKELDLRSVKNIMVSGAALSSDGVYRIAPFPFELIFSRKGLLLTCVTTIQTLRQMLSPDAAVLNGFGMTEATIMMLRETQSHRAGSLGRPVAGASVRVVNDDLNDVKPGHVGECLVKGPTVFMRYKENPEETSATFTSDGWLRTGDMLRIGRKKELIKFKGNQVAPAEIEALLLSHPLVTEAGVFGIYDAAQDTELPAGCIVLASSVKIEDTSEVIESISLFVKMRVAPYKRLRGGLFAVEALPKGATGKLLRRALPAIVTGKVKLQAKL

SEQ ID NO: 19924 - DNA, 661 bp, Muscodor strobelii
  misc_feature: SGI EST ID NO. CUFF.46709.1
  misc_feature: Variant of the nucleotide sequence at SEQ ID NO 19922
ctttagctccggcacctcagggaaaccaaagggtgtaattctttcacatcacaatcttattgcgtatctactcacaatcagggcaacaaatccccatatccacagctcaaacaccagcgaagtcttctttccatcctttgctcacatttatgggctggtatccgcaatattacttccggtctatgtgggctgtagcatcgtggtcatgacccaattcgagtttctggcatacctgcgaaagtgtgcggaaatcaaagcgactattttgcgcctagtcccggcattagctattcgtatgaccaaggatagccaggtcaaggaacttgatttacggtctgtcaagaatatcatggtgtcaggggcggcactctcatcagatgacgatacagacccttcggcaaatgctgagtcctgatgcagccgtactgaacggattcggtatgacggaggccacgataatgatgctgagagagacgcaaagccatagagcaggaagtctcgggcgtcctgtggctggggcttcggtccgcgttgtgaatgatgatctaaatgacgtgaagccgggtcacgtgggcgagtgccttgtcaagggaccaactgtattcatgcggtacaaggaaaatccagaggaaactagcgctacattcacgagtgacggttg

SEQ ID NO: 19925 - DNA, 1341 bp, Muscodor strobelii
  misc_feature: SGI cDNA ID NO. 566712
  misc_feature: Encodes the peptide sequence at SEQ ID NO 19926
atgaatcctttagcaacgtcctatgaactggtgcattaccttggtatatctaagcctaaaataattgccgttgatgccgctttgttatcgaccttgaacgatgctcttcatgcttcgtcgcttgtccgagcgcctctggtaatagtcattgaagatttcacaatgcactcaggcgatgttgataggcccaaattccccaaagattttgtccggttccagacccgatccctacggccattggacttgcggttacgcgataacagacaaattcctgcggcgggtatgtgctttagctccggcacctcagggaaaccaaagggtgtaattctttcacatcacaatcttattgcgtatctactcacaatcagggcaacaaatccccatatccacagctcaaacaccagcgaagtcttctttccatcctttgctcacatttatgggctggtatccgcaatattacttccggtctatgtgggctgtagcatcgtggtcatgacccaattcgagtttctggcatacctgcgaaagtgtgcggaaatcaaagcgactattttgcgcctagtcccggcattagctattcgtatgaccaaggatagccaggtcaaggaacttgatttacggtctgtcaagaatatcatggtgtcaggggcggcactctcatcagatggtacgatacagacccttcggcaaatgctgagtcctgatgcagccgtactgaacggattcggtatgacggaggccacgataatgatgctgagagagacgcaaagccatagagcaggaagtctcgggcgtcctgtggctggggcttcggtccgcgttgtgaatgatgatctaaatgacgtgaagccgggtcacgtgggcgagtgccttgtcaagggaccaactgtattcatgcggtacaaggaaaatccagaggaaactagcgctacattcacgagtgacggttggctacggacaggcgatatgcttcgcatagggaggaaaaaggaactgatcaagttcaagggaaatcaagtggctcccgccgagattgaagctcttcttttatcgcaccccttagtaaccgaagcgggagtgtttggtatatatgatgctgcgcaggacaccgaactgcccgctggctgcatcgtcctggcgtcgagtgtgaagattgaagatacaagcgaggttatcgaaagtatctcgttatttgtcaagatgcgagtagccccctataagagactgcgaggcggactttttgcggtggaagcattgccgaagggtgccaccggaaaattgctacggagagcattgccggccattgttacagggaaagtaaaattacaggcaaagctctga

SEQ ID NO: 19926 - protein, 446 aa, Muscodor strobelii
  misc_feature: SGI Peptide ID NO. 566712
  misc_feature (7)..(360): Pfam Id: PF00501 Pfam Desc: AMP-binding enzyme
  misc_feature (1)..(325): Pfam Id: PF00501 Pfam Desc: AMP-binding enzyme
  misc_feature (326)..(360): Pfam Id: PF00501 Pfam Desc: AMP-binding enzyme
  misc_feature (64)..(432): NCBI GI: 261354678 Blast Desc: luciferin 4-monooxygenase [Verticillium albo-atrum VaMs.102]
  misc_feature (1)..(434): NCBI GI: 238845716 Blast Desc: acyl-CoA synthetases/AMP-acid ligases II [Microsporum canis CBS 113480]
  misc_feature (1)..(433): NCBI GI: 212533901 Blast Desc: AMP dependent CoA ligase, [Penicillium marneffei ATCC 18224] gi|210072471|gb|EEA26560.1| AMP dependent CoA ligase, [Penicillium marneffei ATCC 18224]
  misc_feature (1)..(432): NCBI GI: 71005304 Blast Desc: UM01171.1 [Ustilago maydis 521] gi|46096722|gb|EAK81955.1| UM01171.1 [Ustilago maydis 521]
  misc_feature (2)..(432): NCBI GI: 240107756 Blast Desc: AMP-binding enzyme, [Coccidioides posadasii C735 delta SOWgp]
  misc_feature (2)..(432): NCBI GI: 119177143 Blast Desc: CIMG_07552 [Coccidioides immitis RS]
  misc_feature (93)..(441): NCBI GI: 91081619 Blast Desc: : similar to AMP dependent coa ligase [Tribolium castaneum] gi|270005090|gb|EFA01538.1| TcasGA2_TC007098 [Tribolium castaneum]
  misc_feature (1)..(440): NCBI GI: 212541170 Blast Desc: AMP dependent CoA ligase, [Penicillium marneffei ATCC 18224] gi|210068039|gb|EEA22131.1| AMP dependent CoA ligase, [Penicillium marneffei ATCC 18224]
  misc_feature (93)..(432): NCBI GI: 71020551 Blast Desc: UM04359.1 [Ustilago maydis 521] gi|46100401|gb|EAK85634.1| UM04359.1 [Ustilago maydis 521]
  misc_feature (2)..(432): NCBI GI: 85112028 Blast Desc: NCU03295 [Neurospora crassa OR74A] gi|28925993|gb|EAA34985.1| NCU03295 [Neurospora crassa OR74A]
  misc_feature (97)..(434): SWISSPROT Homolog: EC 6.2.1.12 4-coumarate--CoA ligase
MNPLATSYELVHYLGISKPKIIAVDAALLSTLNDALHASSLVRAPLVIVIEDFTMHSGDVDRPKFPKDFVRFQTRSLRPLDLRLRDNRQIPAAGMCFSSGTSGKPKGVILSHHNLIAYLLTIRATNPHIHSSNTSEVFFPSFAHIYGLVSAILLPVYVGCSIVVMTQFEFLAYLRKCAEIKATILRLVPALAIRMTKDSQVKELDLRSVKNIMVSGAALSSDGTIQTLRQMLSPDAAVLNGFGMTEATIMMLRETQSHRAGSLGRPVAGASVRVVNDDLNDVKPGHVGECLVKGPTVFMRYKENPEETSATFTSDGWLRTGDMLRIGRKKELIKFKGNQVAPAEIEALLLSHPLVTEAGVFGIYDAAQDTELPAGCIVLASSVKIEDTSEVIESISLFVKMRVAPYKRLRGGLFAVEALPKGATGKLLRRALPAIVTGKVKLQAKL

SEQ ID NO: 19927 - DNA, 661 bp, Muscodor strobelii; identical to SEQ ID NO: 19924
  misc_feature: SGI EST ID NO. CUFF.46709.1
  misc_feature: Variant of the nucleotide sequence at SEQ ID NO 19925

SEQ ID NO: 19928 - DNA, 711 bp, Muscodor strobelii
  misc_feature: SGI cDNA ID NO. 566713
  misc_feature: Encodes the peptide sequence at SEQ ID NO 19929
atgtccttcgctgagcaattcaagggaaaggttattgccctcactggcgccgcatccggcatcggcctagcgacagcgcatttgttagccagtcggggtgccactctgtccctcgccgatctccaggcggaggcgctacacaaggccgaagcggacatcaaaaccaaatatcccgcgacggaactcgcaacacccaagaccctgggcacgagagagatctcggagcaagatgctggcgactgggagttcgtcatgggcgtaaacactacaggggtgatgcattgtctcaaagctcagacgagggtaattgccagtcacggagcaatcgtcaatgccagctcgatcgctggaaacacaggacgaccacgcaactcggcatatgtgtgtaacgtcctcgctgctatagctgcttccaaacacgccgttattggcctcacaaagtctgtagctaaggagattggcaggcgcggcgtgcgtgtcaatgcaatctgccctggacgaatcgagacgcccatgctgcaggcgtcattcagacccgagggtgacaatacaaagcgtcaggaggagattggcaaggagcacgatcaaattgcgttgggccgcaggggaaagcccgaggaggtcgcgaaactcatagcgttcctattgagtgatgaaagtacgtatatttctggcgcttgtgttccgattgatggcgcctggaactgctag

SEQ ID NO: 19929 - protein, 236 aa, Muscodor strobelii
  misc_feature: SGI Peptide ID NO. 566713
  misc_feature (10)..(154): Pfam Id: PF00106 Pfam Desc: short chain dehydrogenase
  misc_feature (73)..(154): Pfam Id: PF00106 Pfam Desc: short chain dehydrogenase
  misc_feature (4)..(236): NCBI GI: 110162100 Blast Desc: ABA4 protein [Botryotinia fuckeliana]
  misc_feature (4)..(234): NCBI GI: 154309270 Blast Desc: BC1G_07529 [Botryotinia fuckeliana B05.10] gi|150852353|gb|EDN27545.1| BC1G_07529 [Botryotinia fuckeliana B05.10]
  misc_feature (7)..(234): NCBI GI: 169768656 Blast Desc: [Aspergillus oryzae RIB40] gi|83766656|dbj|BAE56796.1| protein product [Aspergillus oryzae]
  misc_feature (7)..(234): NCBI GI: 67522731 Blast Desc: AN1822.2 [Aspergillus nidulans FGSC A4] gi|40745831|gb|EAA64987.1| AN1822.2 [Aspergillus nidulans FGSC A4] gi|259487170|tpe|CBF85629.1| TPA: oxidoreductase, short chain
  misc_feature (8)..(236): NCBI GI: 189192222 Blast Desc: 3-alpha-(or 20-beta)-hydroxysteroid dehydrogenase [Pyrenophora tritici-repentis Pt-1C-BFP] gi|187974056|gb|EDU41555.1| 3-alpha-(or 20-beta)-hydroxysteroid
  misc_feature (7)..(234): NCBI GI: 238497976 Blast Desc: short chain dehydrogenase family protein [Aspergillus flavus NRRL3357] gi|220693497|gb|EED49842.1| short chain dehydrogenase family protein [Aspergillus flavus NRRL3357]
  misc_feature (7)..(232): NCBI GI: 261360495 Blast Desc: 3-oxoacyl-[acyl-carrier-protein] reductase [Verticillium albo-atrum VaMs.102]
  misc_feature (7)..(236): NCBI GI: 169600775 Blast Desc: SNOG_03237 [Phaeosphaeria nodorum SN15] gi|111068848|gb|EAT89968.1| SNOG_03237 [Phaeosphaeria nodorum SN15]
  misc_feature (7)..(232): NCBI GI: 156052176 Blast Desc: SS1G_07497 [Sclerotinia sclerotiorum 1980] gi|154705273|gb|EDO05012.1| SS1G_07497 [Sclerotinia sclerotiorum 1980]
  misc_feature (7)..(234): NCBI GI: 261361457 Blast Desc: 3-alpha-(or 20-beta)-hydroxysteroid dehydrogenase [Verticillium albo-atrum VaMs.102]
  misc_feature (6)..(232): SWISSPROT Homolog: EC 1.1.1.100 3-oxoacyl-[acyl-carrier-protein] reductase
MSFAEQFKGKVIALTGAASGIGLATAHLLASRGATLSLADLQAEALHKAEADIKTKYPATELATPKTLGTREISEQDAGDWEFVMGVNTTGVMHCLKAQTRVIASHGAIVNASSIAGNTGRPRNSAYVCNVLAAIAASKHAVIGLTKSVAKEIGRRGVRVNAICPGRIETPMLQASFRPEGDNTKRQEEIGKEHDQIALGRRGKPEEVAKLIAFLLSDESTYISGACVPIDGAWNC

SEQ ID NO: 19930 - DNA, 855 bp, Muscodor strobelii
  misc_feature: SGI EST ID NO. CUFF.46713.2
  misc_feature: Variant of the nucleotide sequence at SEQ ID NO 19928
taacgtggcatctttcccgctaccagacccaagaccctgggcacgagagagatctcggagcaagatgctggcgactgggagttcgtcatgggcgtaaacactacaggggtgatgcattgtctcaaagctcagacgagggtaattgccagtcacggagcaatcgtcaatgccagctcgatcgctggaaacacaggacgaccacgcaactcggcatatgtgtgtaacgtcctcgctgctatagtagacgggttttatcggtgaggagagcacgcttaaggaatgaactaacagaatttgatacaataggctgcttccaaacacgccgttattggcctcacaaagtctgtagctaaggagattggcaggcgcggcgtgcgtgtcaatgcaatctgccctggacgaatcgagacgcccatgctgcaggcgtcattcagacccgagggtgacaatacaaagcgtcaggaggagattggcaaggagcacgatcaaattgcgttgggccgcaggggaaagcccgaggaggtcgcgaaactcatagcgttcctattgagtgatgaaagtacgtatatttctggcgcttgtgttccgattgatggcgcctggaactgctagatctacttcgtatgtatagagctatgtagatcctcgaatcgatatatgccaacctacgtggtggaccaaacttcgctcagaataatcgctcctcattgatgacatcctccggccgcggcattgcgtgtttgagctcaactttgcagatactacaaatttccatggcagtgctaaacgcgaaatccagctgtcttctggtcccaccattgcgcatgagcccacgcatatgccaggctacctctg

SEQ ID NO: 19931 - DNA, 1935 bp, Muscodor strobelii
  misc_feature: SGI cDNA ID NO. 566714
  misc_feature: Encodes the peptide sequence at SEQ ID NO 19932
atgacggtctcatctcaacgtcccgtccggattggaggcgcttcaggagggttcaccgatagagttgccgcgattgctcgcctcgcagctgatcctgacatagacgccatcgtaggtgactggctttccgaaaatgtgatgacaggatacggggcagggaaagcagcacagaatctcgaaggtcgtcagcccgggcaaagctcgttggccttgcaagaccgaatgaaaacagcacaatatgcgtcgacctttctgcaatgtctcgagcctgcactctctctgctagccaaaaacggcacaaaacttgcagtcaatgccggggctagcgacaccgagcttcttgctgaggttgttgttgatatggcccggcaaaaaggcctacaactcaatgtcgcctgggttgaaggagacgacataacgacggaattcaagaatgcggttaacagtggtcatgaatttcggagcttaacggacgggaagagcatctcggaatggggacacaatccaatttgtgctcaggtacaggcctatctaggaagttttgggattgctcaagccctacatggtggtgcagatatagttatttgtggccgggttgccgatgctgcgccgacgattggggtcgcggcctattatcatggctggaaaccgtcggatttcgaccagcttgccggcgccttgattgctggtcatgtcatcgaatgctcagcgtttgcgaccggcggttactacagtcgttttaaggacttgatgagggaaaggagacacctgaacttggggtttcctattgccgctatatatgaaaacggcgaatttgacattctaaaggagaaagacactggcggtatcgttaatgtggagactgttacttcccaacttgtctatgagatatccgggcccctttactacaactctgatgtggttgccgatattcatggtacgtattgcaatatcagatgcgaggataaggatcaggaccttgttcacgtaagcggcgtttgcggattgccgccaccaccgacgacgagatgcggtgttactgcgcatggtggctttcaggcagagtggcatttttatttagtaggactcgatatcgaagaaaagtgccagtggatggaggagcaagcgaaatacgctatcggcgatgatctcatcagccagttttccatgctcaagttccacgtgcacggtacaagtcctgataatccaccaaaccaggaagctgccactgtagattttcgcattttcgcccaagccaaggacaaggccttattcgacccttctctgccttatgggttcagtaggaagttgtacgagacagtccttcaatcctgtccaggcgtttctcggcctaacgacctgcgtcagtcgaccgcgaagagctatttcgagtatttcgtcacgttagtcccacagtctttctgtaatcaccaggttcacttcctttttggcgacaagaagagtgtgaacatccctcttcctccgacaatgagagaatatggcgcccaggaatcctataacacgaaggatccagtgccactcgaggagtttggagagactgtcattgcaccactgggatatgttgcccttggaaggtctggtgacaaggcgtctgacgccaatgttggctttttcgttagcactctcgaagagtggaattggcttcgttcgattctttccatagaaaggttcaaggcgctcctcggcgaacacgaatattcagggggccgaatcgatcgattcgaaatggctaacggacatggtactaacttctttgttgtaatacgcgctgtgcatttcttacttaaggaccatctagacagaggatacaattcgggatcaaaactcgacacgcttgcgaagaacctctgcgaatacgtgagagcgaaatatctgccagtaccgaagaagtttctcgagggtggcagaatatag

SEQ ID NO: 19932 - protein, 644 aa, Muscodor strobelii
  misc_feature: SGI Peptide ID NO. 566714
  misc_feature (11)..(397): Pfam Id: PF07287 Pfam Desc: Domain of function (DUF1446)
  misc_feature (73)..(374): Pfam Id: PF07287 Pfam Desc: Domain of function (DUF1446)
  misc_feature (2)..(644): NCBI GI: 261354680 Blast Desc: conserved [Verticillium albo-atrum VaMs.102]
  misc_feature (4)..(644): NCBI GI: 261355824 Blast Desc: conserved [Verticillium albo-atrum VaMs.102]
  misc_feature (2)..(644): NCBI GI: 189197007 Blast Desc: PTRG_04508 [Pyrenophora tritici-repentis Pt-1C-BFP] gi|187980789|gb|EDU47415.1| PTRG_04508 [Pyrenophora tritici-repentis Pt-1C-BFP]
  misc_feature (2)..(644): NCBI GI: 169616404 Blast Desc: SNOG_11374 [Phaeosphaeria nodorum SN15] gi|160703171|gb|EAT81082.2| SNOG_11374 [Phaeosphaeria nodorum SN15]
  misc_feature (8)..(644): NCBI GI: 256724636 Blast Desc: NECHADRAFT_48019 [Nectria haematococca mpVI 77-13-4]
  misc_feature (5)..(644): NCBI GI: 169773091 Blast Desc: [Aspergillus oryzae RIB40] gi|238491030|ref|XP_002376752.1| DUF1446 domain protein [Aspergillus flavus NRRL3357] gi|83768875|dbj|BAE59012.1| protein
  misc_feature (7)..(644): NCBI GI: 119472007 Blast Desc: NFIA_057110 [Neosartorya fischeri NRRL 181] gi|119406411|gb|EAW16362.1| conserved [Neosartorya fischeri NRRL 181]
  misc_feature (5)..(644): NCBI GI: 145240401 Blast Desc: An08g07320 [Aspergillus niger] gi|134077365|emb|CAK39979.1| protein product [Aspergillus niger]
  misc_feature (10)..(644): NCBI GI: 67516547 Blast Desc: AN0555.2 [Aspergillus nidulans FGSC A4] gi|40747498|gb|EAA66654.1| AN0555.2 [Aspergillus nidulans FGSC A4]
  misc_feature (1)..(644): NCBI GI: 240108773 Blast Desc: CPC735_022780 [Coccidioides posadasii C735 delta SOWgp]
MTVSSQRPVRIGGASGGFTDRVAAIARLAADPDIDAIVGDWLSENVMTGYGAGKAAQNLEGRQPGQSSLALQDRMKTAQYASTFLQCLEPALSLLAKNGTKLAVNAGASDTELLAEVVVDMARQKGLQLNVAWVEGDDITTEFKNAVNSGHEFRSLTDGKSISEWGHNPICAQVQAYLGSFGIAQALHGGADIVICGRVADAAPTIGVAAYYHGWKPSDFDQLAGALIAGHVIECSAFATGGYYSRFKDLMRERRHLNLGFPIAAIYENGEFDILKEKDTGGIVNVETVTSQLVYEISGPLYYNSDVVADIHGTYCNIRCEDKDQDLVHVSGVCGLPPPPTTRCGVTAHGGFQAEWHFYLVGLDIEEKCQWMEEQAKYAIGDDLISQFSMLKFHVHGTSPDNPPNQEAATVDFRIFAQAKDKALFDPSLPYGFSRKLYETVLQSCPGVSRPNDLRQSTAKSYFEYFVTLVPQSFCNHQVHFLFGDKKSVNIPLPPTMREYGAQESYNTKDPVPLEEFGETVIAPLGYVALGRSGDKASDANVGFFVSTLEEWNWLRSILSIERFKALLGEHEYSGGRIDRFEMANGHGTNFFVVIRAVHFLLKDHLDRGYNSGSKLDTLAKNLCEYVRAKYLPVPKKFLEGGRI

SEQ ID NO: 19933 - DNA, 768 bp, Muscodor strobelii
  misc_feature: SGI EST ID NO. CUFF.46637.0
  misc_feature: Variant of the nucleotide sequence at SEQ ID NO 19931
caggaccttgttcacgtaagcggcgtttgcggattgccgccaccaccgacgacgagatgcggtgttactgcgcatggtggctttcaggcagagtggcatttttatttagtaggactcgatatcgaagaaaagtgccagtggatggaggagcaagcgaaatacgctatcggcgatgatctcatcagccagttttccatgctcaagttccacgtgcacggtacaagtcctgataatccaccaaaccagctgccactgtagattttcgcattttcgcccaagccaaggacaaggccttattcgacccttctctgccttatgggttcagtaggaagttgtacgagacagtccttcaatcctgtccaggcgtttctcggcctaacgacctgcgtcagtcgaccgcgaagagctatttcgagtatttcgtcacgttagtcccacagtctttctgtaatcaccaggttcacttcctttttggcgacaagaagagtgtgaacatccctcttcctccgacaatgagagaatatggcgcccaggaatcctataacacgaaggatccagtgccactcgaggagtttggagagactgtcattgcaccactgggatatgttgcccttggaaggtctggtgacaaggcgtctgacgccaatgttggctttttcgttagcactctcgaagagtggaattggcttcgttcgattctttccatagaaaggttcaaggcgctcctcggcgaacacgaatattcagggggccgaatcgatcgattcg

SEQ ID NO: 19934 - DNA, 1920 bp, Muscodor strobelii
  misc_feature: SGI cDNA ID NO. 566715
  misc_feature: Encodes the peptide sequence at SEQ ID NO 19935
atgacggtctcatctcaacgtcccgtccggattggaggcgcttcaggagggttcaccgatagagttgccgcgattgctcgcctcgcagctgatcctgacatagacgccatcgtaggtgactggctttccgaaaatgtgatgacaggatacggggcagggaaagcagcacagaatctcgaaggtcgtcagcccgggcaaagctcgttggccttgcaagaccgaatgaaaacagcacaatatgcgtcgacctttctgcaatgtctcgagcctgcactctctctgctagccaaaaacggcacaaaacttgcagtcaatgccggggctagcgacaccgagcttcttgctgaggttgttgttgatatggcccggcaaaaaggcctacaactcaatgtcgcctgggttgaaggagacgacataacgacggaattcaagaatgcggttaacagtggtcatgaatttcggagcttaacggacgggaagagcatctcggaatggggacacaatccaatttgtgctcagggaagttttgggattgctcaagccctacatggtggtgcagatatagttatttgtggccgggttgccgatgctgcgccgacgattggggtcgcggcctattatcatggctggaaaccgtcggatttcgaccagcttgccggcgccttgattgctggtcatgtcatcgaatgctcagcgtttgcgaccggcggttactacagtcgttttaaggacttgatgagggaaaggagacacctgaacttggggtttcctattgccgctatatatgaaaacggcgaatttgacattctaaaggagaaagacactggcggtatcgttaatgtggagactgttacttcccaacttgtctatgagatatccgggcccctttactacaactctgatgtggttgccgatattcatggtacgtattgcaatatcagatgcgaggataaggatcaggaccttgttcacgtaagcggcgtttgcggattgccgccaccaccgacgacgagatgcggtgttactgcgcatggtggctttcaggcagagtggcatttttatttagtaggactcgatatcgaagaaaagtgccagtggatggaggagcaagcgaaatacgctatcggcgatgatctcatcagccagttttccatgctcaagttccacgtgcacggtacaagtcctgataatccaccaaaccaggaagctgccactgtagattttcgcattttcgcccaagccaaggacaaggccttattcgacccttctctgccttatgggttcagtaggaagttgtacgagacagtccttcaatcctgtccaggcgtttctcggcctaacgacctgcgtcagtcgaccgcgaagagctatttcgagtatttcgtcacgttagtcccacagtctttctgtaatcaccaggttcacttcctttttggcgacaagaagagtgtgaacatccctcttcctccgacaatgagagaatatggcgcccaggaatcctataacacgaaggatccagtgccactcgaggagtttggagagactgtcattgcaccactgggatatgttgcccttggaaggtctggtgacaaggcgtctgacgccaatgttggctttttcgttagcactctcgaagagtggaattggcttcgttcgattctttccatagaaaggttcaaggcgctcctcggcgaacacgaatattcagggggccgaatcgatcgattcgaaatggctaacggacatggtactaacttctttgttgtaatacgcgctgtgcatttcttacttaaggaccatctagacagaggatacaattcgggatcaaaactcgacacgcttgcgaagaacctctgcgaatacgtgagagcgaaatatctgccagtaccgaagaagtttctcgagggtggcagaatatag

SEQ ID NO: 19935 - protein, 639 aa, Muscodor strobelii
  misc_feature: SGI Peptide ID NO. 566715
  misc_feature (11)..(392): Pfam Id: PF07287 Pfam Desc: Domain of function (DUF1446)
  misc_feature (174)..(369): Pfam Id: PF07287 Pfam Desc: Domain of function (DUF1446)
  misc_feature (73)..(141): Pfam Id: PF07287 Pfam Desc: Domain of function (DUF1446)
  misc_feature (2)..(639): NCBI GI: 261354680 Blast Desc: conserved [Verticillium albo-atrum VaMs.102]
  misc_feature (4)..(639): NCBI GI: 261355824 Blast Desc: conserved [Verticillium albo-atrum VaMs.102]
  misc_feature (2)..(639): NCBI GI: 189197007 Blast Desc: PTRG_04508 [Pyrenophora tritici-repentis Pt-1C-BFP] gi|187980789|gb|EDU47415.1| PTRG_04508 [Pyrenophora tritici-repentis Pt-1C-BFP]
  misc_feature (2)..(639): NCBI GI: 169616404 Blast Desc: SNOG_11374 [Phaeosphaeria nodorum SN15] gi|160703171|gb|EAT81082.2| SNOG_11374 [Phaeosphaeria nodorum SN15]
  misc_feature (8)..(639): NCBI GI: 256724636 Blast Desc: NECHADRAFT_48019 [Nectria haematococca mpVI 77-13-4]
  misc_feature (5)..(639): NCBI GI: 169773091 Blast Desc: [Aspergillus oryzae RIB40] gi|238491030|ref|XP_002376752.1| DUF1446 domain protein [Aspergillus flavus NRRL3357] gi|83768875|dbj|BAE59012.1| protein
  misc_feature (7)..(639): NCBI GI: 119472007 Blast Desc: NFIA_057110 [Neosartorya fischeri NRRL 181] gi|119406411|gb|EAW16362.1| conserved [Neosartorya fischeri NRRL 181]
  misc_feature (5)..(639): NCBI GI: 145240401 Blast Desc: An08g07320 [Aspergillus niger] gi|134077365|emb|CAK39979.1| protein product [Aspergillus niger]
  misc_feature (10)..(639): NCBI GI: 67516547 Blast Desc: AN0555.2 [Aspergillus nidulans FGSC A4] gi|40747498|gb|EAA66654.1| AN0555.2 [Aspergillus nidulans FGSC A4]
  misc_feature (1)..(639): NCBI GI: 240108773 Blast Desc: CPC735_022780 [Coccidioides posadasii C735 delta SOWgp]
MTVSSQRPVRIGGASGGFTDRVAAIARLAADPDIDAIVGDWLSENVMTGYGAGKAAQNLEGRQPGQSSLALQDRMKTAQYASTFLQCLEPALSLLAKNGTKLAVNAGASDTELLAEVVVDMARQKGLQLNVAWVEGDDITTEFKNAVNSGHEFRSLTDGKSISEWGHNPICAQGSFGIAQALHGGADIVICGRVADAAPTIGVAAYYHGWKPSDFDQLAGALIAGHVIECSAFATGGYYSRFKDLMRERRHLNLGFPIAAIYENGEFDILKEKDTGGIVNVETVTSQLVYEISGPLYYNSDVVADIHGTYCNIRCEDKDQDLVHVSGVCGLPPPPTTRCGVTAHGGFQAEWHFYLVGLDIEEKCQWMEEQAKYAIGDDLISQFSMLKFHVHGTSPDNPPNQEAATVDFRIFAQAKDKALFDPSLPYGFSRKLYETVLQSCPGVSRPNDLRQSTAKSYFEYFVTLVPQSFCNHQVHFLFGDKKSVNIPLPPTMREYGAQESYNTKDPVPLEEFGETVIAPLGYVALGRSGDKASDANVGFFVSTLEEWNWLRSILSIERFKALLGEHEYSGGRIDRFEMANGHGTNFFVVIRAVHFLLKDHLDRGYNSGSKLDTLAKNLCEYVRAKYLPVPKKFLEGGRI

SEQ ID NO: 19936 - DNA, 768 bp, Muscodor strobelii; identical to SEQ ID NO: 19933
  misc_feature: SGI EST ID NO. CUFF.46637.0
  misc_feature: Variant of the nucleotide sequence at SEQ ID NO 19934

SEQ ID NO: 19937 - DNA, 1971 bp, Muscodor strobelii
  misc_feature: SGI cDNA ID NO. 566716
  misc_feature: Encodes the peptide sequence at SEQ ID NO 19938
atgacggtctcatctcaacgtcccgtccggattggaggcgcttcaggagggttcaccgatagagttgccgcgattgctcgcctcgcagctgatcctgacatagacgccatcgtaggtgactggctttccgaaaatgtgatgacaggatacggggcagggaaagcagcacagaatctcgaaggtcgtcagcccgggcaaagctcgttggccttgcaagaccgaatgaaaacagcacaatatgcgtcgacctttctgcaatgtctcgagcctgcactctctctgctagccaaaaacggcacaaaacttgcagtcaatgccggggctagcgacaccgagcttcttgctgaggttgttgttgatatggcccggcaaaaaggcctacaactcaatgtcgcctgggttgaaggagacgacataacgacggaattcaagaatgcggttaacagtggtcatgaatttcggagcttaacggacgggaagagcatctcggaatggggacacaatccaatttgtgctcaggtacaggcctatctaggaagttttgggattgctcaagccctacatggtggtgcagatatagttatttgtggccgggttgccgatgctgcgccgacgattggggtcgcggcctattatcatggctggaaaccgtcggatttcgaccagcttgccggcgccttgattgctggtcatgtcatcgaatgctcagcgtttgcgaccggcggttactacagtcgttttaaggacttgatgagggaaaggagacacctgaacttggggtttcctattgccgctatatatgaaaacggcgaatttgacattctaaaggagaaagacactggcggtatcgttaatgtggagactgttacttcccaacttgtctatgagatatccgggcccctttactacaactctgatgtggttgccgatattcatggtacgtattgcaatatcagatgcgaggataaggatcaggaccttgttcacgtaagcggcgtttgcggattgccgccaccaccgacgacgagatgcggtgttactgcgcatggtggctttcaggcagagtggcatttttatttagtaggactcgatatcgaagaaaagtgccagtggatggaggagcaagcgaaatacgctatcggcgatgatctcatcagccagttttccatgctcaagttccacgtgcacggtacaagtcctgataatccaccaaaccaggtaagcattcggagtctgtcttttccccacggggaagctgccactgtagattttcgcattttcgcccaagccaaggacaaggccttattcgacccttctctgccttatgggttcagtaggaagttgtacgagacagtccttcaatcctgtccaggcgtttctcggcctaacgacctgcgtcagtcgaccgcgaagagctatttcgagtatttcgtcacgttagtcccacagtctttctgtaatcaccaggttcacttcctttttggcgacaagaagagtgtgaacatccctcttcctccgacaatgagagaatatggcgcccaggaatcctataacacgaaggatccagtgccactcgaggagtttggagagactgtagtcattgcaccactgggatatgttgcccttggaaggtctggtgacaaggcgtctgacgccaatgttggctttttcgttagcactctcgaagagtggaattggcttcgttcgattctttccatagaaaggttcaaggcgctcctcggcgaacacgaatattcagggggccgaatcgatcgattcgaaatggctaacggacatggtactaacttctttgttgtaatacgcgctgtgcatttcttacttaaggaccatctagacagaggatacaattcgggatcaaaactcgacacgcttgcgaagaacctctgcgaatacgtgagagcgaaatatctgccagtaccgaagaagtttctcgagggtggcagaatatag

SEQ ID NO: 19938 - protein, 656 aa, Muscodor strobelii
  misc_feature: SGI Peptide ID NO. 566716
  misc_feature (11)..(397): Pfam Id: PF07287 Pfam Desc: Domain of function (DUF1446)
  misc_feature (73)..(374): Pfam Id: PF07287 Pfam Desc: Domain of function (DUF1446)
  misc_feature (2)..(656): NCBI GI: 261354680 Blast Desc: conserved [Verticillium albo-atrum VaMs.102]
  misc_feature (3)..(656): NCBI GI: 261355824 Blast Desc: conserved [Verticillium albo-atrum VaMs.102]
  misc_feature (2)..(656): NCBI GI: 189197007 Blast Desc: PTRG_04508 [Pyrenophora tritici-repentis Pt-1C-BFP] gi|187980789|gb|EDU47415.1| PTRG_04508 [Pyrenophora tritici-repentis Pt-1C-BFP]
  misc_feature (2)..(656): NCBI GI: 169616404 Blast Desc: SNOG_11374 [Phaeosphaeria nodorum SN15] gi|160703171|gb|EAT81082.2| SNOG_11374 [Phaeosphaeria nodorum SN15]
  misc_feature (8)..(656): NCBI GI: 256724636 Blast Desc: NECHADRAFT_48019 [Nectria haematococca mpVI 77-13-4]
  misc_feature (5)..(656): NCBI GI: 169773091 Blast Desc: [Aspergillus oryzae RIB40] gi|238491030|ref|XP_002376752.1| DUF1446 domain protein [Aspergillus flavus NRRL3357] gi|83768875|dbj|BAE59012.1| protein
  misc_feature (7)..(656): NCBI GI: 119472007 Blast Desc: NFIA_057110 [Neosartorya fischeri NRRL 181] gi|119406411|gb|EAW16362.1| conserved [Neosartorya fischeri NRRL 181]
  misc_feature (5)..(656): NCBI GI: 145240401 Blast Desc: An08g07320 [Aspergillus niger] gi|134077365|emb|CAK39979.1| protein product [Aspergillus niger]
  misc_feature (10)..(656): NCBI GI: 67516547 Blast Desc: AN0555.2 [Aspergillus nidulans FGSC A4] gi|40747498|gb|EAA66654.1| AN0555.2 [Aspergillus nidulans FGSC A4]
  misc_feature (1)..(656): NCBI GI: 240108773 Blast Desc: CPC735_022780 [Coccidioides posadasii C735 delta SOWgp]
MTVSSQRPVRIGGASGGFTDRVAAIARLAADPDIDAIVGDWLSENVMTGYGAGKAAQNLEGRQPGQSSLALQDRMKTAQYASTFLQCLEPALSLLAKNGTKLAVNAGASDTELLAEVVVDMARQKGLQLNVAWVEGDDITTEFKNAVNSGHEFRSLTDGKSISEWGHNPICAQVQAYLGSFGIAQALHGGADIVICGRVADAAPTIGVAAYYHGWKPSDFDQLAGALIAGHVIECSAFATGGYYSRFKDLMRERRHLNLGFPIAAIYENGEFDILKEKDTGGIVNVETVTSQLVYEISGPLYYNSDVVADIHGTYCNIRCEDKDQDLVHVSGVCGLPPPPTTRCGVTAHGGFQAEWHFYLVGLDIEEKCQWMEEQAKYAIGDDLISQFSMLKFHVHGTSPDNPPNQVSIRSLSFPHGEAATVDFRIFAQAKDKALFDPSLPYGFSRKLYETVLQSCPGVSRPNDLRQSTAKSYFEYFVTLVPQSFCNHQVHFLFGDKKSVNIPLPPTMREYGAQESYNTKDPVPLEEFGETVVIAPLGYVALGRSGDKASDANVGFFVSTLEEWNWLRSILSIERFKALLGEHEYSGGRIDRFEMANGHGTNFFVVIRAVHFLLKDHLDRGYNSGSKLDTLAKNLCEYVRAKYLPVPKKFLEGGRI

SEQ ID NO: 19939 - DNA, 768 bp, Muscodor strobelii; identical to SEQ ID NO: 19933
  misc_feature: SGI EST ID NO. CUFF.46637.0
  misc_feature: Variant of the nucleotide sequence at SEQ ID NO 19937

SEQ ID NO: 19940 - DNA, 1074 bp, Muscodor strobelii
  misc_feature: SGI cDNA ID NO. 566717
  misc_feature: Encodes the peptide sequence at SEQ ID NO 19941
atgtcgctgccaactcaatcccagcagcaggtcgcttcacctgggtccgttaccggctcttctgatggtaacagcaacctgaatcccagggaccttgagctccagcgaaagagagcgcgggaccggaagagccagcaagcaatgcgtgatcgtacaaagtggactatcaacaacttgaccgagcaggttaccttccttacacatgttcttgaccagaggacaaaagatgttgggcttctcgatacccgtgtccgcattctagaaacagagaacgcccatcttcgaactcagaacgcggctttgcaactgagcatgctagggtctcaacaagagcccgacagccaagaaacacagcccggaacagtaaagaatgcgtgggaaataccaccactacattccgcaccgaattgtataagcgacgagatattacagggctttttgtcactaaaaagggacgaactaatgtcatcgaagaaccctacgatactgcgtggtgcatacacagcgagacctgacctatgttccctggtctccagagatcgaagaagcgatgatgatatcagtaatgtagttggagacatcatacgcagctatcatgagatcgacaccctaccacagaagattgcagctttctacatcatgtttacgcttactaagtggatggtgttgctggacgaggaaagctggaatcatcttccagtttggatgcgtcccacaccagtgcaggtttccaccacgcacgcagcctgggtcgatagaattccatggcccaaggcccgcgattatctagtggcagatcctaggataacccttgacgacttcgcggctgcgtattccacgtccttttctgtgaactggccgtatgaaccatcactcgtaataattcctggaagtggtgatagccaagcagttatcaatccagtctttgaggaacatgttcgacagctcaagaattggacggtaggcacaatcttccgagaccgatggccggaacttgctgctctgattgatagttacgcattggtaaagatagggtttctcatattcagagcaccagatactggtacggtctaa

SEQ ID NO: 19941 - protein, 357 aa, Muscodor strobelii
  misc_feature: SGI Peptide ID NO. 566717
  misc_feature (13)..(219): NCBI GI: 261354677 Blast Desc: conserved [Verticillium albo-atrum VaMs.102]
  misc_feature (125)..(333): NCBI GI: 238489187 Blast Desc: bZIP transcription factor, [Aspergillus flavus NRRL3357] gi|220698219|gb|EED54559.1| bZIP transcription factor, [Aspergillus flavus NRRL3357]
  misc_feature (124)..(341): NCBI GI: 156063044 Blast Desc: SS1G_01638 [Sclerotinia sclerotiorum 1980] gi|154696974|gb|EDN96712.1| SS1G_01638 [Sclerotinia sclerotiorum 1980]
  misc_feature (57)..(332): NCBI GI: 115491981 Blast Desc: ATEG_00532 [Aspergillus terreus NIH2624] gi|114197478|gb|EAU39178.1| ATEG_00532 [Aspergillus terreus NIH2624]
  misc_feature (135)..(345): NCBI GI: 212532081 Blast Desc: bZIP transcription factor, [Penicillium marneffei ATCC 18224] gi|210071561|gb|EEA25650.1| bZIP transcription factor, [Penicillium marneffei ATCC 18224]
  misc_feature (126)..(332): NCBI GI: 238844556 Blast Desc: conserved [Microsporum canis CBS 113480]
  misc_feature (135)..(345): NCBI GI: 242774669 Blast Desc: bZIP transcription factor, [Talaromyces stipitatus ATCC 10500] gi|218722106|gb|EED21524.1| bZIP transcription factor, [Talaromyces stipitatus ATCC 10500]
  misc_feature (120)..(332): NCBI GI: 67516779 Blast Desc: AN0671.2 [Aspergillus nidulans FGSC A4] gi|40746291|gb|EAA65447.1| AN0671.2 [Aspergillus nidulans FGSC A4] gi|259489060|tpe|CBF89018.1| TPA: bZIP transcription factor
  misc_feature (120)..(332): NCBI GI: 154318953 Blast Desc: BC1G_02428 [Botryotinia fuckeliana B05.10] gi|150856859|gb|EDN32051.1| BC1G_02428 [Botryotinia fuckeliana B05.10]
  misc_feature (125)..(333): NCBI GI: 119495279 Blast Desc: bZIP transcription factor, [Neosartorya fischeri NRRL 181] gi|119412590|gb|EAW22531.1| bZIP transcription factor, [Neosartorya fischeri NRRL 181]
MSLPTQSQQQVASPGSVTGSSDGNSNLNPRDLELQRKRARDRKSQQAMRDRTKWTINNLTEQVTFLTHVLDQRTKDVGLLDTRVRILETENAHLRTQNAALQLSMLGSQQEPDSQETQPGTVKNAWEIPPLHSAPNCISDEILQGFLSLKRDELMSSKNPTILRGAYTARPDLCSLVSRDRRSDDDISNVVGDIIRSYHEIDTLPQKIAAFYIMFTLTKWMVLLDEESWNHLPVWMRPTPVQVSTTHAAWVDRIPWPKARDYLVADPRITLDDFAAAYSTSFSVNWPYEPSLVIIPGSGDSQAVINPVFEEHVRQLKNWTVGTIFRDRWPELAALIDSYALVKIGFLIFRAPDTGTV

SEQ ID NO: 19942 - DNA, 595 bp, Muscodor strobelii
  misc_feature: SGI EST ID NO. CUFF.46646.0
  misc_feature: Variant of the nucleotide sequence at SEQ ID NO 19940
cccggaacagtaaagaatgcgtgggaaataccaccactacattccgcaccgaattgtataagcgacgagatattacagggctttttgtcactaaaaagggacgaactaatgtcatcgaagaaccctacgatactgcgtggtgcatacacagcgagacctgacctatgttccctggtctccagagatcgaagaagcgatgatgatatcagtaatgtagttggagacatcatacgcagctatcatgagatcgacaccctaccacagaagattgcagctttctacatcatgtttacgcttactaagtggatggtgttgctggacgaggaaagctggaatcatcttccagtttggatgcgtcccacaccagtgcaggtttccaccacgcacgcagcctgggtcgatagaattccatggcccaaggcccgcgattatctagtggcagatcctaggataacccttgacgacttcgcggctgcgtattccacgtccttttctgtgaactggccgtatgaaccatcactcgtaataattcctggaagtggtgatagccaagcagttatcaatccagtctttgaggaacatgttcgacagctca

SEQ ID NO: 19943 - DNA, 657 bp, Muscodor strobelii
  misc_feature: SGI cDNA ID NO. 566718
  misc_feature: Encodes the peptide sequence at SEQ ID NO 19944
atggggggcatattcgttcttgctactctacctatgaaggatggcgagttgagggacaaacaaattcgtcacctgacagctgcctcgaagtttgccttcgagaatgaccccaaaatacacaaatatatcgccatgcttccgcgcgatgaggcggatgccaactcactgtgggtctttgaggaatatgcaaatcaaaatgttcttgacgaacacatggagtggcagcctgttaaagatatggttgcctttatgacggatgaaagccccctgagcggtgctccgacggtgctcgaactgcccattacagacctgagcttcacacgagaggagatccggcatcatatcgatccctacattgccgtagctgagattgaatatcatccagacactattccacaagccttgccttactggaaggcagttgttgaaacgtctcaaaaggaatcggaaaccttagcttatggtgtataccggcacccttcggactcgactaaactctttactatcgagatctacgagagcaaggaatttctatgggacgtgcacgcgaagagcgatgcggtggcggaaaatgtcaaaaacacgaaggatatgagaaagggagtgaagcatacattcttgcgcaaagtcgctgggcacttgtatcctaagctctga

SEQ ID NO: 19944 - protein, 218 aa, Muscodor strobelii
  misc_feature: SGI Peptide ID NO. 566718
  misc_feature (2)..(215): NCBI GI: 261354671 Blast Desc: 4-coumarate-CoA ligase [Verticillium albo-atrum VaMs.102]
  misc_feature (1)..(101): NCBI GI: 169614678 Blast Desc: SNOG_10485 [Phaeosphaeria nodorum SN15] gi|111060759|gb|EAT81879.1| SNOG_10485 [Phaeosphaeria nodorum SN15]
  misc_feature (1)..(100): NCBI GI: 189205260 Blast Desc: conserved [Pyrenophora tritici-repentis Pt-1C-BFP] gi|187986064|gb|EDU51552.1| conserved [Pyrenophora tritici-repentis Pt-1C-BFP]
MGGIFVLATLPMKDGELRDKQIRHLTAASKFAFENDPKIHKYIAMLPRDEADANSLWVFEEYANQNVLDEHMEWQPVKDMVAFMTDESPLSGAPTVLELPITDLSFTREEIRHHIDPYIAVAEIEYHPDTIPQALPYWKAVVETSQKESETLAYGVYRHPSDSTKLFTIEIYESKEFLWDVHAKSDAVAENVKNTKDMRKGVKHTFLRKVAGHLYPKL

SEQ ID NO: 19945 - DNA, 1011 bp, Muscodor strobelii
  misc_feature: SGI cDNA ID NO. 566719
  misc_feature: Encodes the peptide sequence at SEQ ID NO 19946
atggctgacgaggatgtcgtacttatcacacaattgccctcggctgcctggttcgaagggtttgtggtccgaccaaatgggaaagtcttagtgacgcgtctcgataagccagagctttatacttttgatccccaagaccaagatacggaacctaggcccatacacactttctctgaacacaactctcttgtcaatctcagtataataccgggctacaaggacgagtattacttactagccagtacggctaaccttgaaatcatcacccaggaagatgtttggatttaccggatcgcttttggtgatgatgatagtctaccgccaaaggtgacccggctgacggaggtagaagaagaaggatatattgttggtatactggccgtctcggatcgtatcgcactccttacggatgcggcgtcggggaaaatatttcattttgacatcgaaacgggcaagaagacgatattcgtggacgatgagagaatgaagtatgctgacccgaaatactacttcggaatcaaccgcatccgtatagtaggtggtttcctctacttcaccaacaccagtgtcggtactataagtcgcatggccgtcgaaatcaacacagagcacaaagatgtctgtattcgtgcgacaggcaaggtcaaatccgtcattgatggtatgccggcacacatagatgggcttgcagtctccgcagaccagtcacacgcctatgtagcgagccaagtcgacgggaagctgcacaggatagagatcgaccccgagactggagaaggatcatctactgtcatcttaggcagtcttgacagtcccacaggtctaaatcttgtggaagacgctaccaagtcaaataaaccgaaattattcatcatctgctgtggagaaatcgaggtggcgtggacggtcgtcgacgaattagacccttggaaagatatacgcgatctcaatgcggccctgactgtcgtcagtgtcacggagcaggtcatcacgacaacgattacgatttga

SEQ ID NO: 19946 - protein, 336 aa, Muscodor strobelii
  misc_feature: SGI Peptide ID NO. 566719
  misc_feature (14)..(271): NCBI GI: 119482818 Blast Desc: NFIA_026140 [Neosartorya fischeri NRRL 181] gi|119409592|gb|EAW19540.1| conserved [Neosartorya fischeri NRRL 181]
  misc_feature (17)..(298): NCBI GI: 115397413 Blast Desc: [Aspergillus terreus NIH2624] gi|114192489|gb|EAU34189.1| [Aspergillus terreus NIH2624]
  misc_feature (16)..(198): NCBI GI: 154303709 Blast Desc: BC1G_08739 [Botryotinia fuckeliana B05.10] gi|150854533|gb|EDN29725.1| BC1G_08739 [Botryotinia fuckeliana B05.10]
  misc_feature (8)..(296): NCBI GI: 255955199 Blast Desc: Pc21g13340 [Penicillium chrysogenum Wisconsin 54-1255] gi|211590063|emb|CAP96231.1| Pc21g13340 [Penicillium chrysogenum Wisconsin 54-1255]
  misc_feature (9)..(273): NCBI GI: 156049683 Blast Desc: SS1G_08548 [Sclerotinia sclerotiorum 1980] gi|154692947|gb|EDN92685.1| SS1G_08548 [Sclerotinia sclerotiorum 1980]
  misc_feature (17)..(251): NCBI GI: 256726026 Blast Desc: NECHADRAFT_94325 [Nectria haematococca mpVI 77-13-4]
  misc_feature (3)..(205): NCBI GI: 70994304 Blast Desc: conserved [Aspergillus fumigatus Af293] gi|66849615|gb|EAL89943.1| conserved [Aspergillus fumigatus Af293]
  misc_feature (17)..(198): NCBI GI: 154297588 Blast Desc: BC1G_12639 [Botryotinia fuckeliana B05.10] gi|150858462|gb|EDN33654.1| BC1G_12639 [Botryotinia fuckeliana B05.10]
  misc_feature (14)..(254): NCBI GI: 256721057 Blast Desc: NECHADRAFT_55444 [Nectria haematococca mpVI 77-13-4]
  misc_feature (4)..(295): NCBI GI: 156053892 Blast Desc: SS1G_05794 [Sclerotinia sclerotiorum 1980] gi|154703574|gb|EDO03313.1| SS1G_05794 [Sclerotinia sclerotiorum 1980]
MADEDVVLITQLPSAAWFEGFVVRPNGKVLVTRLDKPELYTFDPQDQDTEPRPIHTFSEHNSLVNLSIIPGYKDEYYLLASTANLEIITQEDVWIYRIAFGDDDSLPPKVTRLTEVEEEGYIVGILAVSDRIALLTDAASGKIFHFDIETGKKTIFVDDERMKYADPKYYFGINRIRIVGGFLYFTNTSVGTISRMAVEINTEHKDVCIRATGKVKSVIDGMPAHIDGLAVSADQSHAYVASQVDGKLHRIEIDPETGEGSSTVILGSLDSPTGLNLVEDATKSNKPKLFIICCGEIEVAWTVVDELDPWKDIRDLNAALTVVSVTEQVITTTITI

SEQ ID NO: 19947 - DNA, 1694 bp, Muscodor strobelii
  misc_feature: SGI EST ID NO. CUFF.46663.0
  misc_feature: Variant of the nucleotide sequence at SEQ ID NO 19945
gtctacgcatatgttatgttccattatgttctccctctgtctcattttcaagagggcaatacaacttcttagtcttcataatttcgtaaccgattcctgcattgttaccacgagaagctatggctgacgaggatgtcgtacttatcacacaattgccctcggctgcctggttcgaagggtttgtggtccgaccaaatgggaaagtcttagtgacgcgtctcgataagccagagctttatacttttgatccccaagaccaagatacggaacctaggcccatacacactttctctgaacacaactctcttgtcaatctcagtataataccgggctacaaggacgagtattacttactagccagtacggctaaccttgaaatcatcacccaggaagatgtttggatttaccggatcgcttttggtgatgatgatagtctaccgccaaaggtgacccggctgacggaggtagaagaagaaggatatattgttggtatactggccgtctcggatcgtatcgcactccttacggatgcggcgtcggggaaaatatttcattttgacatcgaaacgggcaagaagacgatattcgtggacgatgagagaatgaagtatgctgacccgaaatactacttcggaatcaaccgcatccgtatagtaggtggtttcctctacttcaccaacaccagtgtcggtactataagtcgcatggccgtcgaaatcaacacagagcacaaagatgtctgtattcgtgcgacaggcaaggtcaaatccgtcattgatggtatgccggcacacatagatgggcttgcagtctccgcagaccagtcacacgcctatgtagcgagccaagtcgacgggaagctgcacaggatagagatcgaccccgagactggagaaggatcatctactgtcatcttaggcagtcttgacagtcccacaggtctaaatcttgtggaagacgctaccaagtcaaataaaccgaaattattcatcatctgctgtggagaaatcgaggtggcgtggacggtcgtcgacgaattagacccttggaaagatatacgcgatctcaatgcggccctgactgtcgtcagtgtcacggagcaggtcatcacgacaacgattacgatttgaatatacacaacatgcggtcgatgtcgcatacacgcaatactgatctgactttcgactcatttctcctacatgggccgaatctacggtcgcttgttccatttatttccctttatataccacacgaccccagtgagcatgacgctcgctagggcaggcgatatcgatgagcgaagaccaatcaccaagtttctatgtcttgcatgctattcacagcttcacggcgctggcttgtataatatttcatgcttccatcatacttttcttacgcatgtagtgtcatgtcaccacatgacagaaaccatagaatgtcacaaataagacacgtaattcattggaagtattctaaaccgttggatctatcatagccttacctgatgctcaatctaggtaataggctaacgctgcacacagatctaggaagtacgagcgcaggtacacttgggtctgaccgtcgcagctgtggcaagtcaccggctggccttcttgtgctcatctcatgtctcttgcttctggtatcaccatgtattagctcaatgttcaagtcaacctagtacaacatccaga

SEQ ID NO: 19948 - DNA, 1545 bp, Muscodor strobelii
  misc_feature: SGI cDNA ID NO. 566720
  misc_feature: Encodes the peptide sequence at SEQ ID NO 19949
atgagtctcggcaggacctgcactgccagcctgagggcgttgctcttgatcctttccatccacgcccagtatgtgtcgtgtttctctctatcgtggagaaaccaagcctgcctcgcatccgagtcacagcaaagatatctcgctgcctcgcctagccttggctcgcaaattatcaaacccggagcggaattatcgtcgtcgtacgatgtggccctcaacgagctccgagagctcgagtccgagccgttgtgccatcgcacggcagctcgcttgctggtcaacaactgccagctcctcgagggtaaagatgaagccacaatcttgaccgacagcggccgccaaatcagagatttcgttgacgcctacgccgcaagcctcgccatctgcgatctagagcgtggcaggttcatcattcccgctgaatgcgccaacttccaagaatcggttctgacccgagttcccatgcacgacacggccttcatccatgtcacttctgccgaaatcgacgcttgcctatccgggctgggcagctctaactcggcatggaatacgtgggtgagctatcgccacaaggctcttcgcttttgcgaagcggctcgagcagacaacgaaaaggaccagaacatcctcttgtttcaacgtctcgccaagataatgagaagcttaacaaacgatgtcgacgaaaccctagaagtacgaatgcggattttcgaggctagtgctcaggcagcaggagataaaatcgagagcctctcgcctcggcttcttaaattacagcaagaaatcgcagacgtcgatgtgataatctctgagcagctcggtcacactctccagagatcaagaggtatcgcagaatcaaacttagagagcgccgcgagcctagaccgtatgcttcacatgattctcaaaggtgtcatggatggccacgcagagacagcagctctccatgaacagtctcttcaagccatgaatcaagaggcagcctccgaggtagaggtcatgatgaacacaatggccgcagccgtcactatgacgtcggcactgcaggaacaattagaaaattcgcatattcgtgctgctgagatggagtcaaaacaaatgtccattgaagagggcatgcaacgactcgtccatatatctagtaacctagcaagcgattacaacgtgcacacgggtctgttgcttcaagcacaaaacatgactgaggagatcctctacgtactcggagacacagccgcgtcggctgcagccgtcggtgaccttctagtgcatcgctcttcatcttcatggtggccatatgtctggtgccctgccgcaaccttagtaatgggatcctatggattgcccccttcatttctcagaaatctagcattgtttgcgatgggcgagatcggcgggctcatggtctcatcgattcggcttccgtcagtcgatcagcgtcaatgggaagcactaagcctatccaacctattgacgtcgtcgctcaaggcggctctcggcaacaaagacgtcactaatgccacagctcagttcgaactgatctga

SEQ ID NO: 19949 - protein, 514 aa, Muscodor strobelii
  misc_feature: SGI Peptide ID NO. 566720
  misc_feature (55)..(472): NCBI GI: 85086337 Blast Desc: NCU04067 [Neurospora crassa OR74A] gi|28918776|gb|EAA28446.1| [Neurospora crassa OR74A]
  misc_feature (43)..(470): NCBI GI: 46134917 Blast Desc: FG09307.1 [Gibberella zeae PH-1]
  misc_feature (52)..(464): NCBI GI: 256727708 Blast Desc: NECHADRAFT_33794 [Nectria haematococca mpVI 77-13-4]
  misc_feature (14)..(482): NCBI GI: 261359634 Blast Desc: conserved [Verticillium albo-atrum VaMs.102]
  misc_feature (10)..(449): NCBI GI: 145607519 Blast Desc: MGG_04309 [Magnaporthe grisea 70-15] gi|145015048|gb|EDJ99616.1| MGG_04309 [Magnaporthe grisea 70-15]
  misc_feature (78)..(471): NCBI GI: 171682354 Blast Desc: protein product [Podospora anserina] gi|170941136|emb|CAP66786.1| protein product [Podospora anserina]
  misc_feature (49)..(279): NCBI GI: 116208552 Blast Desc: CHGG_03569 [Chaetomium globosum CBS 148.51] gi|88184166|gb|EAQ91634.1| CHGG_03569 [Chaetomium globosum CBS 148.51]
  misc_feature (25)..(470): NCBI GI: 154315423 Blast Desc: BC1G_04284 [Botryotinia fuckeliana B05.10] gi|150847224|gb|EDN22417.1| BC1G_04284 [Botryotinia fuckeliana B05.10]
  misc_feature (25)..(166): NCBI GI: 116202703 Blast Desc: CHGG_09236 [Chaetomium globosum CBS 148.51] gi|88177754|gb|EAQ85222.1| CHGG_09236 [Chaetomium globosum CBS 148.51]
  misc_feature (74)..(273): NCBI GI: 156060103 Blast Desc: SS1G_02190 [Sclerotinia sclerotiorum 1980] gi|154699598|gb|EDN99336.1| SS1G_02190 [Sclerotinia sclerotiorum 1980]
MSLGRTCTASLRALLLILSIHAQYVSCFSLSWRNQACLASESQQRYLAASPSLGSQIIKPGAELSSSYDVALNELRELESEPLCHRTAARLLVNNCQLLEGKDEATILTDSGRQIRDFVDAYAASLAICDLERGRFIIPAECANFQESVLTRVPMHDTAFIHVTSAEIDACLSGLGSSNSAWNTWVSYRHKALRFCEAARADNEKDQNILLFQRLAKIMRSLTNDVDETLEVRMRIFEASAQAAGDKIESLSPRLLKLQQEIADVDVIISEQLGHTLQRSRGIAESNLESAASLDRMLHMILKGVMDGHAETAALHEQSLQAMNQEAASEVEVMMNTMAAAVTMTSALQEQLENSHIRAAEMESKQMSIEEGMQRLVHISSNLASDYNVHTGLLLQAQNMTEEILYVLGDTAASAAAVGDLLVHRSSSSWWPYVWCPAATLVMGSYGLPPSFLRNLALFAMGEIGGLMVSSIRLPSVDQRQWEALSLSNLLTSSLKAALGNKDVTNATAQFELI

SEQ ID NO: 19950 - DNA, 591 bp, Muscodor strobelii
  misc_feature: SGI EST ID NO. CUFF.46679.0
  misc_feature: Variant of the nucleotide sequence at SEQ ID NO 19948
ccaggttcgtcatcttcttacaactcggacaaaatgcggtattgatcatatggttgcagagatcaagaggtatcgcagaatcaaacttagagagcgccgcgagcctagaccgtatgcttcacatgattctcaaaggtgtcatggatggccacgcagagacagcagctctccatgaacagtctcttcaagccatgaatcaagaggcagcctccgaggtagaggtcatgatgaacacaatggccgcagccgtcactatgacgtcggcactgcaggaacaattagtgtgttatttatccaggccatgtatgagcctatactaaacaatcaactaggaaaattcgcatattcgtgctgctgagatggagtcaaaacaaatgtccattgaagagggcatgcaacgactcgtccatatatctagtaacctagcaagcgattacaacgtgcacacgggtctgttgcttcaagcacaaaacatgactgaggagatcctctacgtactcggagacacagccgcgtcggctgcagccgtcggtgaccttctagtgcatcgctcttcatcttcatggtggccatatgtctggtgccctgccg

SEQ ID NO: 19951 - DNA, 747 bp, Muscodor strobelii
  misc_feature: SGI cDNA ID NO. 566721
  misc_feature: Reduced expression when VOC is produced
  misc_feature: Encodes the peptide sequence at SEQ ID NO 19952
atgcttggccccagccgcagtaaagccctcgacaaggccctctccggagccgtggtcacgctgccggggttcctcgtgccggccttccacacccacaccacccgacacttctcggccaccgcgacggccgcctccaagctcggccgcacccccatatccatcccgcccggcgtcgacatcgtcgtcggcgagccccgcgtcaagaaggatgtcaccacctacctcaagatccccaagcgcaccgtcaccgtctcggggcccctcggccagctccacctcgagatcccccccttcctgaccatcaaccacgacgagcccgcccgcaaggcgttgctcaccatcgagaaccccgacctgaagcagcagaaggagatgtggggcacgacgtgggcatacctgcaacggtacattatgggcgtatcggagggccacaccgccatcttgcgtctggtgggtgtaggataccgtgccagcatcgaagagcggcccaagaaggcgcagtatccgggccagaagttcgtctgcctcaagctcggcttcacccaccccgtcgaggagcccgtgcccaagggcatcaccgccagcacgccccagcccacgcgcatcctgctcgagggcatcgacaaggtcgagctcatgtccttcgccgcccagatccgcaagtggaggcggccggaaccgtacaagggcaagggcatctttgtcgacgacgagaccatcaagctcaagcagaagaagatcaagtga

SEQ ID NO: 19952 - protein, 248 aa, Muscodor strobelii
  misc_feature: SGI Peptide ID NO. 566721
  misc_feature (151)..(236): Pfam Id: PF00347 Pfam Desc: Ribosomal protein L6
  misc_feature (79)..(143): Pfam Id: PF00347 Pfam Desc: Ribosomal protein L6
  misc_feature (1)..(248): NCBI GI: 145607521 Blast Desc: MGG_04310 [Magnaporthe grisea 70-15] gi|145015049|gb|EDJ99617.1| MGG_04310 [Magnaporthe grisea 70-15]
  misc_feature (1)..(248): NCBI GI: 256727129 Blast Desc: [Nectria haematococca mpVI 77-13-4]
  misc_feature (21)..(248): NCBI GI: 171682356 Blast Desc: protein product [Podospora anserina] gi|170941137|emb|CAP66787.1| protein product [Podospora anserina]
  misc_feature (1)..(248): NCBI GI: 46136031 Blast Desc: FG09531.1 [Gibberella zeae PH-1]
  misc_feature (1)..(248): NCBI GI: 116202705 Blast Desc: CHGG_09237 [Chaetomium globosum CBS 148.51] gi|88177755|gb|EAQ85223.1| CHGG_09237 [Chaetomium globosum CBS 148.51]
  misc_feature (20)..(248): NCBI GI: 242764514 Blast Desc: 60S ribosomal protein L6, [Talaromyces stipitatus ATCC 10500] gi|218723986|gb|EED23403.1| 60S ribosomal protein L6, [Talaromyces stipitatus ATCC 10500]
  misc_feature (20)..(248): NCBI GI: 212529086 Blast Desc: 60S ribosomal protein L6, [Penicillium marneffei ATCC 18224] gi|210074098|gb|EEA28185.1| 60S ribosomal protein L6, [Penicillium marneffei ATCC 18224]
  misc_feature (20)..(248): NCBI GI: 119470345 Blast Desc: 60S ribosomal protein L6, [Neosartorya fischeri NRRL 181] gi|119406175|gb|EAW16126.1| 60S ribosomal protein L6, [Neosartorya fischeri NRRL 181]
  misc_feature (20)..(248): NCBI GI: 70991891 Blast Desc: 60S ribosomal protein L6 [Aspergillus fumigatus Af293] gi|66848427|gb|EAL88756.1| 60S ribosomal protein L6, [Aspergillus fumigatus Af293] gi|159124356|gb|EDP49474.1| 60S ribosomal L6,
  misc_feature (1)..(248): NCBI GI: 156060105 Blast Desc: SS1G_02191 [Sclerotinia sclerotiorum 1980] gi|154699599|gb|EDN99337.1| SS1G_02191 [Sclerotinia sclerotiorum 1980]
  misc_feature: Useful for introducing or modulating the production of volatile compounds
MLGPSRSKALDKALSGAVVTLPGFLVPAFHTHTTRHFSATATAASKLGRTPISIPPGVDIVVGEPRVKKDVTTYLKIPKRTVTVSGPLGQLHLEIPPFLTINHDEPARKALLTIENPDLKQQKEMWGTTWAYLQRYIMGVSEGHTAILRLVGVGYRASIEERPKKAQYPGQKFVCLKLGFTHPVEEPVPKGITASTPQPTRILLEGIDKVELMSFAAQIRKWRRPEPYKGKGIFVDDETIKLKQKKIK

SEQ ID NO: 19953 - DNA, 2685 bp, Muscodor strobelii
  misc_feature: SGI EST ID NO. CUFF.46838.1
  misc_feature: Variant of the nucleotide sequence at SEQ ID NO 19951
cttaagtgcatatagcatcccccatacacagatagagttgcacgtggtgagcttgcgccaagtccatgcaatattcacctgctcggggcgcagcaccagtgtcaaatgtttcgcgacgccaagcattcccaacgtcgacatcgcagctcccgacgctcacgctgacgccctgcacacgcccaactgcgggctcatcgacaccacagcccacgatgcttggccccagccgcagtaaagccctcgacaaggccctctccggagccgtggtcacgctgccggggttcctcgtgccggccttccacacccacaccacccgacacttctcggccaccgcgacggccgcctccaagctcggccgcacccccatatccatcccgcccggcgtcgacatcgtcgtcggcgagccccgcgtcaagaaggatgtcaccacctacctcaagatccccaagcgcaccgtcaccgtctcggggcccctcggccagctccacctcgagatcccccccttcctgaccatcaaccacgacgagcccgcccgcaaggcgttgctcaccatcgagaaccccgacctgaagcagcagaaggagatgtggggcacgacgtgggcatacctgcaacggtacattatgggcgtatcggagggccacaccgccatcttgcgtctggtgggtgtaggataccgtgccagcatcgaagagcggcccaagaaggcgcagtatccgggccagaagttcgtctgcctcaagctcggcttcacccaccccgtcgaggagcccgtgcccaagggcatcaccgccagcacgccccagcccacgcgcatcctgctcgagggcatcgacaaggtcgagctcatgtccttcgccgcccagatccgcaagtggaggcggccggaaccgtacaagggcaagggcatctttgtcgacgacgagaccatcaagctcaagcagaagaagatcaagtgagggccgggaccctccgctttcgctttgcttatatgtggactgggctttgcggtgttgtttcatgaccctcgggcctgcttcattctgtactctacataccctctgtaaatacccggatcgagcactagatatgtactttttattgtatactctacaatcatgcttctacgccatcgtctactcatgcttatgccttgaccttgagaacctcctgcacgacggccagaacctgagcatggccgcccacgggggccgcgacgacgcccttgttctcggccagtgtcctgccgaggctgaaatccagtctcttgccatgaatgtccgtcaccgcaccgccggcctcccgcacgatcaagtcaccggccgcgtggtcccagatcttctcttggtaggtagccttgaccggtagccgcagatagatatcaccagcaccgcgggcgatggaggcgtacttggcctgggagtccatcctgacgctggggttggtgatgccaagcttcttggcgatatcggcctggtcgccgtgagacgagtgtccggcctcgacgctctcgcagaaggtggaggcggagatgtcagcgatggccttcatcgagatgtccttggaggtagctaatgcgccagtggtgaggggacggctcgtggcaccctggcccaggacaccagagaacaggcagcccctgccctcgtcggtctggccggactccatgctgccggtgaggggagcagcgtcgtcgacggggaggttggggcagccgagaacgccgaccttgacgtcgccatcgaccatcagggccaagcagacggcgtactggccaccgcgcaagaagcccttggtgccgtcgatggggtcgatggcccatatgcggcccttggcaccgcctttgctgttgccgttgtcgagaaaggtgagcatgtcgtcctcggtcttgatggggccaccgaggacggcctcgccgtcggcatcggtcagcgaggtggacttgacgaggtcccagatggtggtgcgcaggggggcatcctcgcgtagctgtgcggcctcctcctcggcgacgatctcgtcctgggggaagttgtgcttgagggcggcgatgatgagggcctgggcgccaaagtcgccgatggtgacgggggacttgtcgtccttggagacggtgcccttggccttctcgtggaagacgcgcttggtgaggatggcggcgcgctggacggccagctgagccacctcgagctccttagcatatgacgccatggcaacggtggaattgcgtgctgagagagccggagcagagctgatagtagtagggctgagagcagagacggaggggcggaggtgggaggcgatagagctaaggcggggcagaacacggggggagaggaagaccgccagtattgcgatgaagagggaggtgacgaccagcacgagtatttgtggttgtctaggtctaatcgaagcaatgcctcttctggatgtcatgcgagtcgctgtctaattacagaagttgtagctagaggatttgccggtgagattactgtaagccgcaggtcggagcctcagtgttgttgaaagtctgtgtcaagaatccatcgatacccctccacccctcggccgtgtgtcagggtccttttgtggtccgcgtttggtccacgttttgactaggcacttcgacgctgactgcttgcgtaagacaattctgcccttgaagaatgcccaattcccccggac

SEQ ID NO: 19954 - DNA, 1290 bp, Muscodor strobelii
  misc_feature: SGI cDNA ID NO. 566722
  misc_feature: Encodes the peptide sequence at SEQ ID NO 19955
atgacatccagaagaggcattgcttcgattagacctagacaaccacaaatactcgtgctggtcgtcacctccctcttcatcgcaatactggcggtcttcctctccccccgtgttctgccccgccttagctctatcgcctcccacctccgcccctccgtctctgctctcagccctactactatcagctctgctccggctctctcagcacgcaattccaccgttgccatggcgtcatatgctaaggagctcgaggtggctcagctggccgtccagcgcgccgccatcctcaccaagcgcgtcttccacgagaaggccaagggcaccgtctccaaggacgacaagtcccccgtcaccatcggcgactttggcgcccaggccctcatcatcgccgccctcaagcacaacttcccccaggacgagatcgtcgccgaggaggaggccgcacagctacgcgaggatgcccccctgcgcaccaccatctgggacctcgtcaagtccacctcgctgaccgatgccgacggcgaggccgtcctcggtggccccatcaagaccgaggacgacatgctcacctttctcgacaacggcaacagcaaaggcggtgccaagggccgcatatgggccatcgaccccatcgacggcaccaagggcttcttgcgcggtggccagtacgccgtctgcttggccctgatggtcgatggcgacgtcaaggtcggcgttctcggctgccccaacctccccgtcgacgacgctgctcccctcaccggcagcatggagtccggccagaccgacgagggcaggggctgcctgttctctggtgtcctgggccagggtgccacgagccgtcccctcaccactggcgcattagctacctccaaggacatctcgatgaaggccatcgctgacatctccgcctccaccttctgcgagagcgtcgaggccggacactcgtctcacggcgaccaggccgatatcgccaagaagcttggcatcaccaaccccagcgtcaggatggactcccaggccaagtacgcctccatcgcccgcggtgctggtgatatctatctgcggctaccggtcaaggctacctaccaagagaagatctgggaccacgcggccggtgacttgatcgtgcgggaggccggcggtgcggtgacggacattcatggcaagagactggatttcagcctcggcaggacactggccgagaacaagggcgtcgtcgcggcccccgtgggcggccatgctcaggttctggccgtcgtgcaggaggttctcaaggtcaaggcataa

SEQ ID NO: 19955 - protein, 429 aa, Muscodor strobelii
  misc_feature: SGI Peptide ID NO. 566722
  misc_feature (78)..(426): Pfam Id: PF00459 Pfam Desc: Inositol monophosphatase family
  misc_feature (76)..(425): NCBI GI: 39944600 Blast Desc: MGG_04311 [Magnaporthe grisea 70-15] gi|145015050|gb|EDJ99618.1| MGG_04311 [Magnaporthe grisea 70-15]
  misc_feature (74)..(425): NCBI GI: 85086345 Blast Desc: NCU04069 [Neurospora crassa OR74A] gi|28918778|gb|EAA28448.1| NCU04069 [Neurospora crassa OR74A]
  misc_feature (74)..(428): NCBI GI: 46136033 Blast Desc: FG09532.1 [Gibberella zeae PH-1]
  misc_feature (76)..(428): NCBI GI: 156060107 Blast Desc: SS1G_02192 [Sclerotinia sclerotiorum 1980] gi|154699600|gb|EDN99338.1| SS1G_02192 [Sclerotinia sclerotiorum 1980]
  misc_feature (79)..(428): NCBI GI: 171682358 Blast Desc: protein product [Podospora anserina] gi|170941138|emb|CAP66788.1| protein product [Podospora anserina]
  misc_feature (79)..(428): NCBI GI: 116202707 Blast Desc: CHGG_09238 [Chaetomium globosum CBS 148.51] gi|88177756|gb|EAQ85224.1| CHGG_09238 [Chaetomium globosum CBS 148.51]
  misc_feature (78)..(428): NCBI GI: 212529084 Blast Desc: 3'(2'),5'-bisphosphate nucleotidase [Penicillium marneffei ATCC 18224] gi|210074097|gb|EEA28184.1| 3'(2'),5'-bisphosphate nucleotidase [Penicillium marneffei ATCC
  misc_feature (78)..(427): NCBI GI: 255932185 Blast Desc: Pc12g08170 [Penicillium chrysogenum Wisconsin 54-1255] gi|211582268|emb|CAP80444.1| Pc12g08170 [Penicillium chrysogenum Wisconsin 54-1255]
  misc_feature (78)..(429): NCBI GI: 258575103 Blast Desc: 3'(2'),5'-bisphosphate nucleotidase [Uncinocarpus reesii 1704] gi|237901999|gb|EEP76400.1| 3'(2'),5'-bisphosphate nucleotidase [Uncinocarpus reesii 1704]
  misc_feature (78)..(427): NCBI GI: 261205262 Blast Desc: 3',5'-bisphosphate nucleotidase [Ajellomyces dermatitidis SLH14081] gi|239592427|gb|EEQ75008.1| 3',5'-bisphosphate nucleotidase [Ajellomyces dermatitidis ER-3]
  misc_feature (78)..(427): SWISSPROT Homolog: EC 3.1.3.7 3'(2'),5'-bisphosphate nucleotidase
MTSRRGIASIRPRQPQILVLVVTSLFIAILAVFLSPRVLPRLSSIASHLRPSVSALSPTTISSAPALSARNSTVAMASYAKELEVAQLAVQRAAILTKRVFHEKAKGTVSKDDKSPVTIGDFGAQALIIAALKHNFPQDEIVAEEEAAQLREDAPLRTTIWDLVKSTSLTDADGEAVLGGPIKTEDDMLTFLDNGNSKGGAKGRIWAIDPIDGTKGFLRGGQYAVCLALMVDGDVKVGVLGCPNLPVDDAAPLTGSMESGQTDEGRGCLFSGVLGQGATSRPLTTGALATSKDISMKAIADISASTFCESVEAGHSSHGDQADIAKKLGITNPSVRMDSQAKYASIARGAGDIYLRLPVKATYQEKIWDHAAGDLIVREAGGAVTDIHGKRLDFSLGRTLAENKGVVAAPVGGHAQVLAVVQEVLKVKA

SEQ ID NO: 19956 - DNA, 2802 bp, Muscodor strobelii
  misc_feature: SGI EST ID NO. CUFF.46838.0
  misc_feature: Variant of the nucleotide sequence at SEQ ID NO 19954
gtccgggggaattgggcattcttcaagggcagaattgtcttacgcaagcagtcagcgtcgaagtgcctagtcaaaacgtggaccaaacgcggaccacaaaaggaccctgacacacggccgaggggtggaggggtatcgatggattcttgacacagactttcaacaacactgaggctccgacctgcggcttacagtaatctcaccggcaaatcctctagctacaacttctgtaattagacagcgactcgcatgacatccagaagaggcattgcttcgattagacctagacaaccacaaatactcgtgctggtcgtcacctccctcttcatcgcaatactggcggtcttcctctccccccgtgttctgccccgccttagctctatcgcctcccacctccgcccctccgtctctgctctcagccctactactatcagctctgctccggctctctcagcacgcaattccaccgttgccatggcgtcatatgctaaggagctcgaggtggctcagctggccgtccagcgcgccgccatcctcaccaagcgcgtcttccacgagaaggccaagggcaccgtctccaaggacgacaagtcccccgtcaccatcggcgactttggcgcccaggccctcatcatcgccgccctcaagcacaacttcccccaggacgagatcgtcgccgaggaggaggccgcacagctacgcgaggatgcccccctgcgcaccaccatctgggacctcgtcaagtccacctcgctgaccgatgccgacggcgaggccgtcctcggtggccccatcaagaccgaggacgacatgctcacctttctcgacaacggcaacagcaaaggcggtgccaagggccgcatatgggccatcgaccccatcgacggcaccaagggcttcttgcgcggtggccagtacgccgtctgcttggccctgatggtcgatggcgacgtcaaggtcggcgttctcggctgccccaacctccccgtcgacgacgctgctcccctcaccggcagcatggagtccggccagaccgacgagggcaggggctgcctgttctctggtgtcctgggccagggtgccacgagccgtcccctcaccactggcgcattagctacctccaaggacatctcgatgaaggccatcgctgacatctccgcctccaccttctgcgagagcgtcgaggccggacactcgtctcacggcgaccaggccgatatcgccaagaagcttggcatcaccaaccccagcgtcaggatggactcccaggccaagtacgcctccatcgcccgcggtgctggtgatatctatctgcggctaccggtcaaggctacctaccaagagaagatctgggaccacgcggccggtgacttgatcgtgcgggaggccggcggtgcggtgacggacattcatggcaagagactggatttcagcctcggcaggacactggccgagaacaagggcgtcgtcgcggcccccgtgggcggccatgctcaggttctggccgtcgtgcaggaggttctcaaggtcaaggcataagcatgagtagacgatggcgtagaagcatgattgtagagtatacaataaaaagtacatatctagtgctcgatccgggtatttacagagggtatgtagagtacagaatgaagcaggcccgagggtcatgaaacaacaccgcaaagcccagtccacatataagcaaagcgaaagcggagggtcccggccctcacttgatcttcttctgcttgagcttgatggtctcgtcgtcgacaaagatgcccttgcccttgtacggttccggccgcctccacttgcggatctgggcggcgaaggacatgagctcgaccttgtcgatgccctcgagcaggatgcgcgtgggctggggcgtgctggcggtgatgcccttgggcacgggctcctcgacggggtgggtgaagccgagcttgaggcagacgaacttctggcccggatactgcgccttcttgggccgctcttcgatgctggcacggtatcctacacccaccagacgcaagatggcggtgtggccctccgatacgcccataatgtaccgttgcaggtatgcccacgtcgtgcctgttcgcgagaaagacgaagtgtgcgtcagcgttgtagccattcaagtgatcctcccacgccagggttgcaagagtgcaattgtggacagttagacagatatacagatagacgtaccccacatctccttctgctgcttcaggtcggggttctcgatggtgagcaacgccttgcgggcgggctcgtcgtggttgatggtcaggaagggggggatctcgaggtggagctggccgaggggccccgagacggtgacggtgcgcttggggatcttgaggtaggtggtgacatccttcttgacgcggggctcgccgacgacgatgtcgacgccgggcgggatggatatgggggtgcggccgagcttggaggcggccgtcgcggtggccgagaagtgtcgggtggtgtgggtgtggaaggccggcacgaggaaccccggcagcgtgaccacggctccggagagggccttgtcgagggctttactgcggctggggccaagcatcgtgggctgtggtgtcgatgagcccgcagttgggcgtgtgcagggcgtcagcgtgagcgtcgggagctgcgatgtcgacgttgggaatgcttggcgtcgcgaaacatttgacactggtgctgcgccccgagcaggtgaatattgcatggacttggcgcaagctcaccacgtgcaactctatctgtgtatgggggatgctatatgcacttaag

SEQ ID NO: 19957 - DNA, 1566 bp, Muscodor strobelii
  misc_feature: SGI cDNA ID NO. 566723
  misc_feature: Encodes the peptide sequence at SEQ ID NO 19958
atgaatgccaccaagcgcaagttcaacgcgttgatccagggcatcggcggcagccaatcgccctcgcagcccaacgacaaagacgatgttttaggtacccctctggcctcgccctcgccctcgagccgcctgtctccctctgtcgcagccgcatcccgagtcgacatgcctctacctgctgccgtgacttcctctccgatggccgacctgctcaacaagcggcgtcgcatcacggacaccacgaccaccaccccaaccagcaagactaccatctccaacatcgtactcaagaagtgggatccacgccctgcgaactcgcgagctgcctcgtaccactcggcgccgcccagctactgcccttcggaccgcgatgagctgatccggcgactgcgctctttccaagagttgaccgaatggacgcccaagccggacgtggtcaacgagatcgagtgggccaagcgtggatgggtgtgccacggcaaggagcgcgtgcgctgcagcctctgccacagggagctggtcgtcgccaccggcatgcggaccgtcgagggcagagaggtgcctgttgttgccggctccgacgtcgagcaagccctggccaagcgcttcgccgagctcatcaccgaggcccacgccaccgactgtctgtggaagcgccatggctgcgacgactcacttctacggctgcctcttaccgtcgcccagaccgcattggcctccctgcgcgagcggtacgatgacttgtgtgcacggcagtcattcctgccctacctcttcaacctgcgactctctgcgactctcgacatcaagctcgtcaaatcgcagctgccgccgaccttcttcaccgacccgccgccgcccgccacgagccctgccacgagccctgcctcccccaacgacgtggccctcatcctggccctgaccggctggcagggtctcacccacgaccgcataggcgcagtccccaacacggccacctgcgccacctgcctgcgcaggctgggcctctggatgttcaagagcaaggaggtcgacgaggagacggggcagatccgcgtgcccgccccgatggactccctcgaccccgtgcgtgagcatcgcttcttctgtccctggcgcagtgccgccgcccagcacaaccccggcgccaagacccagaacaccaaagccgcctgggaagtcctggcccagaccctcaagaacagcgcctatctgcgccagcaggccgacaagagcagtcagcgctccctcttccaccgctccacggcctccatgccgggcaccccagcaacaccgtcccgctcacgacgacacgatgacgaccaagacactccgggcttctcaccacagacggcaggcgacgaggaagaagaagacgctgcagccagggatgccaaggacaaagagagatgggcgcggctacgtcgcgtcaagagcctattcgacaccaagggccgcaagaagctacaacgctcgctgagtcgccccggaaccgccgccagtcggcccccgacgtcacattcgaggcagaacagcctggctgcagacgctcctgcagacaactaa

SEQ ID NO: 19958 - protein, 521 aa, Muscodor strobelii
  misc_feature: SGI Peptide ID NO. 566723
  misc_feature (302)..(400): Pfam Id: PF08600 Pfam Desc: Rsm1-like
  misc_feature (120)..(260): Pfam Id: PF07967 Pfam Desc: C3HC zinc finger-like
  misc_feature (1)..(504): NCBI GI: 39944612 Blast Desc: MGG_04317 [Magnaporthe grisea 70-15] gi|145015054|gb|EDJ99622.1| MGG_04317 [Magnaporthe grisea 70-15]
  misc_feature (1)..(508): NCBI GI: 256727190 Blast Desc: NECHADRAFT_76918 [Nectria haematococca mpVI 77-13-4]
  misc_feature (1)..(504): NCBI GI: 171682518 Blast Desc: protein product [Podospora anserina] gi|170941218|emb|CAP66868.1| protein product [Podospora anserina]
  misc_feature (1)..(508): NCBI GI: 85086371 Blast Desc: NCU04075 [Neurospora crassa OR74A] gi|28918784|gb|EAA28454.1| [Neurospora crassa OR74A]
  misc_feature (2)..(512): NCBI GI: 46124095 Blast Desc: FG06425.1 [Gibberella zeae PH-1]
  misc_feature (1)..(520): NCBI GI: 261359379 Blast Desc: C3HC zinc finger domain-containing protein [Verticillium albo-atrum VaMs.102]
  misc_feature (1)..(486): NCBI GI: 154315429 Blast Desc: BC1G_04287 [Botryotinia fuckeliana B05.10] gi|150847227|gb|EDN22420.1| BC1G_04287 [Botryotinia fuckeliana B05.10]
  misc_feature (112)..(486): NCBI GI: 156060109 Blast Desc: SS1G_02193 [Sclerotinia sclerotiorum 1980] gi|154699601|gb|EDN99339.1| SS1G_02193 [Sclerotinia sclerotiorum 1980]
  misc_feature (1)..(245): NCBI GI: 116202737 Blast Desc: CHGG_09253 [Chaetomium globosum CBS 148.51] gi|88177771|gb|EAQ85239.1| CHGG_09253 [Chaetomium globosum CBS 148.51]
  misc_feature (116)..(488): NCBI GI: 226282904 Blast Desc: C3HC zinc finger domain-containing protein [Paracoccidioides brasiliensis Pb01]
MNATKRKFNALIQGIGGSQSPSQPNDKDDVLGTPLASPSPSSRLSPSVAAASRVDMPLPAAVTSSPMADLLNKRRRITDTTTTTPTSKTTISNIVLKKWDPRPANSRAASYHSAPPSYCPSDRDELIRRLRSFQELTEWTPKPDVVNEIEWAKRGWVCHGKERVRCSLCHRELVVATGMRTVEGREVPVVAGSDVEQALAKRFAELITEAHATDCLWKRHGCDDSLLRLPLTVAQTALASLRERYDDLCARQSFLPYLFNLRLSATLDIKLVKSQLPPTFFTDPPPPATSPATSPASPNDVALILALTGWQGLTHDRIGAVPNTATCATCLRRLGLWMFKSKEVDEETGQIRVPAPMDSLDPVREHRFFCPWRSAAAQHNPGAKTQNTKAAWEVLAQTLKNSAYLRQQADKSSQRSLFHRSTASMPGTPATPSRSRRHDDDQDTPGFSPQTAGDEEEEDAAARDAKDKERWARLRRVKSLFDTKGRKKLQRSLSRPGTAASRPPTSHSRQNSLAADAPADN

SEQ ID NO: 19959 - DNA, 4031 bp, Muscodor strobelii
  misc_feature: SGI EST ID NO. CUFF.46697.0
  misc_feature: Variant of the nucleotide sequence at SEQ ID NO 19957
cggcaatgcgtaggtgctcaagacagagtgagacggcagacggcagatgtgggctccgatctttccgacgtcatctagcaaaggtggaaacatcgcataaatgttcctttcgcccaacgttagttacaagttacaacgggctgtcgaacctgccctggcgggcccgggtaactccggtaggtcttgattcgactccagggcctcaaggcgctatgaactgccaacctttcaatggttgaagccccagaaagctggatccgagctggagctagtgcccaccgtatctacctagcaagcaagctagtgagtggtcagcaaagcgtcgcccctccgacgcagatgccgcctagacatttgcatccgaaagcagaagtcagaaaacattggataatgccaagtcgtcatttgaacatttgtgatctgtctccttgacactagctctagctctttggacaaaggagtacggtacagaataggaccttttattctttttgtcacttgcgaccttgcacaataataggcccgtctgaactggctagggaaggagagcggtacctaccttaggtagcattagctggccgtcgtcagtgctgctcggtgcgcattggacgtcgacacggtctgccgcagcatccgcgtttcttactcgctattaggctgtatacctaactgtacagaaggcactgcattcctgtgtcgagatgacgatgaatgccaccaagcgcaagttcaacgcgttgatccagggcatcggcggcagccaatcgccctcgcagcccaacgacaaagacgatgttttaggtacccctctggcctcgccctcgccctcgagccgcctgtctccctctgtcgcagccgcatcccgagtcgacatgcctctacctgctgccgtgacttcctctccgatggccgacctgctcaacaagcggcgtcgcatcacggacaccacgaccaccaccccaaccagcaagactaccatctccaacatcgtactcaagaagtgggatccacgccctgcgaactcgcgagctgcctcgtaccactcggcgccgcccagctactgcccttcggaccgcgatgagctgatccggcgactgcgctctttccaagagttgaccgaatggacgcccaagccggacgtggtcaacgagatcgagtgggccaagcgtggatgggtgtgccacggcaaggagcgcgtgcgctgcagcctctgccacagggagctggtcgtcgccaccggcatgcggaccgtcgagggcagagaggtgcctgttgttgccggctccgacgtcgagcaagccctggccaagcgcttcgccgagctcatcaccgaggcccacgccaccgactgtctgtggaagcgccatggctgcgacgactcacttctacggctgcctcttaccgtcgcccagaccgcattggcctccctgcgcgagcggtacgatgacttgtgtgcacggcagtcattcctgccctacctcttcaacctgcgactctctgcgactctcgacatcaagctcgtcaaatcgcagctgccgccgaccttcttcaccgacccgccgccgcccgccacgagccctgccacgagccctgcctcccccaacgacgtggccctcatcctggccctgaccggctggcagggtctcacccacgaccgcataggcgcagtccccaacacggccacctgcgccacctgcctgcgcaggctgggcctctggatgttcaagagcaaggaggtcgacgaggagacggggcagatccgcgtgcccgccccgatggactccctcgaccccgtgcgtgagcatcgcttcttctgtccctggcgcagtgccgccgcccagcacaaccccggcgccaagacccagaacaccaaagccgcctgggaagtcctggcccagaccctcaagaacagcgcctatctgcgccagcaggccgacaagagcagtcagcgctccctcttccaccgctccacggcctccatgccgggcaccccagcaacaccgtcccgctcacgacgacacgatgacgaccaagacactccgggcttctcaccacagacggcaggcgacgaggaagaagaagacgctgcagccagggatgccaaggacaaagagagatgggcgcggctacgtcgcgtcaagagcctattcgacaccaagggccgcaagaagctacaacgctcgctgagtcgccccggaaccgccgccagtcggcccccgacgtcacattcgaggcagaacagcctggctgcagacgctcctgcagacaactaatactctcacattctactcacttgcttcgtctgtataacaccgagctaacagcgcgcccacaaatactgtcggcgttaacttatcacattccgctagaggtttctcctttggcagctctttgcgataggcaagggggtatattaataatgccttgggggaagaggcacgttggaatacatgatgccgctcagtccggcgggtagaacggcattatcaaaatcaagcaatgcatcctcaagacgctcggcattcatcatcatcttgtgattcgcgatcggacgcatggcacgagacatgttcactacgctttgcattgttgctgaaccggccaagcgtgatatatccggctcgttagctagagcctatcgcttttacggacacccggtctcttctttccagtcacacgatgctccatttgcaggcagtaatcaacatcatctagcgacccgaacacagcatcacaccaacgggaggcatcacagcactgtcccttacccagtccagactgccgggccgggagctgagtacgaagtcggaatcggatctggttgccagaaaggtattgggctagatcacttactacaaagaagtcagtaccgtgtcttaggaatacaatcaagaaataactcgcgcgggatctttctacacgtaccagtaagaccaaagcagtcccgggtcgctcgccttgtacgcgcccgggaacgcaacaagcgggccgggagtcccgctgccaccgccggtgacctcgatctgcgcgcagctgaggtagatctgggctccgccgaccgcctgggcctggtgtagtgcgatgctctcgacacgcacaagatacttaccgcttggcgtattcttgggaatagtgaaggatacggatttcttgtctatgttggggaaggtacgtcagtggacggacccatcagtgggagcagacagagtgcaaggcgtaggagggaactcactataggctggccaagtgctttcggaactgcccaggggagggacggcgctgatgctacccgccttgaaccatacattcccagcgggatcccacgaagttacgtcagcagagtcgggcacccgcgccatgtagaattggaccggaccgaagtgcgtgacggcagacgcagcgacgaagccgagcgtgtcgccggccgctaccgtcgcgtaggtagacgcgcccttcatctgatagcaccgcatgtcgggactgttcacgtcggtgacgcccgcattgctctgatagttcttggtctgccggaccgtcgtccagtccgctgcctcggcctggccattgaggataagtcgggggaagtgatctattgatgattagtgtcttggcttttcatcgccttgggtacgctagagaatcgatagatgccctcgggaattatcgttcattcatttcggtaccaggagtgctcaaataggggtatgagatgtggaaagggatgaccgacagtgcgcttgagccgctgcggctgcgaggagtagcaatgtccaggactgcatcttttcgatagctgttcgaccaaatctgttggatacaggagtttggctattacttccaaagaaaaccccggttcaaagaaccattctgggagaaggggcacgtaggtgcaagatataggtacagccggccatcatcagccgtatctcaacctgcctgtccatagctaaacaataaataccgatgatcctccatctaaaaaggtttgattctatgtgcaaggatgaggacatggtccaatgataatcggt

SEQ ID NO: 19960 - DNA, 648 bp, Muscodor strobelii
  misc_feature: SGI cDNA ID NO. 566724
  misc_feature: Encodes the peptide sequence at SEQ ID NO 19961
atgcagtcctggacattgctactcctcgcagccgcagcggctcaagcgcactatcacttcccccgacttatcctcaatggccaggccgaggcagcggactggacgacggtccggcagaccaagaactatcagagcaatgcgggcgtcaccgacgtgaacagtcccgacatgcggtgctatcagatgaagggcgcgtctacctacgcgacggtagcggccggcgacacgctcggcttcgtcgctgcgtctgccgtcacgcacttcggtccggtccaattctacatggcgcgggtgcccgactctgctgacgtaacttcgtgggatcccgctgggaatgtatggttcaaggcgggtagcatcagcgccgtccctcccctgggcagttccgaaagcacttggccagcctataacaagaaatccgtatccttcactattcccaagaatacgccaagcggtaagtatcttgtgcgtgtcgagagcatcgcactacaccaggcccaggcggtcggcggagcccagatctacctcagctgcgcgcagatcgaggtcaccggcggtggcagcgggactcccggcccgcttgttgcgttcccgggcgcgtacaaggcgagcgacccgggactgctttggtcttactggtacgtgtag

SEQ ID NO: 19961 - protein, 215 aa, Muscodor strobelii
  misc_feature: SGI Peptide ID NO. 566724
  misc_feature (143)..(209): Pfam Id: PF03443 Pfam Desc: Glycosyl hydrolase family 61
  misc_feature (15)..(215): NCBI GI: 171688168 Blast Desc: protein product [Podospora anserina] gi|170944046|emb|CAP70156.1| protein product [Podospora anserina]
  misc_feature (1)..(215): NCBI GI: 116197146 Blast Desc: CHGG_05171 [Chaetomium globosum CBS 148.51] gi|88181084|gb|EAQ88552.1| CHGG_05171 [Chaetomium globosum CBS 148.51]
  misc_feature (7)..(214): NCBI GI: 189202962 Blast Desc: fungal cellulose binding domain containing protein [Pyrenophora tritici-repentis Pt-1C-BFP] gi|187984916|gb|EDU50404.1| fungal cellulose binding domain
  misc_feature (17)..(208): NCBI GI: 169596264 Blast Desc: SNOG_00889 [Phaeosphaeria nodorum SN15] gi|111071264|gb|EAT92384.1| SNOG_00889 [Phaeosphaeria nodorum SN15]
  misc_feature (5)..(213): NCBI GI: 169868872 Blast Desc: CC1G_04849 [Coprinopsis cinerea okayama7#130] gi|116497844|gb|EAU80739.1| CC1G_04849 [Coprinopsis cinerea okayama7#130]
  misc_feature (1)..(208): NCBI GI: 171683760 Blast Desc: protein product [Podospora anserina] gi|170941840|emb|CAP67493.1| protein product [Podospora anserina]
  misc_feature (6)..(214): NCBI GI: 169868870 Blast Desc: CC1G_04848 [Coprinopsis cinerea okayama7#130] gi|116497843|gb|EAU80738.1| CC1G_04848 [Coprinopsis cinerea okayama7#130]
  misc_feature (7)..(209): NCBI GI: 116200239 Blast Desc: CHGG_08275 [Chaetomium globosum CBS 148.51] gi|88179554|gb|EAQ87022.1| CHGG_08275 [Chaetomium globosum CBS 148.51]
  misc_feature (1)..(215): NCBI GI: 116200237 Blast Desc: CHGG_08274 [Chaetomium globosum CBS 148.51] gi|88179553|gb|EAQ87021.1| CHGG_08274 [Chaetomium globosum CBS 148.51]
  misc_feature (17)..(214): NCBI GI: 169596128 Blast Desc: SNOG_00815 [Phaeosphaeria nodorum SN15] gi|160701235|gb|EAT92310.2| SNOG_00815 [Phaeosphaeria nodorum SN15]
  misc_feature (54)..(213): SWISSPROT Homolog: EC 3.2.1.4 Cellulase
MQSWTLLLLAAAAAQAHYHFPRLILNGQAEAADWTTVRQTKNYQSNAGVTDVNSPDMRCYQMKGASTYATVAAGDTLGFVAASAVTHFGPVQFYMARVPDSADVTSWDPAGNVWFKAGSISAVPPLGSSESTWPAYNKKSVSFTIPKNTPSGKYLVRVESIALHQAQAVGGAQIYLSCAQIEVTGGGSGTPGPLVAFPGAYKASDPGLLWSYWYV

SEQ ID NO: 19962 - DNA, 3387 bp, Muscodor strobelii
  misc_feature: SGI cDNA ID NO. 566725
  misc_feature: Reduced expression when VOC is produced
  misc_feature: Encodes the peptide sequence at SEQ ID NO 19963
atggcaccgtctatgccgtcacatccgccgtcacctactgtcaccacgttcctcatagctaacctacactgtcccacctgtgtatcgactataaaaaatgccttgcaagacctggagggcgttgcatgggtgtcgcccaacatcatcacatcttgtgttgctgtcgagcacgacgctcgcatccctactatgcatatagcatcaaaactggaatctgccggctttgagatatcgagcacatctgtcgaagatcttggcggcactccgcgcaactctaagtcagcagatgcaaaaaacaccatatctcctgccacgcttgatggttccacggactggatcacaactatttcggggagatttagacactcgcagccctccgttcaagaggagagagtgagggcacatctcaaaaactgcgagcaatgtcgagccactggggcaggcggcgattctcctccgcacgacgtaacatcagaagccactcgggcaacaccaaacgctggcgccattcagcagagcgagataagtgcacctgctgcctcgacacaatcttcatctactatcagtggggctgtggccactcccagggcttggagggccaccttggccatcagtggcatgacatgtgcctcgtgtgtcaatgcaatttcgacagagctgaataagcaaagctgggtcaccaacgtcgccatcaatctattgtcgaatagtggagtgatcgaatacaacggagtcgaggatcaggttcttcaattggttgagaaaatcgaggatattggctacgacgcccatcttgatcaaaatgtacccatcgacgacgagaaggaagacatacatgagcggacggtccagatacgtatcgatggcttctattgccctcactgtggcgaccgagcagtatacagcattgccggcttccagcatgaacttacgatcgtcaatcgtcccacgttacagcgtcctcttctggaaataacgtataaacccaaagcacccaagttcacagttcgtcacattcttgcagcactcgaagcgagtgatccggctttcacggcgtccatctttcatccaccgaccttggaagagcgatcgaagcagattcaagcgcggcatcaaaaagaaatattcttacgcgctcttttcacagccatcattgcgattcccaccttcgttatcggtattgtatacatgagtttagtgcagatgggccctggaagggaacttcttatgaagccctgggtatcgggcattaaccgagcccaggtcgcgctattcatacttgcgacgccggtatatttcttcacagcggatctattccatcgccgcactatcaaagaggttcgaacactctggagaccaggaagccaggttcctattctaaagcgattttatcgctttggtagcatgaatatgctgatctcgctcggcacttcaatcgcgtacatttcatcagttgctcaaatgattgccgccgctgtcgagtacagccggaacaaggactttgaagtcaatgatgccgatttctcctttgacactgttgtatttctaacgctattccttctcgctggccgttacctcgaagcctacagcaaatcgaaaacaggcaacgctgttgaagcacttggcaaacttcgtcctactactgctttactactcgataccgatgcttccctgaagccaactgtgcgtgtcgtggagacagatatgctagatgtcggtgatgttgtacagatccctcatggatcttcccctccttgtgacggcgagataatcaacggcgagagcatgttcgatgagtcaagcttgaccggcgaatcccgtcctatcaagaagagcgtcgatgatcaggtgttctcgggaacagtgaacaaaggcgccttgatatctattcgtatcacgggtgcagcggggcaatcgatgcttgaccagatcgtcaaagtcgtgcgagagggacaaaccaagcgagcccctatggagaaaatcgcggatgcactcgtggcatactttgttccagccattgtgctcatcgcaatactcacatttctcatctggttggctgtcggtgaagctattgatctaccggacccggtagtatttgcactacgattcgcaattgcagtatttgtcgtggcgtgtccttgtgggttggctttagctgcgcccactgcgatatttgtaggaggcggcatagctgctcaacatggcattttagtcaagggtggtggagaagctttcgagacggctagcagagtggactgtattgtgtttgacaagacaggcactttgacagtaggcggtgagccaagtgtcacgaattcggagttttatggtgatgaaagtgcagaagaggataggaagacccagcttctaggtgcacttcggacgatagaggaaaatagcagtcatcccatcgcaaaagcaattgtcagcttttgcaagaactcgtcgtccgacgtcgtggttgatgatgtggaagagctaccaggtaagggaattaaggcatcctgcgttgtgggaagcaagaccgaacactttgatgttctgattgggaacgaagctctcatgcgagactttgcggttgatatacccttggtcgtctccgagacactccaaacttggaaaacagaagctaaatccgtcgcacttattgccacaacgccaagctcacggcggaaaacatcggaaggcacttatcgacttgcggctgctcttgcgatatctgacccgattcgccctgaatccgctgccgtgatcaaagctttgcggtctaacggaacagatgtgtggatgctttcaggagacaacgtggtgacggcgcgcgcggttgctctccgtattggcatcccggaggacaacgtaatagcagaggtgctccccgcacagaagtttgaaaagatcaagttactgcagtccacgctcaaggctggatgtggaagcggcaaggaatatgtcgaccgccgggctaccgtggccatggtcggcgacggcatcaacgacgccccggcgttgagcatggcagatgtcggtatcgccattggctcgggtagcgacgtcgcgatttcgagcgcagacttcgtgctcgtgaacagcaatttgatgtccgtggtaacgctgcttcagttgagccggaaggtcttctggagaatcaaattcaactttggctgggctctcgtatacaaccttatcgccctcccctttgcggctggctgcttttgggctatcaaagtgaacggcagccatattgtgctagaccccgtcttcgccagtttagccatggcattgagtagcttgagtgtggtgacgagcagcctggcgctgaaaacgcggattcccggacttggatttagggagaagactatacccaagccacaggatcaagatgcatga

SEQ ID NO: 19963 - protein, 1128 aa, Muscodor strobelii
  misc_feature: SGI Peptide ID NO. 566725
  misc_feature (201)..(265): Pfam Id: PF00403 Pfam Desc: Heavy-metal-associated domain
  misc_feature (751)..(1016): Pfam Id: PF00702 Pfam Desc: haloacid dehalogenase-like hydrolase
  misc_feature (515)..(747): Pfam Id: PF00122 Pfam Desc: E1-E2 ATPase
  misc_feature (198)..(1120): NCBI GI: 116202739 Blast Desc: CHGG_09254 [Chaetomium globosum CBS 148.51] gi|88177772|gb|EAQ85240.1| CHGG_09254 [Chaetomium globosum CBS 148.51]
  misc_feature (15)..(1120): NCBI GI: 46128177 Blast Desc: FG08466.1 [Gibberella zeae PH-1]
  misc_feature (197)..(1120): NCBI GI: 164426735 Blast Desc: NCU04076 [Neurospora crassa OR74A] gi|157071454|gb|EAA28455.2| conserved [Neurospora crassa OR74A]
  misc_feature (66)..(1120): NCBI GI: 145610741 Blast Desc: MGG_00930 [Magnaporthe grisea 70-15] gi|145018116|gb|EDK02395.1| MGG_00930 [Magnaporthe grisea 70-15]
  misc_feature (198)..(1118): NCBI GI: 171682528 Blast Desc: protein product [Podospora anserina] gi|170941223|emb|CAP66873.1| protein product [Podospora anserina]
  misc_feature (7)..(1116): NCBI GI: 156060631 Blast Desc: SS1G_02457 [Sclerotinia sclerotiorum 1980] gi|154699862|gb|EDN99600.1| SS1G_02457 [Sclerotinia sclerotiorum 1980]
  misc_feature (199)..(1116): NCBI GI: 255930551 Blast Desc: Pc06g02330 [Penicillium chrysogenum Wisconsin 54-1255] gi|211581448|emb|CAP79226.1| Pc06g02330 [Penicillium chrysogenum Wisconsin 54-1255]
  misc_feature (197)..(1118): NCBI GI: 169764295 Blast Desc: [Aspergillus oryzae RIB40] gi|83764473|dbj|BAE54617.1| protein product [Aspergillus oryzae]
  misc_feature (183)..(1116): NCBI GI: 255939199 Blast Desc: Pc15g01490 [Penicillium chrysogenum Wisconsin 54-1255] gi|211584991|emb|CAP83035.1| Pc15g01490 [Penicillium chrysogenum Wisconsin 54-1255]
  misc_feature (198)..(1118): NCBI GI: 189203681 Blast Desc: copper-transporting P-type ATPase [Pyrenophora tritici-repentis Pt-1C-BFP] gi|187985275|gb|EDU50763.1| copper-transporting P-type ATPase [Pyrenophora tritici-repentis
  misc_feature (204)..(1072): SWISSPROT Homolog: EC 3.6.3.4 Copper-exporting ATPase
  misc_feature: Useful for introducing or modulating the production of volatile compounds
MAPSMPSHPPSPTVTTFLIANLHCPTCVSTIKNALQDLEGVAWVSPNIITSCVAVEHDARIPTMHIASKLESAGFEISSTSVEDLGGTPRNSKSADAKNTISPATLDGSTDWITTISGRFRHSQPSVQEERVRAHLKNCEQCRATGAGGDSPPHDVTSEATRATPNAGAIQQSEISAPAASTQSSSTISGAVATPRAWRATLAISGMTCASCVNAISTELNKQSWVTNVAINLLSNSGVIEYNGVEDQVLQLVEKIEDIGYDAHLDQNVPIDDEKEDIHERTVQIRIDGFYCPHCGDRAVYSIAGFQHELTIVNRPTLQRPLLEITYKPKAPKFTVRHILAALEASDPAFTASIFHPPTLEERSKQIQARHQKEIFLRALFTAIIAIPTFVIGIVYMSLVQMGPGRELLMKPWVSGINRAQVALFILATPVYFFTADLFHRRTIKEVRTLWRPGSQVPILKRFYRFGSMNMLISLGTSIAYISSVAQMIAAAVEYSRNKDFEVNDADFSFDTVVFLTLFLLAGRYLEAYSKSKTGNAVEALGKLRPTTALLLDTDASLKPTVRVVETDMLDVGDVVQIPHGSSPPCDGEIINGESMFDESSLTGESRPIKKSVDDQVFSGTVNKGALISIRITGAAGQSMLDQIVKVVREGQTKRAPMEKIADALVAYFVPAIVLIAILTFLIWLAVGEAIDLPDPVVFALRFAIAVFVVACPCGLALAAPTAIFVGGGIAAQHGILVKGGGEAFETASRVDCIVFDKTGTLTVGGEPSVTNSEFYGDESAEEDRKTQLLGALRTIEENSSHPIAKAIVSFCKNSSSDVVVDDVEELPGKGIKASCVVGSKTEHFDVLIGNEALMRDFAVDIPLVVSETLQTWKTEAKSVALIATTPSSRRKTSEGTYRLAAALAISDPIRPESAAVIKALRSNGTDVWMLSGDNVVTARAVALRIGIPEDNVIAEVLPAQKFEKIKLLQSTLKAGCGSGKEYVDRRATVAMVGDGINDAPALSMADVGIAIGSGSDVAISSADFVLVNSNLMSVVTLLQLSRKVFWRIKFNFGWALVYNLIALPFAAGCFWAIKVNGSHIVLDPVFASLAMALSSLSVVTSSLALKTRIPGLGFREKTIPKPQDQDA

SEQ ID NO: 19964 - DNA, 4650 bp, Muscodor strobelii
  misc_feature: SGI EST ID NO. CUFF.46694.0
  misc_feature: Variant of the nucleotide sequence at SEQ ID NO 19962
gaaagggcggtacagggttgtgtgagatgcgcgttttgtgcgtccacctcgaggccggtcttttgtggatcgaggggcgaccggcccgtgtgatgcctgaaaagcggcgatgaagcacgccggctaccgtctgatccccttggtcttcaaccccccagcgccccgtcatgacgtgtaatatcgtggcgaggcctcgcctcacctgtcccggtctaatttcccctagagcgaggccaatagctgcgaatcaaagaagtgcagcttcgaagatggtgtgctttttgtgatgagtcgcggtggccaaaaattagtggaaggttttcattgccgacgccggctgcctcgatagcagttgattaaggtgcaaatgcctgtgacagagcaaaccttcccagttgcagcctaccatctaattattagaaagtcctgtacgtatataatgatcttgagctactgctgactttctggtaagtaattcggtaaccaaatccattcggacatccaattagcaggttctctttcgtctgacctttgcatttgacaaacaattactaggtcgagctggtcgcgttatttgtgcgttgcatcgtgacagaagcttttagaacgttgcctcgcacgtctcattagctgattcgatcgcatcttttcttaagtaatcactgaggcatttgcgccatagtctgctgctgctggtattaaattagcttttccgctgatcgtccttcgctgtccagcaagcaatcgaccaagttatacggaaagtacaagccttcagcctaataccaacactgggccctcagcagctggtgatgcaaccctctttttaatatacacaatatacacatacatcgagtcatccgttgctcaaaatggcaccgtctatgccgtcacatccgccgtcacctactgtcaccacgttcctcatagctaacctacactgtcccacctgtgtatcgactataaaaaatgccttgcaagacctggagggcgttgcatgggtgtcgcccaacatcatcacatcttgtgttgctgtcgagcacgacgctcgcatccctactatgcatatagcatcaaaactggaatctgccggctttgagatatcgagcacatctgtcgaagatcttggcggcactccgcgcaactctaagtcagcagatgcaaaaaacaccatatctcctgccacgcttgatggttccacggactggatcacaactatttcggggagatttagacactcgcagccctccgttcaagaggagagagtgagggcacatctcaaaaactgcgagcaatgtcgagccactggggcaggcggcgattctcctccgcacgacgtaacatcagaagccactcgggcaacaccaaacgctggcgccattcagcagagcgagataagtgcacctgctgcctcgacacaatcttcatctactatcagtggggctgtggccactcccagggcttggagggccaccttggccatcagtggcatgacatgtgcctcgtgtgtcaatgcaatttcgacagagctgaataagcaaagctgggtcaccaacgtcgccatcaatctattgtcgaatagtggagtgatcgaatacaacggagtcgaggatcaggttcttcaattggttgagaaaatcgaggatattggctacgacgcccatcttgatcaaaatgtacccatcgacgacgagaaggaagacatacatgagcggacggtccagatacgtatcgatggcttctattgccctcactgtggcgaccgagcagtatacagcattgccggcttccagcatgaacttacgatcgtcaatcgtcccacgttacagcgtcctcttctggaaataacgtataaacccaaagcacccaagttcacagttcgtcacattcttgcagcactcgaagcgagtgatccggctttcacggcgtccatctttcatccaccgaccttggaagagcgatcgaagcagattcaagcgcggcatcaaaaagaaatattcttacgcgctcttttcacagccatcattgcgattcccaccttcgttatcggtattgtatacatgagtttagtgcagatgggccctggaagggaacttcttatgaagccctgggtatcgggcattaaccgagcccaggtcgcgctattcatacttgcgacgccggtatatttcttcacagcggatctattccatcgccgcactatcaaagaggttcgaacactctggagaccaggaagccaggttcctattctaaagcgattttatcgctttggtagcatgaatatgctgatctcgctcggcacttcaatcgcgtacatttcatcagttgctcaaatgattgccgccgctgtcgagtacagccggaacaaggactttgaagtcaatgatgccgatttctcctttgacactgttgtatttctaacgctattccttctcgctggccgttacctcgaagcctacagcaaatcgaaaacaggcaacgctgttgaagcacttggcaaacttcgtcctactactgctttactactcgataccgatgcttccctgaagccaactgtgcgtgtcgtggagacagatatgctagatgtcggtgatgttgtacagatccctcatggatcttcccctccttgtgacggcgagataatcaacggcgagagcatgttcgatgagtcaagcttgaccggcgaatcccgtcctatcaagaagagcgtcgatgatcaggtgttctcgggaacagtgaacaaaggcgccttgatatctattcgtatcacgggtgcagcggggcaatcgatgcttgaccagatcgtcaaagtcgtgcgagagggacaaaccaagcgagcccctatggagaaaatcgcggatgcactcgtggcatactttgttccagccattgtgctcatcgcaatactcacatttctcatctggttggctgtcggtgaagctattgatctaccggacccggtagtatttgcactacgattcgcaattgcagtatttgtcgtggcgtgtccttgtgggttggctttagctgcgcccactgcgatatttgtaggaggcggcatagctgctcaacatggcattttagtcaagggtggtggagaagctttcgagacggctagcagagtggactgtattgtgtttgacaagacaggcactttgacagtaggcggtgagccaagtgtcacgaattcggagttttatggtgatgaaagtgcagaagaggataggaagacccagcttctaggtgcacttcggacgatagaggaaaatagcagtcatcccatcgcaaaagcaattgtcagcttttgcaagaactcgtcgtccgacgtcgtggttgatgatgtggaagagctaccaggtaagggaattaaggcatcctgcgttgtgggaagcaagaccgaacactttgatgttctgattgggaacgaagctctcatgcgagactttgcggttgatatacccttggtcgtctccgagacactccaaacttggaaaacagaagctaaatccgtcgcacttattgccacaacgccaagctcacggcggaaaacatcggaaggcacttatcgacttgcggctgctcttgcgatatctgacccgattcgccctgaatccgctgccgtgatcaaagctttgcggtctaacggaacagatgtgtggatgctttcaggagacaacgtggtgacggcgcgcgcggttgctctccgtattggcatcccggaggacaacgtaatagcagaggtgctccccgcacagaagtttgaaaagatcaagttactgcagtccacgctcaaggctggatgtggaagcggcaaggaatatgtcgaccgccgggctaccgtggccatggtcggcgacggcatcaacgacgccccggcgttgagcatggcagatgtcggtatcgccattggctcgggtagcgacgtcgcgatttcgagcgcagacttcgtgctcgtgaacagcaatttgatgtccgtggtaacgctgcttcagttgagccggaaggtcttctggagaatcaaattcaactttggctgggctctcgtatacaaccttatcgccctcccctttgcggctggctgcttttgggctatcaaagtgaacggcagccatattgtgctagaccccgtcttcgccagtttagccatggcattgagtagcttgagtgtggtgacgagcagcctggcgctgaaaacgcggattcccggacttggatttagggagaagactatacccaagccacaggatcaagatgcatgaggagtctgtaaggagatattatactcagtagtgaataactacatataaccaactaatatcaaaaagggctgtatgagcaaagctcgttcagaaaacccatcgtctcctgaacctttggtgacatgtaaaggggcaaagcccccagcatccttgagcctattcgagaatcaagtaacatcattagagctagagattatacactagttaaactaacttaacggaagtattctatttgtatggtatttaaaggactatacgcattgtcaggtaacctatatgaactgtcttaagatagcagaaaggtcagcgtctatgcggtctgccacctgcgcgcggcacacaccaaactttgctctgtttcttgtttggtcatttcaccacacaattcctg

SEQ ID NO: 19965 - DNA, 1686 bp, Muscodor strobelii
  misc_feature: SGI cDNA ID NO. 566726
  misc_feature: Reduced expression when VOC is produced
  misc_feature: Encodes the peptide sequence at SEQ ID NO 19966
atggagcgccaccgacaagcagtacggctcattgctgcgacggtgcgcggttactttgagcaaaaactgccttaccggatatctcacggcagcactaattctacgcgcccggctcaccttaaatccagggctcgtacagtagacatcagtgccctaaagaatgtgctggaagttgacacggcgcggcgcatcgctcttgtcgagcctaacgtgcctatggaccgtctcgttgagcacactctgaaatatggcctggtgccccctgtggtcatggaatttcccggtatcacggctggtggtggctttgctgggacggcgggggagagcagttcattccgacatggatactttgatgagagtgtcaatgctgtcgaggtcgtactccccaatggcgaagtcgtagtcgcgaaaccaggaaagacatcgacgggcagcttcgctaagacgaccgctgtcacggacactaaaataggggaagaagaagatccagagaagtattcagatctcttccacggcgccgctggtgcagttggtactctgggtgttacgacgctgctagagcttcaacttattgaagcaaagcgcttcgtgcgcactacatatcgacggacgaatagtgctgctgagactattcgtgctgtacgcgaggagacagcgaagtcgaataatgactacgttgatgggatcctattctccgagagtcacggggtcgttgtcagtggtgagatgacggacgagttacctgccggcgaaaaagtgcaaacgttctcccacgcttgggatccctggttttacatgcatgttcgcgaagtgacacggggtctaccatcgtctatgtctggcttagactcgggagcagacgacatctcgtcaccatcaggcgtgacacaaggttctgttaccgattatgtccctctggccgaatatctgtttcggtacgacaggggcggcttttgggtagggcaagcagcatttgactatttcaaaccggttccatttacacgattcttccgctggttcctcgacgacttcctacacacacggatgctctaccgtgctctgcacgccagcggcgaaagtgcacgctttttcgttcaggatctgggcattccctacgacacagccgaggatttcatcgagtacacgacgaagtctctaaatatctggccgctttggctgtgtccccttcacacgcccaagggccccagcttccacccccacgtccgcgatccctccaccactcgccctgccaatgaaatgctcaacgttggcgtatggggctggggtccgccgaggaagtcggacttcgtacaggttaaccgcgcgctcgaggataaggtcaacgaattaggcgggatgaaatggctatatgcacatacgactaacggggttcttctcaataccaggtactacaccgaacccgagttctgggatgcgtttggcgggcgagggccctacgaggcgctgcgagccaaatatcacgccacgagcctgcccaccgtttatgacaaggtaaaggtaaggacagaagatgatcgaggtgggtggaagccttggctaaagagcctatggcctgtagggggcttgtatggcatatggcgaggtattgagagcaaagattatatgcttcaccgcgacgcgacctggaagtggaaggccggcgctgaaaaggagaagactttataa

SEQ ID NO: 19966 - protein, 561 aa, Muscodor strobelii
  misc_feature: SGI Peptide ID NO. 566726
  misc_feature (3)..(137): Pfam Id: PF01565 Pfam Desc: FAD binding domain
  misc_feature (46)..(137): Pfam Id: PF01565 Pfam Desc: FAD binding domain
  misc_feature (1)..(552): NCBI GI: 39973647 Blast Desc: MGG_01030 [Magnaporthe grisea 70-15] gi|145018014|gb|EDK02293.1| MGG_01030 [Magnaporthe grisea 70-15]
  misc_feature (1)..(552): NCBI GI: 46134251 Blast Desc: FG09265.1 [Gibberella zeae PH-1]
  misc_feature (1)..(553): NCBI GI: 242787939 Blast Desc: galactose-1-phosphate uridylyltransferase [Talaromyces stipitatus ATCC 10500] gi|218721266|gb|EED20685.1| galactose-1-phosphate uridylyltransferase [Talaromyces stipitatus
  misc_feature (1)..(552): NCBI GI: 85096865 Blast Desc: NCU10189 [Neurospora crassa OR74A] gi|28921825|gb|EAA31101.1| conserved [Neurospora crassa OR74A]
  misc_feature (1)..(552): NCBI GI: 261359659 Blast Desc: FAD binding domain-containing protein [Verticillium albo-atrum VaMs.102]
  misc_feature (1)..(550): NCBI GI: 212543869 Blast Desc: FAD binding domain protein [Penicillium marneffei ATCC 18224] gi|210066996|gb|EEA21089.1| FAD binding domain protein [Penicillium marneffei ATCC 18224]
  misc_feature (1)..(552): NCBI GI: 169765354 Blast Desc: [Aspergillus oryzae RIB40] gi|83765003|dbj|BAE55146.1| protein product [Aspergillus oryzae]
  misc_feature (1)..(552): NCBI GI: 67903960 Blast Desc: AN8967.2 [Aspergillus nidulans FGSC A4] gi|40744606|gb|EAA63762.1| AN8967.2 [Aspergillus nidulans FGSC A4] gi|259486584|tpe|CBF84550.1| TPA: FAD binding domain protein
  misc_feature (1)..(550): NCBI GI: 154311026 Blast Desc: BC1G_06631 [Botryotinia fuckeliana B05.10] gi|150851035|gb|EDN26228.1| BC1G_06631 [Botryotinia fuckeliana B05.10]
  misc_feature (1)..(553): NCBI GI: 189207601 Blast Desc: 24-dehydrocholesterol reductase precursor [Pyrenophora tritici-repentis Pt-1C-BFP] gi|187976227|gb|EDU42853.1| 24-dehydrocholesterol reductase precursor [Pyrenophora Pt-1C-BFP]
  misc_feature: Useful for introducing or modulating the production of volatile compounds
MERHRQAVRLIAATVRGYFEQKLPYRISHGSTNSTRPAHLKSRARTVDISALKNVLEVDTARRIALVEPNVPMDRLVEHTLKYGLVPPVVMEFPGITAGGGFAGTAGESSSFRHGYFDESVNAVEVVLPNGEVVVAKPGKTSTGSFAKTTAVTDTKIGEEEDPEKYSDLFHGAAGAVGTLGVTTLLELQLIEAKRFVRTTYRRTNSAAETIRAVREETAKSNNDYVDGILFSESHGVVVSGEMTDELPAGEKVQTFSHAWDPWFYMHVREVTRGLPSSMSGLDSGADDISSPSGVTQGSVTDYVPLAEYLFRYDRGGFWVGQAAFDYFKPVPFTRFFRWFLDDFLHTRMLYRALHASGESARFFVQDLGIPYDTAEDFIEYTTKSLNIWPLWLCPLHTPKGPSFHPHVRDPSTTRPANEMLNVGVWGWGPPRKSDFVQVNRALEDKVNELGGMKWLYAHTTNGVLLNTRYYTEPEFWDAFGGRGPYEALRAKYHATSLPTVYDKVKVRTEDDRGGWKPWLKSLWPVGGLYGIWRGIESKDYMLHRDATWKWKAGAEKEKTL

SEQ ID NO: 19967 - DNA, 2261 bp, Muscodor strobelii
  misc_feature: SGI EST ID NO. CUFF.46734.1
  misc_feature: Variant of the nucleotide sequence at SEQ ID NO 19965
ggacaatagagctcggttcaatgtttagtgtggacttttctatgtgggtgcatatcttaccctgcaggccgggggtagatgtcaaaggaaagatgccccaccgactgatatctcacttttttaatgaatgtctcagctcatctacagctagatgcgattgggctgagtcggccagcctctgatgagctatgtagtagctgaactcactatagcgagaccttatatcgatgaattgtcctggtactgaaatctgaatcagctcatcaactctaggaggcacccgaagcaatggagcgccaccgacaagcagtacggctcattgctgcgacggtgcgcggttactttgagcaaaaactgccttaccggatatctcacggcagcactaattctacgcgcccggctcaccttaaatccagggctcgtacagtagacatcagtgccctaaagaatgtgctggaagttgacacggcgcggcgcatcgctcttgtcgagcctaacgtgcctatggaccgtctcgttgagcacactctgaaatatggcctggtgccccctgtggtcatggaatttcccggtatcacggctggtggtggctttgctgggacggcgggggagagcagttcattccgacatggatactttgatgagagtgtcaatgctgtcgaggtcgtactccccaatggcgaagtcgtagtcgcgaaaccaggaaagacatcgacgggcagcttcgctaagacgaccgctgtcacggacactaaaataggggaagaagaagatccagagaagtattcagatctcttccacggcgccgctggtgcagttggtactctgggtgttacgacgctgctagagcttcaacttattgaagcaaagcgcttcgtgcgcactacatatcgacggacgaatagtgctgctgagactattcgtgctgtacgcgaggagacagcgaagtcgaataatgactacgttgatgggatcctattctccgagagtcacggggtcgttgtcagtggtgagatgacggacgagttacctgccggcgaaaaagtgcaaacgttctcccacgcttgggatccctggttttacatgcatgttcgcgaagtgacacggggtctaccatcgtctatgtctggcttagactcgggagcagacgacatctcgtcaccatcaggcgtgacacaaggttctgttaccgattatgtccctctggccgaatatctgtttcggtacgacaggggcggcttttgggtagggcaagcagcatttgactatttcaaaccggttccatttacacgattcttccgctggttcctcgacgacttcctacacacacggatgctctaccgtgctctgcacgccagcggcgaaagtgcacgctttttcgttcaggatctgggcattccctacgacacagccgaggatttcatcgagtacacgacgaagtctctaaatatctggccgctttggctgtgtccccttcacacgcccaagggccccagcttccacccccacgtccgcgatccctccaccactcgccctgccaatgaaatgctcaacgttggcgtatggggctggggtccgccgaggaagtcggacttcgtacaggttaaccgcgcgctcgaggataaggtcaacgaattaggcgggatgaaatggctatatgcacatacggtgagtacctaactgtcccgcgagtataaatgagagctaccgcttcttttggcaatatccgtgctaactactttgtagtaagtcatctctctgtcaaataccaggtcctcggtctcaagcccgagaacctgacgctatgtactatcacacaatagactaacggggttcttctcaataccaggtactacaccgaacccgagttctgggatgcgtttggcgggcgagggccctacgaggcgctgcgagccaaatatcacgccacgagcctgcccaccgtttatgacaaggtaaaggtaaggacagaagatgatcgaggtgggtggaagccttggctaaagagcctatggcctgtagggggcttgtatggcatatggcgaggtattgagagcaaagattatatgcttcaccgcgacgcgacctggaagtggaaggccggcgctgaaaaggagaagactttataaaacgttacgacattagatatcaagggggtataaacgtgtatagagccagagcagagcatattttgctcattgtaaaatattgtacaaggtgtatctgatctaatcaaatagaatggcctagactatcatcat

SEQ ID NO: 19968 - DNA, 735 bp, Muscodor strobelii
  misc_feature: SGI cDNA ID NO. 566727
  misc_feature: Encodes the peptide sequence at SEQ ID NO 19969
ctcaactgctacaccgaggccctcgacgccgcctaccgcgactactgcaagcgcgaggcccggctgcagaacggccacgccaacggcgcccccgccgacggcaagaccccgctcgaccgcttcgactacctggccttccactcgcccacctgcaagaccgtccagaagtcctacgcccgcctgctgtaccacgactacctgaacagccccgagagccccgccttcgccgacgtccccggcgacatccgcgacatggactaccacaagtccctcaccgacaaggccatcgagaagaccttcatgggcctgaccaagaagcgcttcgccgagcgtgtctcgcccgccatccaggtcgccactaactgcggcaacctgtactgcggcagcttgtggagcggcctcgccagcattgtcgcccacgtcgacagcagcgccctgcagggcaagaagatcggcctcttcagctacggctctggcctcgccgccagcttcatgtccatgcgtgtgaccggtagcacggaatccatcgccaaggctttggatgtccccaccaaactcgctgctcgccgcgctgtcgcccccgagggctacgaagctttctgcgacctgcgccaccaagctcatctccagaagaactacgagcccaagggcgacgtttccacgctagcccccggcacgtattacttggagaaggtcgacgacatgttcaagcgacactacgccgtcaaggcatag

SEQ ID NO: 19969 - protein, 244 aa, Muscodor strobelii
  misc_feature: SGI Peptide ID NO. 566727
  misc_feature (1)..(243): Pfam Id: PF08540 Pfam Desc: Hydroxymethylglutaryl-coenzyme A synthase C terminal
  misc_feature (1)..(244): NCBI GI: 85085746 Blast Desc: hydroxymethylglutaryl-CoA synthase [Neurospora crassa OR74A] gi|7899409|emb|CAB91699.1| hydroxymethylglutaryl-CoA synthase [Neurospora crassa] gi|28918654|gb|EAA28325.1| synthase
  misc_feature (1)..(244): NCBI GI: 39973655 Blast Desc: conserved [Magnaporthe grisea 70-15] gi|145018020|gb|EDK02299.1| conserved [Magnaporthe grisea 70-15]
  misc_feature (1)..(243): NCBI GI: 171682112 Blast Desc: protein product [Podospora anserina] gi|170941015|emb|CAP66665.1| protein product [Podospora anserina]
  misc_feature (1)..(243): NCBI GI: 256727736 Blast Desc: [Nectria haematococca mpVI 77-13-4]
  misc_feature (1)..(243): NCBI GI: 46134253 Blast Desc: FG09266.1 [Gibberella zeae PH-1]
  misc_feature (1)..(244): NCBI GI: 116202499 Blast Desc: CHGG_09134 [Chaetomium globosum CBS 148.51] gi|88177652|gb|EAQ85120.1| CHGG_09134 [Chaetomium globosum CBS 148.51]
  misc_feature (1)..(244): NCBI GI: 154304033 Blast Desc: BC1G_09652 [Botryotinia fuckeliana B05.10] gi|150854287|gb|EDN29479.1| BC1G_09652 [Botryotinia fuckeliana B05.10]
  misc_feature (1)..(244): NCBI GI: 156030675 Blast Desc: SS1G_14433 [Sclerotinia sclerotiorum 1980] gi|154700824|gb|EDO00563.1| SS1G_14433 [Sclerotinia sclerotiorum 1980]
  misc_feature (1)..(243): NCBI GI: 169610505 Blast Desc: SNOG_08352 [Phaeosphaeria nodorum SN15] gi|160702087|gb|EAT84628.2| SNOG_08352 [Phaeosphaeria nodorum SN15]
  misc_feature (1)..(243): NCBI GI: 189204320 Blast Desc: hydroxymethylglutaryl-CoA synthase [Pyrenophora tritici-repentis Pt-1C-BFP] gi|187985594|gb|EDU51082.1| hydroxymethylglutaryl-CoA synthase [Pyrenophora tritici-repentis
  misc_feature (1)..(243): SWISSPROT Homolog: EC 2.3.3.10 Hydroxymethylglutaryl-CoA synthase
  misc_feature: Useful for fungicidal and/or biocontrol applications
LNCYTEALDAAYRDYCKREARLQNGHANGAPADGKTPLDRFDYLAFHSPTCKTVQKSYARLLYHDYLNSPESPAFADVPGDIRDMDYHKSLTDKAIEKTFMGLTKKRFAERVSPAIQVATNCGNLYCGSLWSGLASIVAHVDSSALQGKKIGLFSYGSGLAASFMSMRVTGSTESIAKALDVPTKLAARRAVAPEGYEAFCDLRHQAHLQKNYEPKGDVSTLAPGTYYLEKVDDMFKRHYAVKA

SEQ ID NO: 19970 - DNA, 1207 bp, Muscodor strobelii
  misc_feature: SGI EST ID NO. CUFF.46701.0
  misc_feature: Variant of the nucleotide sequence at SEQ ID NO 19968
gctcaactgctacaccgaggccctcgacgccgcctaccgcgactactgcaagcgcgaggcccggctgcagaacggccacgccaacggcgcccccgccgacggcaagaccccgctcgaccgcttcgactacctggccttccactcgcccacctgcaagaccgtccagaagtcctacgcccgcctgctgtaccacgactacctgaacagccccgagagccccgccttcgccgacgtccccggcgacatccgcgacatggactaccacaagtccctcaccgacaaggccatcgagaagaccttcatgggcctgaccaagaagcgcttcgccgagcgtgtctcgcccgccatccaggtcgccactaactgcggcaacctgtactgcggcagcttgtggagcggcctcgccagcattgtcgcccacgtcgacagcagcgccctgcagggcaagaagatcggcctcttcagctacggctctggcctcgccgccagcttcatgtccatgcgtgtgaccggtagcacggaatccatcgccaaggctttggatgtccccaccaaactcgctgctcgccgcgctgtcgcccccgagggctacgaagctttctgcgacctgcgccaccaagctcatctccagaagaactacgagcccaagggcgacgtttccacgctagcccccggcacgtattacttggagaaggtcgacgacatgttcaagcgacactacgccgtcaaggcatagatctttataaataatgaggcatgaaaattcccgatcttggttcatcatagagcggcaccagatcataccattggtggttgtcatttagaatagtgcgtggctctcgggccattagatggtgcacatttgagccgcgcggcgattcatacaggaggctcgtatatagccagagtgcgaatgcgcacagctgcggcgctgaatagaagacagaataattgggctcgagtggcagagagagcaccgtcccaacttgtatataccacatgactactcaagtcatacgacgatgcatcgaaggcattataaacaatagaacatgaaacagatttctctgatactattctgaatccggcacatctcggcattcctgtacaagactagacgcatcattcactcagtctggatgctgtcgtaaataacccctagctgttccactcttagctctttgcttatataatagtctctagtccg

SEQ ID NO: 19971 - DNA, 2892 bp, Muscodor strobelii
  misc_feature: SGI cDNA ID NO. 566728
  misc_feature: Encodes the peptide sequence at SEQ ID NO 19972
atgaacatcgccctgggcggtatggccgccacagtcatacctcctcagtcctccacctcgcgcggcctgcccacgaatccggctcagggcgtcaggcgcattcctcccccgacctactccatgcccccgatcccccctccgcccattcctgagaaataccatgcctccaccaactccggctcgactctgtcggccaaagctcccatgtcttctgcccaggtcatcagcctcgccagcgctgccatgcaggccgctctgctcgagacgcagaaccagacggccgagtccaatgccgtcagcaacgagcagcaccggctaggggtcaccatcgacctcagccgcaagaacattgcctctctgccggatgaagtagttcagatcatcaagaacgacttggaacggcttgctctctcacataacaagatatcggcatttcccgctagcttctccgagtgtacctctctacgatatcttaacgttagacaaaaccagatcaaggagtttcccctcgctctatgtgacctgaaatcgctagagatactggatctcggccgcaatcagatccgtgtcattccaccggaagttgccaaaatgacatcgctgaaggtcttggcaatacccaagaaccagatagaagagctcccgctttgcctagcagacatggtctccttacaaagactgagggtggacggcaatcccattacgtttccgcctagagatatgttctcattctcagccaacagtccgcagagcgagaacttagatatcatcactacttccagggtcaaaaagtttctgaagcaacatgctattaatcttagtgaaagggagagggacgctgagcacggtggagatgagtctaatgatggtaccgaaacaccgagaatgcctttgaagagagtcgtctccggaagatttccgatacgtgtcaatggcaatgacatggtcgatcctcgttcgcctgccatccttcgaccgcctcccataccgaatcggtctcacgccagaggtttctcccaacagaccacagctatacgaaggcccagcgtgatgcctctcaccattggtaaccctaacgaacgtgtgcgctcgaacagtgagacggtgctgcaggccactcgaccagaacgcacatccgatcgcaataggcgtatgggcagcattttagcaaggcagcctagcgagctcggaacactggacgaaacacaggcaaacaatcgattcagccaccattatcgcggtctgagtcatggctcgtcgatgaccggcaccgctcttgtctcggctgcgtcgaccgtgagtcccaacagcccggccgagcctttgcttcagaggcctaactacgtccggcgactctctgtattgcctgaacaacgccgggaatccacggcaatggatccaatcgtcgaatcggccaagggcatactttactccattttccagatccatcatctggttcaacttgtcactcgattgactagcgacggcacgacgaaacggtcaagtctcgaaatcgtgttctacaatactaacggtcacgtcgaacagctcgagcaggaaatccaaaaacacgagactgccttcgaaaatggtgactacgcgcctcgtgagaatgagaacgtgcagagagctgttctcactctgatcaaggcatactgtcacatttgcagtctactggttagtaacatggacactatcgtcgagaatggtgatcctaggtatatccgcacgatgatgtcgaccttgtacaacagcataatggagcttcgtgtctcctcccatcagtgcgttaccggatatacgcctaattatggagcccatcgaccaaacctcaatgacaccattaaaccacactctcgtgagagctccatcaccccgaccaccggccgcagtaggccacggcctggaacctttatacacaatcccagcaatcttcgtgtgtcgacagacgcgccattgccgtacatcaatggctctggtcgaactgctcagatcacgtctgctactcctcgatcgggtgaatcgtttgcttcatcgagcacagacccccgatatcttgctgactactcagccgacgagcgtcagtttgagaagatcttcctatctcttcagaggtcaacggacttgcttactcgtacgctgccaaatctcaatgtgcagttcaacaatggcaaacggaccgcggatcttcacgggtcttccgatgttgtcatgaacagttggaatcttctgattgcaaaatgcacaattgctattaaggctaccgaagttcttaagggtcgtctttctatgatcaagctaaaagaaccagggatcagaaccgatgcaatattttggagtctttgcaatcatttggtttcatcgtggttcgagtttgcaaacatggtgaagcaaaccatggagcaggtcaagctgtccgtagaggttaagagccgcctacgacccattcagactagcatcaaagagactaatagcctcattatggcatctccgtggggagtccttttcaagcatactgggcaattctccgattcacggaatcatcatggatcaaaccactactcctccaactcgactaatacacactaccaattacccatgacgcctcaaagcgcagccctcggcccggcagttcaagccactgtgccgtcgacaccccagagtggctcgtttgacaaagccttcgctggaaacgtctttgaacgagctgatacattgatatcccaaggtggcttatccatgcccatctcacgcaccaataccatgaacagtgcgtccaccatatctctcaattccatcagctccatttcgtcggctggagattcgacaacgctcagtccgaacggaaacggagtctaccgatcgaacgctggaaacaagcctgcattctag

SEQ ID NO: 19972 - protein, 963 aa, Muscodor strobelii
  misc_feature: SGI Peptide ID NO. 566728
  misc_feature (59)..(914): NCBI GI: 256734665 Blast Desc: NECHADRAFT_31354 [Nectria haematococca mpVI 77-13-4]
  misc_feature (16)..(963): NCBI GI: 261357044 Blast Desc: conserved [Verticillium albo-atrum VaMs.102]
  misc_feature (59)..(947): NCBI GI: 171688894 Blast Desc: protein product [Podospora anserina] gi|170944409|emb|CAP70519.1| protein product [Podospora anserina]
  misc_feature (69)..(914): NCBI GI: 46107488 Blast Desc: FG00627.1 [Gibberella zeae PH-1]
  misc_feature (17)..(911): NCBI GI: 145608290 Blast Desc: MGG_03232 [Magnaporthe grisea 70-15] gi|145015777|gb|EDK00267.1| MGG_03232 [Magnaporthe grisea 70-15]
  misc_feature (21)..(948): NCBI GI: 164427358 Blast Desc: NCU03360 [Neurospora crassa OR74A] gi|157071710|gb|EAA27059.2| conserved [Neurospora crassa OR74A]
  misc_feature (73)..(948): NCBI GI: 28881137 Blast Desc: conserved [Neurospora crassa]
  misc_feature (59)..(908): NCBI GI: 116199867 Blast Desc: CHGG_08089 [Chaetomium globosum CBS 148.51] gi|88179368|gb|EAQ86836.1| CHGG_08089 [Chaetomium globosum CBS 148.51]
  misc_feature (50)..(924): NCBI GI: 156043509 Blast Desc: SS1G_10758 [Sclerotinia sclerotiorum 1980] gi|154695145|gb|EDN94883.1| SS1G_10758 [Sclerotinia sclerotiorum 1980]
  misc_feature (69)..(908): NCBI GI: 119501086 Blast Desc: cell morphogenesis protein Sog2, [Neosartorya fischeri NRRL 181] gi|119415465|gb|EAW25403.1| cell morphogenesis protein Sog2, [Neosartorya fischeri NRRL 181]
MNIALGGMAATVIPPQSSTSRGLPTNPAQGVRRIPPPTYSMPPIPPPPIPEKYHASTNSGSTLSAKAPMSSAQVISLASAAMQAALLETQNQTAESNAVSNEQHRLGVTIDLSRKNIASLPDEVVQIIKNDLERLALSHNKISAFPASFSECTSLRYLNVRQNQIKEFPLALCDLKSLEILDLGRNQIRVIPPEVAKMTSLKVLAIPKNQIEELPLCLADMVSLQRLRVDGNPITFPPRDMFSFSANSPQSENLDIITTSRVKKFLKQHAINLSERERDAEHGGDESNDGTETPRMPLKRVVSGRFPIRVNGNDMVDPRSPAILRPPPIPNRSHARGFSQQTTAIRRPSVMPLTIGNPNERVRSNSETVLQATRPERTSDRNRRMGSILARQPSELGTLDETQANNRFSHHYRGLSHGSSMTGTALVSAASTVSPNSPAEPLLQRPNYVRRLSVLPEQRRESTAMDPIVESAKGILYSIFQIHHLVQLVTRLTSDGTTKRSSLEIVFYNTNGHVEQLEQEIQKHETAFENGDYAPRENENVQRAVLTLIKAYCHICSLLVSNMDTIVENGDPRYIRTMMSTLYNSIMELRVSSHQCVTGYTPNYGAHRPNLNDTIKPHSRESSITPTTGRSRPRPGTFIHNPSNLRVSTDAPLPYINGSGRTAQITSATPRSGESFASSSTDPRYLADYSADERQFEKIFLSLQRSTDLLTRTLPNLNVQFNNGKRTADLHGSSDVVMNSWNLLIAKCTIAIKATEVLKGRLSMIKLKEPGIRTDAIFWSLCNHLVSSWFEFANMVKQTMEQVKLSVEVKSRLRPIQTSIKETNSLIMASPWGVLFKHTGQFSDSRNHHGSNHYSSNSTNTHYQLPMTPQSAALGPAVQATVPSTPQSGSFDKAFAGNVFERADTLISQGGLSMPISRTNTMNSASTISLNSISSISSAGDSTTLSPNGNGVYRSNAGNKPAF

SEQ ID NO: 19973 - DNA, 7981 bp, Muscodor strobelii
  misc_feature: SGI EST ID NO. CUFF.46892.0
  misc_feature: Variant of the nucleotide sequence at SEQ ID NO 19971
tttggagtcgccgccaagcaacttcagcactttgttgaaacactccgacagcccatccacacacctctacttgctgtgcatgtttggcctttgtaatatctgtgcctattgtatgtgtgtgcgggtctattgtgcagtcgtcgacatcatacatcatcgtcttgccgtgtacaataaacaaatcgtctcatctttctttgccactgccttcgccgtcgctgtctgaccacgctgcacacgttgacgacggcctccttgcgcatgccgcacccccaattggcctgatcctgatctccctgatcatacgcgccttctgccgtagcaaccggcgatccgcatctctcatctcgacggctcgaggccaaaccctgaaacgatcgccttgcctctttgtctcgcatccccatcccgtgtctacgtccctcgagccacgactgcattgctgccacgacccacgatcgctgcaacgagcgacatgaacatcgccctgggcggtatggccgccacagtcatacctcctcagtcctccacctcgcgcggcctgcccacgaatccggctcagggcgtcaggcgcattcctcccccgacctactccatgcccccgatcccccctccgcccattcctgagaaataccatgcctccaccaactccggctcgactctgtcggccaaagctcccatgtcttctgcccaggtcatcagcctcgccagcgctgccatgcaggccgctctgctcgagacgcagaaccagacggccgagtccaatgccgtcagcaacgagcagcaccggctaggggtcaccatcgacctcagccgcaagaacattgcctctctgccggatgaagtagttcagatcatcaagaacgacttggaacggcttgctctctcacataacaagatatcggcatttcccgctagcttctccgagtgtacctctctacgatatcttaacgttagacaaaaccagatcaaggagtttcccctcgctctatgtgacctgaaatcgctagagatactggatctcggccgcaatcagatccgtgtcattccaccggaagttgccaaaatgacatcgctgaaggtcttggcaatacccaagaaccagatagaagagctcccgctttgcctagcagacatggtctccttacaaagactgagggtggacggcaatcccattacgtttccgcctagagatatgttctcattctcagccaacagtccgcagagcgagaacttagatatcatcactacttccagggtcaaaaagtttctgaagcaacatgctattaatcttagtgaaagggagagggacgctgagcacggtggagatgagtctaatgatggtaccgaaacaccgagaatgcctttgaagagagtcgtctccggaagatttccgatacgtgtcaatggcaatgacatggtcgatcctcgttcgcctgccatccttcgaccgcctcccataccgaatcggtctcacgccagaggtttctcccaacagaccacagctatacgaaggcccagcgtgatgcctctcaccattggtaaccctaacgaacgtgtgcgctcgaacagtgagacggtgctgcaggccactcgaccagaacgcacatccgatcgcaataggcgtatgggcagcattttagcaaggcagcctagcgagctcggaacactggacgaaacacaggcaaacaatcgattcagccaccattatcgcggtctgagtcatggctcgtcgatgaccggcaccgctcttgtctcggctgcgtcgaccgtgagtcccaacagcccggccgagcctttgcttcagaggcctaactacgtccggcgactctctgtattgcctgaacaacgccgggaatccacggcaatggatccaatcgtcgaatcggccaagggcatactttactccattttccagatccatcatctggttcaacttgtcactcgattgactagcgacggcacgacgaaacggtcaagtctcgaaatcgtgttctacaatactaacggtcacgtcgaacagctcgagcaggaaatccaaaaacacgagactgccttcgaaaatggtgactacgcgcctcgtgagaatgagaacgtgcagagagctgttctcactctgatcaaggcatactgtcacatttgcagtctactggttagtaacatggacactatcgtcgagaatggtgatcctaggtatatccgcacgatgatgtcgaccttgtacaacagcataatggagcttcgtgtctcctcccatcagtgcgttaccggatatacgcctaattatggagcccatcgaccaaacctcaatgacaccattaaaccacactctcgtgagagctccatcaccccgaccaccggccgcagtaggccacggcctggaacctttatacacaatcccagcaatcttcgtgtgtcgacagacgcgccattgccgtacatcaatggctctggtcgaactgctcagatcacgtctgctactcctcgatcgggtgaatcgtttgcttcatcgagcacagacccccgatatcttgctgactactcagccgacgagcgtcagtttgagaagatcttcctatctcttcagaggtcaacggacttgcttactcgtacgctgccaaatctcaatgtgcagttcaacaatggcaaacggaccgcggatcttcacgggtcttccgatgttgtcatgaacagttggaatcttctgattgcaaaatgcacaattgctattaaggctaccgaagttcttaagggtcgtctttctatgatcaagctaaaagaaccagggatcagaaccgatgcaatattttggagtctttgcaatcatttggtttcatcgtggttcgagtttgcaaacatggtgaagcaaaccatggagcaggtcaagctgtccgtagaggttaagagccgcctacgacccattcagactagcatcaaagagactaatagcctcattatggcatctccgtggggagtccttttcaagcatactgggcaattctccgattcacggaatcatcatggatcaaaccactactcctccaactcgactaatacacactaccaattacccatgacgcctcaaagcgcagccctcggcccggcagttcaagccactgtgccgtcgacaccccagagtggctcgtttgacaaagccttcgctggaaacgtctttgaacgagctgatacattgatatcccaaggtggcttatccatgcccatctcacgcaccaataccatgaacagtgcgtccaccatatctctcaattccatcagctccatttcgtcggctggagattcgacaacgctcagtccgaacggaaacggagtctaccgatcgaacgctggaaacaagcctgcattctaggtgagtgtagccttgtctctccgacgacggagacgatatcacagcgtttagtggcacaatgccctaatcaaatgcgctcgcagctgggccgctgccatccgacacacctagttacgtacctattaccgcgagcatcgacgtcgctctagtggcttgggtttttccaattttgaagacatcaatccccggacgcaagtgcatacggttcgggtccattggcgcggactcatctcttgtttagcatgatgcatataaacgcggagtcctggatatggaaacggcgtttacgaaggaagtcatcatggatcgagggcagtttgcccaaacgagggtctaccaaaagatccccaaaacatagatgtctccagggtctacagatggcccatgggaaacggaggaaacttaatgtaaatctgtcaaattataatgtgtgcaatacccagagacgaccttgctaaaggttattcaaaagacattaagctctgaacatatctgattttctatgagaaggtgaatgctttctgtcttgtgatacgtaagagtaacacgattccgctcccctgtcgatctaccataccatcaatgttctgtttgtggaagcattcaatacgcccctatgtctatggctactacatttatacgcatgcaaatggtttatatcctcgctctcgtcttatctcgtaatttccagcgatctcatctctacagttcaagtcaggacctacttcatcgtgaccatttcctcagcagccgtggggtggatagcaacgcaggaatcgagatccttcttcgtagcgcccatcttgacagcgacgccgaaaccttgcaggacctcagaggaaccacggcccatgatatgtataccgacgactttctcctcgggaccggtgcagatgaccttgtagcgggagaagggcttgtcttcttgcttcagtacggtgtagtacaggtcgatgaagttcgatgtgtagactgtcacgttgtccttgccgaacttctcgatggcttggggctcggtgagtccgatggatcctacttcggggtgcgcgaatacgacggaggggatgttgtcgtaggatacgtgggctgcggagaattgttcgggcccgtagaggcgctctgcgaggcgccggccggcggcgatggcgacgggtgttagctcgacgttaccgcagacgtcgccgatggcgaagatgctgtctacgtttgttgattggtatttatctacaactacgtggcccttttcgttggtcttcacgccggccgaatcgagaccgagcttgtcggtctcgggcacgcggccaatggcccagattaggtggtcgatgtcggagatggagccggagccgttcgagtccttgtactcgagtgtgagcttgccgttgctgtccttttcgaccttggtttgtgtcgattccttgtgtagatgtacgcccatcttctcgtagttggctgtcacgtgctcttggatcatagggtcgaaggttcggaggaaggtcttgtggcggatgaagagatgggtctcgacgccgagcgcgttgaacatgccggcgaactcaacggcgatgtatccagcgccaacgagcacgactttcttaggcagatcggcgatgtcgaagaagccatcgctgttgatgccgagctcggcaccgggaatatcgggaggagaggctggacggccacccacggcgatcagaatacggtttgcgcgtaccgtcgagacggagccgtcttcgcctgtgatctcgacctcgttcttagagataagcttggcgcggccggcgacgtactcgaccttatcgttggccaggttgcgctcgtaaatgccattgagacgcttgatggtgctgtctcgcttctccttgaaggtgggccagtcgaagggtttctcctccttcatgtggaagccgtaggctttgctctcgtgtatcgactcggcgatggcagcggcgttgaaagtgatcttcttcggtacgcagctgtgaggcatattagtctctacaagtctttcactctaatactcttatacattgacttcattaacttagcttaccctacgttcacgcatgtacctcccaaacggccagactcgacgatcatggcctttgctccgaacttggcgcctgccatgcgtgcagcaccgagaccaccactgccaccgccgatgacgaggaaatcggtctccttggatatgggagccatgatgtgggatgtggaggagaattgcctagtaagggaggatatgcgcgaggcagccgtgtttgcgaaagacagaggaatcttcttggaagcaatattgacagtagtagcagaagcaactgaaagtcttcccacaaacgcaaaggcttgcattacccttttttatatatgtctgctgacagagcaaaggagcgctacaaagcaatggcgggggaggggtgcagaagcggggatgacgtcttatatgatatgtctgttgtctcccggctggcatccaatgtatgtacgttactgtatgtacctaatttagctgcgtcgtctgtttctcttgccacaaaaagggactcgacagatcgcgaaagaaactattgggtaggcgacgggctgttgtgttagcccgagcggtgggatgtcaaatagtaatacaaatgattgtacagcaaatgcgatgatgcttgtaaaacgacgtcggctcctgcaagactaaggcaggtagggtagctttggaatccacgcaaggcttaattaatgaccgtcaagtatctgaggaaaaaagactgcttatccagataaaaagacacaagaccctggccctcgacaagcagcagacatcccgtccagagcaggggctgtcttcgggacgagagatccatcatccatgcgatgcgacccttgagctccaccggctcgagtgcaaatggcgcgcccaccctaacatgagctaaaattcccgactattcctagcggctcgacggcctttttatgtaatcacagtgcagatttgtaatctttgcgcgaccatcctgacggtcgccagagccactctatctgcctcggtttggtccagaaacgaagaattgaaatggcaataagtcgcatgctttgcccggcgaagggaagagttgacattgcctaaagctgcggcggggaggagcgggatttggaatcacgcctatccgttgatctattagcacaggccgagaagcgatcatgaacatgagacatagcagacgcgcactgggtcagcagtatgcatgaagccatcaacgccccctgttcacgcgtcgagacgactctacatcgaataattgtgttcgatatgtatcccaagggtgaaatcacattgcttcgggaacaaccgaaacgagggcgctttaattgcggctgcaagagcatgaattggttccattgccgcattacttagagattgccaagatgcccacgtcaacactgaacaatttgtcaaagctacgccttgcagagctcaagaacatcgccctctattgtggtttaccacggactggcacaaagccggagttagtcaaacgtctacaatctgtccagagtgccattacacccgcggtgcagtccaagacttcgacgggccccgttgtgctcagtatcgacctcggcatccggaacttcgccttcagccttatgacactcgctccctccggagactccacctcaggcacaaaaggaaagaagcggaagagcaaggagcttcaaacgccagtcttgggaatcaaggccactgatccagtggcaatcaaactatacgcatggcagcggctgtcacttcttgagccgtcgggaggcttggtctcaccaatcaatgaccaagatgatccctctttgaagccggaggcgccagacttcagtcctccggctctggccaagattaccaacacattcttacaagatacagtgttgcgtctcaatcctctcccgacgcacattctcatagagcggcagagatggcgcaccctcggcgggtcgagcatcctggaatggactttgcgcgtgaatacgctcgaggcgatgctccacgcatcgttgcagactcttcgtgatgtagggatgtggaagggagaggtggaatcgatactacctggagctatctctcgactatttctcgagtcagatgagtttcgatcgaaatatgtagaggagctccccgacagcatcgatgagtcagatgggccggccagaaagaaactgagagggcccaaaactcaagcatcaaaaaatcgtgcttcgtaccttgagaaaaaggtggtgaagataaatctcttgcgccaatggcttaatgaacatgaaggcttagtacaaccccagattcccgaagttcagcaaatgctcgaaatgtatcaggagatagcggatggtaaaagtcgaaagaaagagccaaaggtcgacaccaagttagacgatattacggacagtttactacagggaattgcatggttacgttggcgtgagaatcgagctctgtttgcacagcatggtccagcgcgactcttggatccgagatagagcatagatcatactgtaataagagaatttcactaatgcaacaagacaatagagatctagccatagcaagtcatttcgataataatgccaagtaaattc

SEQ ID NO: 19974 - DNA, 1407 bp, Muscodor strobelii
  misc_feature: SGI cDNA ID NO. 566729
  misc_feature: Encodes the peptide sequence at SEQ ID NO 19975
atggctcccatatccaaggagaccgatttcctcgtcatcggcggtggcagtggtggtctcggtgctgcacgcatggcaggcgccaagttcggagcaaaggccatgatcgtcgagtctggccgtttgggaggtacatgcgtgaacgtaggctgcgtaccgaagaagatcactttcaacgccgctgccatcgccgagtcgatacacgagagcaaagcctacggcttccacatgaaggaggagaaacccttcgactggcccaccttcaaggagaagcgagacagcaccatcaagcgtctcaatggcatttacgagcgcaacctggccaacgataaggtcgagtacgtcgccggccgcgccaagcttatctctaagaacgaggtcgagatcacaggcgaagacggctccgtctcgacggtacgcgcaaaccgtattctgatcgccgtgggtggccgtccagcctctcctcccgatattcccggtgccgagctcggcatcaacagcgatggcttcttcgacatcgccgatctgcctaagaaagtcgtgctcgttggcgctggatacatcgccgttgagttcgccggcatgttcaacgcgctcggcgtcgagacccatctcttcatccgccacaagaccttcctccgaaccttcgaccctatgatccaagagcacgtgacagccaactacgagaagatgggcgtacatctacacaaggaatcgacacaaaccaaggtcgaaaaggacagcaacggcaagctcacactcgagtacaaggactcgaacggctccggctccatctccgacatcgaccacctaatctgggccattggccgcgtgcccgagaccgacaagctcggtctcgattcggccggcgtgaagaccaacgaaaagggccacgtagttgtagataaataccaatcaacaaacgtagacagcatcttcgccatcggcgacgtctgcggtaacgtcgagctaacacccgtcgccatcgccgccggccggcgcctcgcagagcgcctctacgggcccgaacaattctccgcagcccacgtatcctacgacaacatcccctccgtcgtattcgcgcaccccgaagtaggatccatcggactcaccgagccccaagccatcgagaagttcggcaaggacaacgtgacagtctacacatcgaacttcatcgacctgtactacaccgtactgaagcaagaagacaagcccttctcccgctacaaggtcatctgcaccggtcccgaggagaaagtcgtcggtatacatatcatgggccgtggttcctctgaggtcctgcaaggtttcggcgtcgctgtcaagatgggcgctacgaagaaggatctcgattcctgcgttgctatccaccccacggctgctgaggaaatggtcacgatgaagtag

SEQ ID NO: 19975 - protein, 468 aa, Muscodor strobelii
  misc_feature: SGI Peptide ID NO. 566729
  misc_feature (179)..(276): Pfam Id: PF00070 Pfam Desc: Pyridine nucleotide-disulphide oxidoreductase
  misc_feature (9)..(322): Pfam Id: PF07992 Pfam Desc: Pyridine nucleotide-disulphide oxidoreductase
  misc_feature (355)..(468): Pfam Id: PF02852 Pfam Desc: Pyridine nucleotide-disulphide oxidoreductase, dimerisation domain
  misc_feature (1)..(467): NCBI GI: 145608286 Blast Desc: MGG_12749 [Magnaporthe grisea 70-15] gi|145015774|gb|EDK00264.1| MGG_12749 [Magnaporthe grisea 70-15]
  misc_feature (1)..(468): NCBI GI: 25284963 Blast Desc: MGG_12749 [Magnaporthe grisea 70-15] gi|145015774|gb|EDK00264.1| MGG_12749 [Magnaporthe grisea 70-15]
  misc_feature (1)..(468): NCBI GI: 171688950 Blast Desc: protein product [Podospora anserina] gi|170944437|emb|CAP70548.1| protein product [Podospora anserina]
  misc_feature (1)..(468): NCBI GI: 85079936 Blast Desc: glutathione reductase [Neurospora crassa OR74A] gi|54036037|sp|Q873E8.1|GSHR_NEUCR RecName: Full=Glutathione reductase; Short=GRase; Short=GR gi|28881178|emb|CAD70360.1|
  misc_feature (1)..(468): NCBI GI: 256732538 Blast Desc: [Nectria haematococca mpVI 77-13-4]
  misc_feature (1)..(468): NCBI GI: 261357046 Blast Desc: glutathione reductase [Verticillium albo-atrum VaMs.102]
  misc_feature (1)..(468): NCBI GI: 46121609 Blast Desc: FG05183.1 [Gibberella zeae PH-1]
  misc_feature (1)..(468): NCBI GI: 154291666 Blast Desc: BC1G_15101 [Botryotinia fuckeliana B05.10] gi|150846682|gb|EDN21875.1| BC1G_15101 [Botryotinia fuckeliana B05.10]
  misc_feature (1)..(427): NCBI GI: 116199861 Blast Desc: CHGG_08086 [Chaetomium globosum CBS 148.51] gi|88179365|gb|EAQ86833.1| CHGG_08086 [Chaetomium globosum CBS 148.51]
  misc_feature (1)..(468): NCBI GI: 145235197 Blast Desc: An03g03660 [Aspergillus niger] gi|134057928|emb|CAK47805.1| protein product [Aspergillus niger]
  misc_feature (1)..(468): SWISSPROT Homolog: EC 1.8.1.7 Glutathione-disulfide reductase
MAPISKETDFLVIGGGSGGLGAARMAGAKFGAKAMIVESGRLGGTCVNVGCVPKKITFNAAAIAESIHESKAYGFHMKEEKPFDWPTFKEKRDSTIKRLNGIYERNLANDKVEYVAGRAKLISKNEVEITGEDGSVSTVRANRILIAVGGRPASPPDIPGAELGINSDGFFDIADLPKKVVLVGAGYIAVEFAGMFNALGVETHLFIRHKTFLRTFDPMIQEHVTANYEKMGVHLHKESTQTKVEKDSNGKLTLEYKDSNGSGSISDIDHLIWAIGRVPETDKLGLDSAGVKTNEKGHVVVDKYQSTNVDSIFAIGDVCGNVELTPVAIAAGRRLAERLYGPEQFSAAHVSYDNIPSVVFAHPEVGSIGLTEPQAIEKFGKDNVTVYTSNFIDLYYTVLKQEDKPFSRYKVICTGPEEKVVGIHIMGRGSSEVLQGFGVAVKMGATKKDLDSCVAIHPTAAEEMVTMK

SEQ ID NO: 19976 - DNA, 6928 bp, Muscodor strobelii
  misc_feature: SGI EST ID NO. CUFF.46893.1
  misc_feature: Variant of the nucleotide sequence at SEQ ID NO 19974
atttacttggcattattatcgaaatgacttgctatggctagatctctattgtcttgttgcattagtgaaattctcttattacagtatgatctatgctctatctcggatccaagagtcgcgctggaccatgctgtgcaaacagagctcgattctcacgccaacgtaaccatgcaattccctgtagtaaactgtccgtaatatcgtctaacttggtgtcgacctttggctctttctttcgacttttaccatccgctatctcctgatacatttcgagcatttgctgaacttcgggaatctggggttgtactaagccttcatgttcattaagccattggcgcaagagatttatcttcaccacctttttctcaaggtacgaagcacgattttttgatgcttgagttttgggccctctcagtttctttctggccggcccatctgactcatcgatgctgtcggggagctcctctacatatttcgatcgaaactcatctgactcgagaaatagtcgagagatagctccaggtagtatcgattccacctctcccttccacatccctacatcacgaagagtctgcaacgatgcgtggagcatcgcctcgagcgtattcacgcgcaaagtccattccaggatgctcgacccgccgagggtgcgccatctctgccgctctatgagaatgtgcgtcgggagaggattgagacgcaacactgtatcttgtaagaatgtgttggtaatcttggccagagccggaggactgaagtctggcgcctccggcttcaaagagggatcatcttggtcattgattggtgagaccaagcctcccgacggctcaagaagtgacagccgctgccatgcgtatagtttgattgccactggatcagtggccttgattcccaagactggcgtttgaagctccttgctcttccgcttctttccttttgtgcctgaggtggagtctccggagggagcgagtgtcataaggctgaaggcgaagttccggatgccgaggtcgatactgagcacaacggggcccgtcgaagtcttggactgcaccgcgggtgtaatggcactctggacagattgtagacgtttgactaactccggctttgtgccagtccgtggtaaaccacaatagagggcgatgttcttgagctctgcaaggcgtagctttgacaaattgttcagtgttgacgtgggcatcttggcaatctctaagtaatgcggcaatggaaccaattcatgctcttgcagccgcaattaaagcgccctcgtttcggttgttcccgaagcaatgtgatttcacccttgggatacatatcgaacacaattattcgatgtagagtcgtctcgacgcgtgaacagggggcgttgatggcttcatgcatactgctgacccagtgcgcgtctgctatgtctcatgttcatgatcgcttctcggcctgtgctaatagatcaacggataggcgtgattccaaatcccgctcctccccgccgcagctttaggcaatgtcaactcttcccttcgccgggcaaagcatgcgacttattgccatttcaattcttcgtttctggaccaaaccgaggcagatagagtggctctggcgaccgtcaggatggtcgcgcaaagattacaaatctgcactgtgattacataaaaaggccgtcgagccgctaggaatagtcgggaattttagctcatgttagggtgggcgcgccatttgcactcgagccggtggagctcaagggtcgcatcgcatggatgatggatctctcgtcccgaagacagcccctgctctggacgggatgtctgctgcttgtcgagggccagggtcttgtgtctttttatctggataagcagtcttttttcctcagatacttgacggtcattaattaagccttgcgtggattccaaagctaccctacctgccttagtcttgcaggagccgacgtcgttttacaagcatcatcgcatttgctgtacaatcatttgtattactatttgacatcccaccgctcgggctaacacaacagcccgtcgcctacccaatagtttctttcgcgatctgtcgagtccctttttgtggcaagagaaacagacgacgcagctaaattaggtacatacagtaacgtacatacattggatgccagccgggagacaacagacatatcatataagacgtcatccccgcttctgcacccctcccccgccattgctttgtagcgctcctttgctctgtcagcagacatatataaaaaagggtaatgcaagcctttgcgtttgtgggaagactttcagttgcttctgctactactgtcaatattgcttccaagaagattcctctgtctttcgcaaacacggctgcctcgcgcatatcctcccttactaggcaattctcctccacatcccacatcatggctcccatatccaaggagaccgatttcctcgtcatcggcggtggcagtggtggtctcggtgctgcacgcatggcaggcgccaagttcggagcaaaggccatgatcgtcgagtctggccgtttgggaggtacatgcgtgaacgtaggctgcgtaccgaagaagatcactttcaacgccgctgccatcgccgagtcgatacacgagagcaaagcctacggcttccacatgaaggaggagaaacccttcgactggcccaccttcaaggagaagcgagacagcaccatcaagcgtctcaatggcatttacgagcgcaacctggccaacgataaggtcgagtacgtcgccggccgcgccaagcttatctctaagaacgaggtcgagatcacaggcgaagacggctccgtctcgacggtacgcgcaaaccgtattctgatcgccgtgggtggccgtccagcctctcctcccgatattcccggtgccgagctcggcatcaacagcgatggcttcttcgacatcgccgatctgcctaagaaagtcgtgctcgttggcgctggatacatcgccgttgagttcgccggcatgttcaacgcgctcggcgtcgagacccatctcttcatccgccacaagaccttcctccgaaccttcgaccctatgatccaagagcacgtgacagccaactacgagaagatgggcgtacatctacacaaggaatcgacacaaaccaaggtcgaaaaggacagcaacggcaagctcacactcgagtacaaggactcgaacggctccggctccatctccgacatcgaccacctaatctgggccattggccgcgtgcccgagaccgacaagctcggtctcgattcggccggcgtgaagaccaacgaaaagggccacgtagttgtagataaataccaatcaacaaacgtagacagcatcttcgccatcggcgacgtctgcggtaacgtcgagctaacacccgtcgccatcgccgccggccggcgcctcgcagagcgcctctacgggcccgaacaattctccgcagcccacgtatcctacgacaacatcccctccgtcgtattcgcgcaccccgaagtaggatccatcggactcaccgagccccaagccatcgagaagttcggcaaggacaacgtgacagtctacacatcgaacttcatcgacctgtactacaccgtactgaagcaagaagacaagcccttctcccgctacaaggtcatctgcaccggtcccgaggagaaagtcgtcggtatacatatcatgggccgtggttcctctgaggtcctgcaaggtttcggcgtcgctgtcaagatgggcgctacgaagaaggatctcgattcctgcgttgctatccaccccacggctgctgaggaaatggtcacgatgaagtaggtcctgacttgaactgtagagatgagatcgctggaaattacgagataagacgagagcgaggatataaaccatttgcatgcgtataaatgtagtagccatagacataggggcgtattgaatgcttccacaaacagaacattgatggtatggtagatcgacaggggagcggaatcgtgttactcttacgtatcacaagacagaaagcattcaccttctcatagaaaatcagatatgttcagagcttaatgtcttttgaataacctttagcaaggtcgtctctgggtattgcacacattataatttgacagatttacattaagtttcctccgtttcccatgggccatctgtagaccctggagacatctatgttttggggatcttttggtagaccctcgtttgggcaaactgccctcgatccatgatgacttccttcgtaaacgccgtttccatatccaggactccgcgtttatatgcatcatgctaaacaagagatgagtccgcgccaatggacccgaaccgtatgcacttgcgtccggggattgatgtcttcaaaattggaaaaacccaagccactagagcgacgtcgatgctcgcggtaataggtacgtaactaggtgtgtcggatggcagcggcccagctgcgagcgcatttgattagggcattgtgccactaaacgctgtgatatcgtctccgtcgtcggagagacaaggctacactcacctagaatgcaggcttgtttccagcgttcgatcggtagactccgtttccgttcggactgagcgttgtcgaatctccagccgacgaaatggagctgatggaattgagagatatggtggacgcactgttcatggtattggtgcgtgagatgggcatggataagccaccttgggatatcaatgtatcagctcgttcaaagacgtttccagcgaaggctttgtcaaacgagccactctggggtgtcgacggcacagtggcttgaactgccgggccgagggctgcgctttgaggcgtcatgggtaattggtagtgtgtattagtcgagttggaggagtagtggtttgatccatgatgattccgtgaatcggagaattgcccagtatgcttgaaaaggactccccacggagatgccataatgaggctattagtctctttgatgctagtctgaatgggtcgtaggcggctcttaacctctacggacagcttgacctgctccatggtttgcttcaccatgtttgcaaactcgaaccacgatgaaaccaaatgattgcaaagactccaaaatattgcatcggttctgatccctggttcttttagcttgatcatagaaagacgacccttaagaacttcggtagccttaatagcaattgtgcattttgcaatcagaagattccaactgttcatgacaacatcggaagacccgtgaagatccgcggtccgtttgccattgttgaactgcacattgagatttggcagcgtacgagtaagcaagtccgttgacctctgaagagataggaagatcttctcaaactgacgctcgtcggctgagtagtcagcaagatatcgggggtctgtgctcgatgaagcaaacgattcacccgatcgaggagtagcagacgtgatctgagcagttcgaccagagccattgatgtacggcaatggcgcgtctgtcgacacacgaagattgctgggattgtgtataaaggttccaggccgtggcctactgcggccggtggtcggggtgatggagctctcacgagagtgtggtttaatggtgtcattgaggtttggtcgatgggctccataattaggcgtatatccggtaacgcactgatgggaggagacacgaagctccattatgctgttgtacaaggtcgacatcatcgtgcggatatacctaggatcaccattctcgacgatagtgtccatgttactaaccagtagactgcaaatgtgacagtatgccttgatcagagtgagaacagctctctgcacgttctcattctcacgaggcgcgtagtcaccattttcgaaggcagtctcgtgtttttggatttcctgctcgagctgttcgacgtgaccgttagtattgtagaacacgatttcgagacttgaccgtttcgtcgtgccgtcgctagtcaatcgagtgacaagttgaaccagatgatggatctggaaaatggagtaaagtatgcccttggccgattcgacgattggatccattgccgtggattcccggcgttgttcaggcaatacagagagtcgccggacgtagttaggcctctgaagcaaaggctcggccgggctgttgggactcacggtcgacgcagccgagacaagagcggtgccggtcatcgacgagccatgactcagaccgcgataatggtggctgaatcgattgtttgcctgtgtttcgtccagtgttccgagctcgctaggctgccttgctaaaatgctgcccatacgcctattgcgatcggatgtgcgttctggtcgagtggcctgcagcaccgtctcactgttcgagcgcacacgttcgttagggttaccaatggtgagaggcatcacgctgggccttcgtatagctgtggtctgttgggagaaacctctggcgtgagaccgattcggtatgggaggcggtcgaaggatggcaggcgaacgaggatcgaccatgtcattgccattgacacgtatcggaaatcttccggagacgactctcttcaaaggcattctcggtgtttcggtaccatcattagactcatctccaccgtgctcagcgtccctctccctttcactaagattaatagcatgttgcttcagaaactttttgaccctggaagtagtgatgatatctaagttctcgctctgcggactgttggctgagaatgagaacatatctctaggcggaaacgtaatgggattgccgtccaccctcagtctttgtaaggagaccatgtctgctaggcaaagcgggagctcttctatctggttcttgggtattgccaagaccttcagcgatgtcattttggcaacttccggtggaatgacacggatctgattgcggccgagatccagtatctctagcgatttcaggtcacatagctgccaggtcg

SEQ ID NO: 19977 - DNA, 1101 bp, Muscodor strobelii
  misc_feature: SGI cDNA ID NO. 566730
  misc_feature: Encodes the peptide sequence at SEQ ID NO 19978
atgcccacgtcaacactgaacaatttgtcaaagctacgccttgcagagctcaagaacatcgccctctattgtggtttaccacggactggcacaaagccggagttagtcaaacgtctacaatctgtccagagtgccattacacccgcggtgcagtccaagacttcgacgggccccgttgtgctcagtatcgacctcggcatccggaacttcgccttcagccttatgacactcgctccctccggagactccacctcaggcacaaaaggaaagaagcggaagagcaaggagcttcaaacgccagtcttgggaatcaaggccactgatccagtggcaatcaaactatacgcatggcagcggctgtcacttcttgagccgtcgggaggcttggtctcaccaatcaatgaccaagatgatccctctttgaagccggaggcgccagacttcagtcctccggctctggccaagattaccaacacattcttacaagatacagtgttgcgtctcaatcctctcccgacgcacattctcatagagcggcagagatggcgcaccctcggcgggtcgagcatcctggaatggactttgcgcgtgaatacgctcgaggcgatgctccacgcatcgttgcagactcttcgtgatgtagggatgtggaagggagaggtggaatcgatactacctggagctatctctcgactatttctcgagtcagatgagtttcgatcgaaatatgtagaggagctccccgacagcatcgatgagtcagatgggccggccagaaagaaactgagagggcccaaaactcaagcatcaaaaaatcgtgcttcgtaccttgagaaaaaggtggtgaagataaatctcttgcgccaatggcttaatgaacatgaaggcttagtacaaccccagattcccgaagttcagcaaatgctcgaaatgtatcaggagatagcggatggtaaaagtcgaaagaaagagccaaaggtcgacaccaagttagacgatattacggacagtttactacagggaattgcatggttacgttggcgtgagaatcgagctctgtttgcacagcatggtccagcgcgactcttggatccgagatag

SEQ ID NO: 19978 - protein, 366 aa, Muscodor strobelii
  misc_feature: SGI Peptide ID NO. 566730
  misc_feature (9)..(43): Pfam Id: PF02037 Pfam Desc: SAP domain
  misc_feature (60)..(354): Pfam Id: PF09159 Pfam Desc: Mitochondrial resolvase Ydc2, catalytic
  misc_feature (60)..(226): Pfam Id: PF09159 Pfam Desc: Mitochondrial resolvase Ydc2, catalytic
  misc_feature (327)..(354): Pfam Id: PF09159 Pfam Desc: Mitochondrial resolvase Ydc2, catalytic
  misc_feature (10)..(364): NCBI GI: 156043437 Blast Desc: SS1G_10722 [Sclerotinia sclerotiorum 1980] gi|154695109|gb|EDN94847.1| SS1G_10722 [Sclerotinia sclerotiorum 1980]
  misc_feature (10)..(364): NCBI GI: 154291668 Blast Desc: BC1G_15102 [Botryotinia fuckeliana B05.10] gi|150846683|gb|EDN21876.1| BC1G_15102 [Botryotinia fuckeliana B05.10]
  misc_feature (6)..(358): NCBI GI: 39942308 Blast Desc: MGG_03234 [Magnaporthe grisea 70-15] gi|145015775|gb|EDK00265.1| MGG_03234 [Magnaporthe grisea 70-15]
  misc_feature (1)..(350): NCBI GI: 171688952 Blast Desc: protein product [Podospora anserina] gi|170944438|emb|CAP70549.1| protein product [Podospora anserina]
  misc_feature (9)..(342): NCBI GI: 145256848 Blast Desc: An04g01680 [Aspergillus niger] gi|134058445|emb|CAK47932.1| protein product [Aspergillus niger]
  misc_feature (17)..(350): NCBI GI: 116199863 Blast Desc: CHGG_08087 [Chaetomium globosum CBS 148.51] gi|88179366|gb|EAQ86834.1| CHGG_08087 [Chaetomium globosum CBS 148.51]
  misc_feature (9)..(362): NCBI GI: 169773757 Blast Desc: [Aspergillus oryzae RIB40] gi|83769208|dbj|BAE59345.1| protein product [Aspergillus oryzae]
  misc_feature (4)..(358): NCBI GI: 119501080 Blast Desc: NFIA_108930 [Neosartorya fischeri NRRL 181] gi|119415462|gb|EAW25400.1| conserved [Neosartorya fischeri NRRL 181]
  misc_feature (9)..(352): NCBI GI: 242766513 Blast Desc: conserved [Talaromyces stipitatus ATCC 10500] gi|218724381|gb|EED23798.1| conserved [Talaromyces stipitatus ATCC 10500]
  misc_feature (9)..(362): NCBI GI: 238491774 Blast Desc: conserved [Aspergillus flavus NRRL3357] gi|220697537|gb|EED53878.1| conserved [Aspergillus flavus NRRL3357]
MPTSTLNNLSKLRLAELKNIALYCGLPRTGTKPELVKRLQSVQSAITPAVQSKTSTGPVVLSIDLGIRNFAFSLMTLAPSGDSTSGTKGKKRKSKELQTPVLGIKATDPVAIKLYAWQRLSLLEPSGGLVSPINDQDDPSLKPEAPDFSPPALAKITNTFLQDTVLRLNPLPTHILIERQRWRTLGGSSILEWTLRVNTLEAMLHASLQTLRDVGMWKGEVESILPGAISRLFLESDEFRSKYVEELPDSIDESDGPARKKLRGPKTQASKNRASYLEKKVVKINLLRQWLNEHEGLVQPQIPEVQQMLEMYQEIADGKSRKKEPKVDTKLDDITDSLLQGIAWLRWRENRALFAQHGPARLLDPR

SEQ ID NO: 19979 - DNA, 7981 bp, Muscodor strobelii; identical to SEQ ID NO: 19973
  misc_feature: SGI EST ID NO. CUFF.46892.0
  misc_feature: Variant of the nucleotide sequence at SEQ ID NO 19977

SEQ ID NO: 19980 - DNA, 465 bp, Muscodor strobelii
  misc_feature: SGI cDNA ID NO. 566731
  misc_feature: Encodes the peptide sequence at SEQ ID NO 19981
atgcgtttcatctttgctgtacaagtctgggcttttgtccaaattgctgctgccatcccacctgcctgcctcctctcggcactgggacgtggtgtccaggggaacccggcgaacgtcaaagacgtatgcaagcagtttcaacgagctgtcttgaccaacatgacggacgcgtgtcgtccgcccgacgctctgtcctcggcttacgctgtttactcgtccaagtgcgctgaagagggcatcaccgtcgctaaattgcccacttctacggtcaccatgactgtaaccgctacttcgactaccagcatctccgtcatctctccggcaaccacgagccccgccgagtccggttcggaaacgtcttctgctcccgagccgactgacatcgacaactctggctccgtcttcggtgtttgcatgtttgagcatatggttgagattatggttatgggtttgtttgtgctctga

SEQ ID NO: 19981 - protein, 154 aa, Muscodor strobelii
  misc_feature: SGI Peptide ID NO. 566731
  misc_feature (2)..(89): NCBI GI: 40548865 Blast Desc: GPI-anchored cell wall protein [Paracoccidioides brasiliensis] gi|226281834|gb|EEH37400.1| PAAG_07681 [Paracoccidioides brasiliensis Pb01]
  misc_feature (2)..(133): NCBI GI: 119188103 Blast Desc: [Coccidioides immitis RS]
  misc_feature (2)..(89): NCBI GI: 226293010 Blast Desc: PADG_04509 [Paracoccidioides brasiliensis Pb18]
  misc_feature (18)..(77): NCBI GI: 154316861 Blast Desc: [Botryotinia fuckeliana B05.10] gi|150845460|gb|EDN20653.1| [Botryotinia fuckeliana B05.10]
  misc_feature (2)..(89): NCBI GI: 225683655 Blast Desc: PABG_04150 [Paracoccidioides brasiliensis Pb03]
  misc_feature (20)..(88): NCBI GI: 261357047 Blast Desc: [Verticillium albo-atrum VaMs.102]
  misc_feature (15)..(101): NCBI GI: 121706586 Blast Desc: ACLA_045940 [Aspergillus clavatus NRRL 1] gi|119399703|gb|EAW10129.1| ACLA_045940 [Aspergillus clavatus NRRL 1]
MRFIFAVQVWAFVQIAAAIPPACLLSALGRGVQGNPANVKDVCKQFQRAVLTNMTDACRPPDALSSAYAVYSSKCAEEGITVAKLPTSTVTMTVTATSTTSISVISPATTSPAESGSETSSAPEPTDIDNSGSVFGVCMFEHMVEIMVMGLFVL

SEQ ID NO: 19982 - DNA, 786 bp, Muscodor strobelii
  misc_feature: SGI cDNA ID NO. 566732
  misc_feature: Encodes the peptide sequence at SEQ ID NO 19983
atgcacaccaaattcaccaaacccattccactgtggatgcacagattgcgaaacgatcagattctacatgatgtctatgcctatttcaatactcaagccatcaaaggctacaaaaaggactggcccggcaccgtcacgatcgccagaggagatatttcctctatctcttacaagagcaggatgtcaacatgcgagaatacgaagtacaataagaacactgcgtatttatttcctggaccaaatcatgacctagcagccgatcagagggatggagcatccgacatgaacctcactcttgaaataaagggagaagaagccgtggaaagtaatcggatagacaaaaagatctcccagttggcatcgaagaacgtcagcttcagcggcaatctaactgagtcaatattggaaccagacatgccaacatatatctggaagaacgaagggaccgaaatcgagcgggacattagagcacgatttggtgatggaaccaacatatggtatgaaagtaaatgtgaacagggctacaaaagggatgtcattcggatttggtcattccaaaatgagggcaagcctctagatgaggagaggaagtctcagattcaggacgactggcttggcctcctagataaacaggtcatgatggattctacgaagcaaacgctgtcagaacactttgtcattaaactcacgatcttcgatcctattatgaatatttcttggtccccgagaatcacaaaacagcactcagggtcgaggtccaaacaagcccagaaagacaatccatag

SEQ ID NO: 19983 - protein, 261 aa, Muscodor strobelii
  misc_feature: SGI Peptide ID NO. 566732
MHTKFTKPIPLWMHRLRNDQILHDVYAYFNTQAIKGYKKDWPGTVTIARGDISSISYKSRMSTCENTKYNKNTAYLFPGPNHDLAADQRDGASDMNLTLEIKGEEAVESNRIDKKISQLASKNVSFSGNLTESILEPDMPTYIWKNEGTEIERDIRARFGDGTNIWYESKCEQGYKRDVIRIWSFQNEGKPLDEERKSQIQDDWLGLLDKQVMMDSTKQTLSEHFVIKLTIFDPIMNISWSPRITKQHSGSRSKQAQKDNP

SEQ ID NO: 19984 - DNA, 1410 bp, Muscodor strobelii
  misc_feature: SGI cDNA ID NO. 566733
  misc_feature: Encodes the peptide sequence at SEQ ID NO 19985
atgatgttcaaatctgccctcttggccgccatggctgccgcatcagctattgcacatatgaacatgaaggtacctccgcctttagaatacaagggcaaccccaacgccaaagagcccaacatcgattataccccgactgctcctctcacagggtccagtcagttcccgtgtaagggtggattgaaactcatcggcacgcccgaaggtgcctccgttgcgacttattcccccggacagcaatcttccgtggagatagagggcggtgcattccataatggaggcagttgccagctctcactctcgtacgacaaagggtcatctttcaccgtcatcaagtccttcatcggtggctgtcctaccgcgtcaggcggtacctttaacttccagattccctcggacgctcctacgggcgacgatgttgttttggcctggacatggaacaacaaggtgggcaaccgcgagttctacatgagctgtgctgttgtcactatcggatccggtggttctaagcgcgacgagacagctgttgagaaacgcgcctctgtcgcattcaaggatcgccctgccatgttccgagccaacctcaacggagacaagtactgtgtcaaggaaggtatcgatgttgtttatcccgagccaggtcccgacgttgaaaatgctgctactagccccggtgccgcgaccatctgtgcgactggcgaggatgctcccatgggtagcggtagcagctcgggcgactccggttcaagctcttcggctgctccccagccatcaagttcctcggctgccgctcaaccttcaacttcttccgctcctgctgccacatcgtcggctgccgtgtatgtgacttcttctctttactcgaattcttccatgtctaccccgactacttccatgtcttctaccccgagcaccatgatgactagcgtgatgactatgagtcaaaattcttcgaccgtctcaccatctatgacctcgtcttcctctgatatcttgactgtcaagcctgtcacgacgctgaccaagacttctagtactccttcaggaggcgttttcttcacgacaggtggtgccgaaactgcgactactttgactacacagacttcagcgccgatttcctcggcaccagcttcgtcttcggctcccgctactacgtcttccgccgctcctacatccgtgactagtgcacccccggccacttcgtctggtgctagtgcagctggtgttcagactggcgcttgttcgtctgagggccagtggaactgcatcgatggcaacagtttccagcgttgcgcatcgggccagtggtccgtcgccatgccgcttgctgctggaacgaaatgcagtgttggtatggccgacacccttaacatgcggcgacgtcgtgagaaggttcgtcgtcacttttaa

SEQ ID NO: 19985 - protein, 469 aa, Muscodor strobelii
  misc_feature: SGI Peptide ID NO. 566733
  misc_feature (18)..(467): NCBI GI: 145605581 Blast Desc: MGG_11774 [Magnaporthe grisea 70-15] gi|145013396|gb|EDJ98037.1| MGG_11774 [Magnaporthe grisea 70-15]
  misc_feature (3)..(469): NCBI GI: 171689622 Blast Desc: protein product [Podospora anserina] gi|170944773|emb|CAP70884.1| protein product [Podospora anserina]
  misc_feature (18)..(462): NCBI GI: 256734656 Blast Desc: NECHADRAFT_103191 [Nectria haematococca mpVI 77-13-4]
  misc_feature (20)..(268): NCBI GI: 145602472 Blast Desc: MGG_04880 [Magnaporthe grisea 70-15] gi|145010893|gb|EDJ95549.1| MGG_04880 [Magnaporthe grisea 70-15]
  misc_feature (3)..(219): NCBI GI: 116205149 Blast Desc: CHGG_10458 [Chaetomium globosum CBS 148.51] gi|88176586|gb|EAQ84054.1| CHGG_10458 [Chaetomium globosum CBS 148.51]
  misc_feature (3)..(224): NCBI GI: 85110504 Blast Desc: NCU05404 [Neurospora crassa OR74A] gi|9367560|emb|CAB97468.1| related to spore coat protein SP96 precursor [Neurospora crassa] gi|28925174|gb|EAA34256.1| crassa
  misc_feature (1)..(219): NCBI GI: 46107518 Blast Desc: FG00642.1 [Gibberella zeae PH-1]
  misc_feature (3)..(238): NCBI GI: 145250521 Blast Desc: An15g02350 [Aspergillus niger] gi|134082294|emb|CAK42338.1| protein product [Aspergillus niger]
  misc_feature (1)..(218): NCBI GI: 156058109 Blast Desc: SS1G_04786 [Sclerotinia sclerotiorum 1980] gi|154702571|gb|EDO02310.1| SS1G_04786 [Sclerotinia sclerotiorum 1980]
  misc_feature (1)..(238): NCBI GI: 119471779 Blast Desc: RNA polymerase Rpb1 C-terminal repeat domain protein [Neosartorya fischeri NRRL 181] gi|119406367|gb|EAW16318.1| RNA polymerase Rpb1 C-terminal repeat domain protein [Neosartorya
MMFKSALLAAMAAASAIAHMNMKVPPPLEYKGNPNAKEPNIDYTPTAPLTGSSQFPCKGGLKLIGTPEGASVATYSPGQQSSVEIEGGAFHNGGSCQLSLSYDKGSSFTVIKSFIGGCPTASGGTFNFQIPSDAPTGDDVVLAWTWNNKVGNREFYMSCAVVTIGSGGSKRDETAVEKRASVAFKDRPAMFRANLNGDKYCVKEGIDVVYPEPGPDVENAATSPGAATICATGEDAPMGSGSSSGDSGSSSSAAPQPSSSSAAAQPSTSSAPAATSSAAVYVTSSLYSNSSMSTPTTSMSSTPSTMMTSVMTMSQNSSTVSPSMTSSSSDILTVKPVTTLTKTSSTPSGGVFFTTGGAETATTLTTQTSAPISSAPASSSAPATTSSAAPTSVTSAPPATSSGASAAGVQTGACSSEGQWNCIDGNSFQRCASGQWSVAMPLAAGTKCSVGMADTLNMRRRREKVRRHF

SEQ ID NO: 19986 - DNA, 2222 bp, Muscodor strobelii
  misc_feature: SGI EST ID NO. CUFF.46749.0
  misc_feature: Variant of the nucleotide sequence at SEQ ID NO 19984
tgcgagtcttcgtttgtctttgtctcccctggcagtgaaaacgaacggatccaatataaagacattaacactgccatcctctcgttcacactcacattccttcaccttcttgcccgtggcaattaagcaccctaccaccttcatttcacttcgagttgttattctttccttgaggaattccccaggtggtatcctctttatcttcacactcttgtccaacagtgtgctttgtttcagccgcttcgtggattgtgagtcggcaacacctttgcattgtccagtgttcaacctcaaattctcctcggtgtcacaaagcctcttccacaagcctcttgacaaccacctttcaactttcgtcattcctttgactgccatcaggcaagcagatcggatataagtttgtgagctggacctttggtaccaactcctgcttcttctcaatcaacaacaagactacattgtcaacgagacaccgcgaattttgagaattcatccaagctgctagtcagcctatttacaatacaacacacgactcaaatattctgcggtacatcgacttcacatctaaccatcatgatgttcaaatctgccctcttggccgccatggctgccgcatcagctattgcacatatgaacatgaaggtacctccgcctttagaatacaagggcaaccccaacgccaaagagcccaacatcgattataccccgactgctcctctcacagggtccagtcagttcccgtgtaagggtggattgaaactcatcggcacgcccgaaggtgcctccgttgcgacttattcccccggacagcaatcttccgtggagatagagggcggtgcattccataatggaggcagttgccagctctcactctcgtacgacaaagggtcatctttcaccgtcatcaagtccttcatcggtggctgtcctaccgcgtcaggcggtacctttaacttccagattccctcggacgctcctacgggcgacgatgttgttttggcctggacatggaacaacaaggtgggcaaccgcgagttctacatgagctgtgctgttgtcactatcggatccggtggttctaagcgcgacgagacagctgttgagaaacgcgcctctgtcgcattcaaggatcgccctgccatgttccgagccaacctcaacggagacaagtactgtgtcaaggaaggtatcgatgttgtttatcccgagccaggtcccgacgttgaaaatgctgctactagccccggtgccgcgaccatctgtgcgactggcgaggatgctcccatgggtagcggtagcagctcgggcgactccggttcaagctcttcggctgctccccagccatcaagttcctcggctgccgctcaaccttcaacttcttccgctcctgctgccacatcgtcggctgccgtgtatgtgacttcttctctttactcgaattcttccatgtctaccccgactacttccatgtcttctaccccgagcaccatgatgactagcgtgatgactatgagtcaaaattcttcgaccgtctcaccatctatgacctcgtcttcctctgatatcttgactgtcaagcctgtcacgacgctgaccaagacttctagtactccttcaggaggcgttttcttcacgacaggtggtgccgaaactgcgactactttgactacacagacttcagcgccgatttcctcggcaccagcttcgtcttcggctcccgctactacgtcttccgccgctcctacatccgtgactagtgcacccccggccacttcgtctggtgctagtgcagctggtgttcagactggcgcttgttcgtctgagggccagtggaactgcatcgatggcaacagtttccagcgttgcgcatcgggccagtggtccgtcgccatgccgcttgctgctggaacgaaatgcagtgttggtatggccgacacccttaacatgcggcgacgtcgtgagaaggttcgtcgtcacttttaagtgatagatgaggggaagaggcggcttggcacgatgtagccaggtactggatcaggtgttcttttcttttgcacatattttcgcattggcgaatacacaaaatttggagtgttgggctgccgtgctgcttctatatcgaagccatgagacatgcatatgccgaacttggcccaaactggttctagttataccattcatacaagtagatatgatgaaaacgaacatgaaatcaatgacct

SEQ ID NO: 19987 - DNA, 2820 bp, Muscodor strobelii
  misc_feature: SGI cDNA ID NO. 566734
  misc_feature: Encodes the peptide sequence at SEQ ID NO 19988
atggtacagccaaagaagaataatttccgcaacagtatcaacggagagaacagcaaggaatcgttcaacatgtctcatcggtcgaaagacatgacggggtctggtagcgggaactccggaaagagttccaacaagaccaatggcacctcttccaatttccgcacagatagtgctatctcggccagccacgctcgcggtgagcggacattgcaacgctgggttgcgcctagcggctccaatgacgtggacatgagcctcgagggttcctcgaatggcggtggtggccaatgggatcagtttgcggcgaacgagaagaaatttggcatcacgactgactatgacgagcgcttctatacgactgctattgacaagagtaatcccgacttcaaagcgcgatatgccaaggccgacaagatcgccaaggacatcgagcgcagtactccgaccacatctcaccaagctgaggagcgaaagatggactatgctggtggaaatgacgcaggcggcgatgaagaggacaaatacagcggtgtcaagcgacaggacctacctgctggcaacagagagaacaagtatatgcctcctgccaaacgcgctcccgctggcgcttctactgtcaagggtgctcctgtcgatcccgcaatcatatcctcccaactcaagacctccaaaccacaatctatgcccaagcaagaagaaagtaagacacaggcaacctccagcctggaaccttcatctacgccggccatacctacctcacacacgacatcacaagtaccagagagcaagccggaacccgttgcaaaactcacagacaccaaagcaacaagccaaacatctacacctctcaagccgtccaccgcaacaagccgaacgatctcaccacaggcaaatgatacccaaggagctgtgccaagcgcgacatcgaccgtcacagctgatgttctgaaggaattcaaaaattttgctactcagcagcgcgcaaatgcggacaagatccgggtcaacaaagccaaggccgataaggaggtcaagcttagcgaattgaagagatttgcggacaacttcaaactaccgacaccggtgccgagtgatttaataggcatcatagccaaggaccctgctaaacagcgagaaatccaggagaaggcacagcgagacgcaaacgagatagcaaagcgtaaggctgacgaagctgctgccaaagacagaaaggggtcggcctcgaaagagtcacaggccaatgctgccagcgcagccctacctgataacagaaatgctcgcccagcaaccaattcttcgactaatggaccgcagtctgcaagccgtaaccagacaggccgcatggttcctccctaccctcaattccagaacaaccgccccaatccttcacacatgggaccgccaggtagacaagggggcctcacccatcgtcttcgagaatcgcaaaaatcgcaaggccaggaagcgcgaatgccgcccacaggaccagctaaccctgcgaatgcgccatttcctcatcgcatgggcgctcctcctcacttgggtaccaagttcaatcctaatagtcacgagttccgaccgaatgcgtacgcccccagcttcagtcccaacagacacactagcgcaggctcaagccctcgctcggccatcaacaacgctaacgacgctcatgctcctggggctgcccagaccaatatcgcaatcgtcatctcgaagaagaagagagctgtcgatcccaagaagtgctcgattttgacctttgtgaaatcggttcagccaccggaaggcaagaactggagtgacaatggcgaccttagaccaccctacgacactccacctacatggcgttctgctacggacgaagaaaaatccgattctacgatgcttttagactgcaaagagtacttcgaacgccagcctttcaacacacagcccactcccaaccctccacatatgctcccgcagcaaatcccacaccaacatcagctacctctacacatgcaacacaacgttggaccacgccattcgccgcatgcaccccatgttcagctacacgggggccaacatacccctgttcctcataccccgttcaacggcgctgatgatcacagaatgatgcattccaattctcaaaactcttacacccagtcccctaggatagggcatcaaatgccattaggttatcctacaagcatgcattccacaccgcaaatgccctatggacaacatatgatgggcgcatatatgggtcctggagggccacagatgaataatttctccaacagaagcctatccaacagcggccaatacatgccccaacagcctggaaccatgggggcgccaatgatgatgcaacagcaattcataaacccaggcatgatggctggccctccccaaatgcccatgtatccaacgggtcagcccttcattcctcctggagctgcccctcaatctatgcctgctggggcaaacggatacccaagccctcgaccatcagcaccaatgatggttcatcaaggctcacagcaaggacaagcaatgtacggacaaagtcctaacatgtcatatcaacagccatacgcgccacaacaaggtcaaatgaacaacattcgagcgtcttataacggagctggtgcgcagcaatacggtagcagccctcaacagatgcatcaatacaccggcccgccgcatcgcaacggaaacaacaatttcaacaagaactatcagggtcacggacagcaccatggcccgagcaatcatgccgctccgaccggcccacagggtcgaagttcggatgggactgacgaagcgaaatga

SEQ ID NO: 19988 - protein, 939 aa, Muscodor strobelii
  misc_feature: SGI Peptide ID NO. 566734
  misc_feature (107)..(181): Pfam Id: PF06741 Pfam Desc: LsmAD domain
  misc_feature (45)..(939): NCBI GI: 256734655 Blast Desc: NECHADRAFT_90259 [Nectria haematococca mpVI 77-13-4]
  misc_feature (45)..(939): NCBI GI: 46107520 Blast Desc: FG00643.1 [Gibberella zeae PH-1]
  misc_feature (47)..(939): NCBI GI: 261352964 Blast Desc: conserved [Verticillium albo-atrum VaMs.102]
  misc_feature (13)..(873): NCBI GI: 85110496 Blast Desc: NCU05400 [Neurospora crassa OR74A] gi|16944662|emb|CAB97464.2| conserved [Neurospora crassa] gi|28925170|gb|EAA34252.1| [Neurospora crassa OR74A]
  misc_feature (13)..(873): NCBI GI: 11359451 Blast Desc: NCU05400 [Neurospora crassa OR74A] gi|16944662|emb|CAB97464.2| conserved [Neurospora crassa] gi|28925170|gb|EAA34252.1| [Neurospora crassa OR74A]
  misc_feature (14)..(939): NCBI GI: 145605579 Blast Desc: MGG_09170 [Magnaporthe grisea 70-15] gi|145013395|gb|EDJ98036.1| MGG_09170 [Magnaporthe grisea 70-15]
  misc_feature (48)..(867): NCBI GI: 171689620 Blast Desc: protein product [Podospora anserina] gi|170944772|emb|CAP70883.1| protein product [Podospora anserina]
  misc_feature (45)..(867): NCBI GI: 116205153 Blast Desc: CHGG_10460 [Chaetomium globosum CBS 148.51] gi|88176588|gb|EAQ84056.1| CHGG_10460 [Chaetomium globosum CBS 148.51]
  misc_feature (19)..(939): NCBI GI: 156044112 Blast Desc: SS1G_10159 [Sclerotinia sclerotiorum 1980] gi|154694548|gb|EDN94286.1| SS1G_10159 [Sclerotinia sclerotiorum 1980]
  misc_feature (19)..(939): NCBI GI: 154299333 Blast Desc: BC1G_11152 [Botryotinia fuckeliana B05.10] gi|150857417|gb|EDN32609.1| BC1G_11152 [Botryotinia fuckeliana B05.10]
MVQPKKNNFRNSINGENSKESFNMSHRSKDMTGSGSGNSGKSSNKTNGTSSNFRTDSAISASHARGERTLQRWVAPSGSNDVDMSLEGSSNGGGGQWDQFAANEKKFGITTDYDERFYTTAIDKSNPDFKARYAKADKIAKDIERSTPTTSHQAEERKMDYAGGNDAGGDEEDKYSGVKRQDLPAGNRENKYMPPAKRAPAGASTVKGAPVDPAIISSQLKTSKPQSMPKQEESKTQATSSLEPSSTPAIPTSHTTSQVPESKPEPVAKLTDTKATSQTSTPLKPSTATSRTISPQANDTQGAVPSATSTVTADVLKEFKNFATQQRANADKIRVNKAKADKEVKLSELKRFADNFKLPTPVPSDLIGIIAKDPAKQREIQEKAQRDANEIAKRKADEAAAKDRKGSASKESQANAASAALPDNRNARPATNSSTNGPQSASRNQTGRMVPPYPQFQNNRPNPSHMGPPGRQGGLTHRLRESQKSQGQEARMPPTGPANPANAPFPHRMGAPPHLGTKFNPNSHEFRPNAYAPSFSPNRHTSAGSSPRSAINNANDAHAPGAAQTNIAIVISKKKRAVDPKKCSILTFVKSVQPPEGKNWSDNGDLRPPYDTPPTWRSATDEEKSDSTMLLDCKEYFERQPFNTQPTPNPPHMLPQQIPHQHQLPLHMQHNVGPRHSPHAPHVQLHGGQHTPVPHTPFNGADDHRMMHSNSQNSYTQSPRIGHQMPLGYPTSMHSTPQMPYGQHMMGAYMGPGGPQMNNFSNRSLSNSGQYMPQQPGTMGAPMMMQQQFINPGMMAGPPQMPMYPTGQPFIPPGAAPQSMPAGANGYPSPRPSAPMMVHQGSQQGQAMYGQSPNMSYQQPYAPQQGQMNNIRASYNGAGAQQYGSSPQQMHQYTGPPHRNGNNNFNKNYQGHGQHHGPSNHAAPTGPQGRSSDGTDEAK

SEQ ID NO: 19989 - DNA, 4405 bp, Muscodor strobelii
  misc_feature: SGI EST ID NO. CUFF.46881.1
  misc_feature: Variant of the nucleotide sequence at SEQ ID NO 19987
cgccgtcacagcactgtcgaccggcacctggactttctcgtctgcgacttcacgagggaggcattcaacaagctgaggaagacgtgaagctgagttccgttcctgggcagatcacgacgcatcggagtcgtgagcactaccggtcccgagacctgcgcgccgatccaaggccatcgaaaggggacccgatcatccatcaaaattcccctgcccgcagcatccatccaactgttcaagccagttttgtccagcttgtcctcgcatgacaagcccttataacctaataatttccgagaaggtgttagggtctgtgtagccctggaggaaggtagtgagctcgaaggccgctttaccgccttacctcgcatcgtgtttgtcgcctgagaatggtacagccaaagaagaataatttccgcaacagtatcaacggagagaacagcaaggaatcgttcaacatgtctcatcggtcgaaagacatgacggggtctggtagcgggaactccggaaagagttccaacaagaccaatggcacctcttccaatttccgcacagatagtgctatctcggccagccacgctcgcggtgagcggacattgcaacgctgggttgcgcctagcggctccaatgacgtggacatgagcctcgagggttcctcgaatggcggtggtggccaatgggatcagtttgcggcgaacgagaagaaatttggcatcacgactgactatgacgagcgcttctatacgactgctattgacaagagtaatcccgacttcaaagcgcgatatgccaaggccgacaagatcgccaaggacatcgagcgcagtactccgaccacatctcaccaagctgaggagcgaaagatggactatgctggtggaaatgacgcaggcggcgatgaagaggacaaatacagcggtgtcaagcgacaggacctacctgctggcaacagagagaacaagtatatgcctcctgccaaacgcgctcccgctggcgcttctactgtcaagggtgctcctgtcgatcccgcaatcatatcctcccaactcaagacctccaaaccacaatctatgcccaagcaagaagaaagtaagacacaggcaacctccagcctggaaccttcatctacgccggccatacctacctcacacacgacatcacaagtaccagagagcaagccggaacccgttgcaaaactcacagacaccaaagcaacaagccaaacatctacacctctcaagccgtccaccgcaacaagccgaacgatctcaccacaggcaaatgatacccaaggagctgtgccaagcgcgacatcgaccgtcacagctgatgttctgaaggaattcaaaaattttgctactcagcagcgcgcaaatgcggacaagatccgggtcaacaaagccaaggccgataaggaggtcaagcttagcgaattgaagagatttgcggacaacttcaaactaccgacaccggtgccgagtgatttaataggcatcatagccaaggaccctgctaaacagcgagaaatccaggagaaggcacagcgagacgcaaacgagatagcaaagcgtaaggctgacgaagctgctgccaaagacagaaaggggtcggcctcgaaagagtcacaggccaatgctgccagcgcagccctacctgataacagaaatgctcgcccagcaaccaattcttcgactaatggaccgcagtctgcaagccgtaaccagacaggccgcatggttcctccctaccctcaattccagaacaaccgccccaatccttcacacatgggaccgccaggtagacaagggggcctcacccatcgtcttcgagaatcgcaaaaatcgcaaggccaggaagcgcgaatgccgcccacaggaccagctaaccctgcgaatgcgccatttcctcatcgcatgggcgctcctcctcacttgggtaccaagttcaatcctaatagtcacgagttccgaccgaatgcgtacgcccccagcttcagtcccaacagacacactagcgcaggctcaagccctcgctcggccatcaacaacgctaacgacgctcatgctcctggggctgcccagaccaatatcgcaatcgtcatctcgaagaagaagagagctgtcgatcccaagaagtgctcgattttgacctttgtgaaatcggttcagccaccggaaggcaagaactggagtgacaatggcgaccttagaccaccctacgacactccacctacatggcgttctgctacggacgaagaaaaatccgattctacgatgcttttagactgcaaagagtacttcgaacgccagcctttcaacacacagcccactcccaaccctccacatatgctcccgcagcaaatcccacaccaacatcagctacctctacacatgcaacacaacgttggaccacgccattcgccgcatgcaccccatgttcagctacacgggggccaacatacccctgttcctcataccccgttcaacggcgctgatgatcacagaatgatgcattccaattctcaaaactcttacacccagtcccctaggatagggcatcaaatgccattaggttatcctacaagcatgcattccacaccgcaaatgccctatggacaacatatgatgggcgcatatatgggtcctggagggccacagatgaataatttctccaacagaagcctatccaacagcggccaatacatgccccaacagcctggaaccatgggggcgccaatgatgatgcaacagcaattcataaacccaggcatgatggctggccctccccaaatgcccatgtatccaacgggtcagcccttcattcctcctggagctgcccctcaatctatgcctgctggggcaaacggatacccaagccctcgaccatcagcaccaatgatggttcatcaaggctcacagcaaggacaagcaatgtacggacaaagtcctaacatgtcatatcaacagccatacgcgccacaacaaggtcaaatgaacaacattcgagcgtcttataacggagctggtgcgcagcaatacggtagcagccctcaacagatgcatcaatacaccggcccgccgcatcgcaacggaaacaacaatttcaacaagaactatcagggtcacggacagcaccatggcccgagcaatcatgccgctccgaccggcccacagggtcgaagttcggatgggactgacgaagcgaaatgagcagactgctagctatcagcgaagagtatcagcgtcgcgctcaggcgccaatcgtcttactcccagtgacccaacatcatcccttacaatattcttcccgccgatatcaggcgacgagccacggcatatatgaggattactgagaccagctcaatgcactcaaaagaacagatcgtctcctccggcgactcgacgaggaatatagtcaaatggcatttcttccaagggctgttatgtcggaagcaatcgtccaagtccctgctgggtcttgaaatcatctgcaggctatagcttgtttatgttacctgtattatccttggccttgtaggatatcgtaggatatcttctgagaactctccgcagacccgctacggatgcaaggatactggcatgaagatatagtattggggtaggctgaggaagtgaagggtccagagcaaggacgaatttttggacttctggtgcacgaagaaaacagactccgtgcactagccgctcgattttgctctatcaactacaaacatctcatcttgcctcgacgtaagaggagatcaggagtgttaggctcaacgagtaccgggaagaaatagttgggttaacatgttttgactgctggcacctatagtcaagacagcctagacaataaatgaacccaattacatatcaagcccctggatttctaatgtagcatgttgtgcggagagcgatgtcgtctcattttcatgatcacatagagtacgagtagcatgcatctatcccctaagaccgtatatgccatcgtgtacgactacatgccgtattgatcttgggaggaaaggaggtggcgaaggctcaggatcttcgatttatgggttggagagatgtagttttcagcaatatgaccattgcttgtgaggatggacgtgcgcacaaaaacacgcgatggcgggcaaggttgacggccaaatccagtttcaggtgttctggggtaggcagatttgggaggaagcttcctggtcggcggatattcgtattacctaaggtaacaccttgtatcttggcgacggttggtttgctccggtatctaatcgccagtttctttgttcgaagagctcttcaatggaaaactgacgttacgggaacaatacatcttgagatgtgaaactgaagaaataaatctggtgaattactacgagccaaactccgaaccgagtccgaat

SEQ ID NO: 19990 - DNA, 1245 bp, Muscodor strobelii
  misc_feature: SGI cDNA ID NO. 566735
  misc_feature: Reduced expression when VOC is produced
  misc_feature: Encodes the peptide sequence at SEQ ID NO 19991
atgccgatacccaagattgctatcattggcgctgggccagttggttgtaccctggcacgcattctgcatctctctgacgtgccagtaaccgtatttgagatcgatgagactcccaactatcgtggacaaggcagcactctcgatcttcaccctaaaactggactacaagcattgaagaccgccaaacttttcgatgaattcaaagaaaaagctcgctatgactctcagtatatgttgatgtgcgacaagaacctcaatccatttgttgaaatgggtaaaacaggtggcgcagtaagcgagcgacctgaaattgatcgagccgagcttcggaaattgttgatacactcgctgcccgagaatactattaaatggggccacaagctgaagagcgtcgaggagggaaatcgcctagtttttgaacatacgaccgaggatgggtttgaccttgttgttggatgcgatggtgccttttctaaagtacgcaactatctttcgactgatagaccacttgagtatagcggaatcgcctatcatcagatggtcataccggatgcggagcgcaccgcaaacaacgtctacagactgatcaaccgtggcaacgtctttgcccactcttttgggaaacagttctcaatccaacagcttggtgacggaagcataaatgttgcctcaactgtcgcccgctcagaagacttcatcaacagtcacggcctcaacgacctcaagttagaggacatgaagaagttattactcgatgaaaaatcagactactgcccacagcttcgcgaggcgatcgagaaggcgcaaggaccttgtatgaataagaacctttacacactaccgcctgggtggcattggaaccatcgccgcggtgccactgttattggtgatgcagcgcacgtcatgcttccattcgctggcgaaggcgttaatttaggcatggatgatgcgcaaaagctcgccgcagcaattatcaaggcagttgtaaatggcggcagtgctgatgaactggacaaacaagttgccgcatacgagaaagagatgttcccacgtatggagttgtatcaacgtcaaacggccgaggtcacggaactttggttcaagactccagacgagaatatgaggaaaatcgtaccaagcgtattgagctcgcatacaaagctaatggtgcccaagatgctacagactccagcatctgtactcatccatacttggtggtttttcagggaaagattttctcaataa

SEQ ID NO: 19991 - protein, 414 aa, Muscodor strobelii
  misc_feature: SGI Peptide ID NO. 566735
  misc_feature (5)..(359): Pfam Id: PF01494 Pfam Desc: FAD binding domain
  misc_feature (5)..(33): Pfam Id: PF01266 Pfam Desc: FAD dependent oxidoreductase
  misc_feature (295)..(321): Pfam Id: PF01494 Pfam Desc: FAD binding domain
  misc_feature (5)..(411): NCBI GI: 256729245 Blast Desc: NECHADRAFT_47576 [Nectria haematococca mpVI 77-13-4]
  misc_feature (5)..(411): NCBI GI: 46117052 Blast Desc: FG04368.1 [Gibberella zeae PH-1]
  misc_feature (2)..(409): NCBI GI: 145605577 Blast Desc: MGG_09171 [Magnaporthe grisea 70-15] gi|145013394|gb|EDJ98035.1| MGG_09171 [Magnaporthe grisea 70-15]
  misc_feature (1)..(409): NCBI GI: 169598320 Blast Desc: SNOG_01961 [Phaeosphaeria nodorum SN15] gi|111069053|gb|EAT90173.1| SNOG_01961 [Phaeosphaeria nodorum SN15]
  misc_feature (6)..(370): NCBI GI: 169782261 Blast Desc: [Aspergillus oryzae RIB40] gi|83774336|dbj|BAE64460.1| protein product [Aspergillus oryzae]
  misc_feature (6)..(370): NCBI GI: 238500710 Blast Desc: oligopeptide transporter, [Aspergillus flavus NRRL3357] gi|220691826|gb|EED48173.1| oligopeptide transporter, [Aspergillus flavus NRRL3357]
  misc_feature (4)..(359): NCBI GI: 242763256 Blast Desc: salicylate hydroxylase, [Talaromyces stipitatus ATCC 10500] gi|218723735|gb|EED23152.1| salicylate hydroxylase, [Talaromyces stipitatus ATCC 10500]
  misc_feature (1)..(367): NCBI GI: 156049711 Blast Desc: SS1G_08562 [Sclerotinia sclerotiorum 1980] gi|154692961|gb|EDN92699.1| SS1G_08562 [Sclerotinia sclerotiorum 1980]
  misc_feature (4)..(365): NCBI GI: 222087268 Blast Desc: salicylate hydroxylase protein [Agrobacterium radiobacter K84] gi|221724716|gb|ACM27872.1| salicylate hydroxylase protein [Agrobacterium radiobacter K84]
  misc_feature (5)..(363): NCBI GI: 228939857 Blast Desc: Monooxygenase [Bacillus thuringiensis serovar berliner ATCC 10792] gi|228972747|ref|ZP_04133346.1| Monooxygenase [Bacillus thuringiensis serovar thuringiensis str. T01001] Bt407]
  misc_feature (14)..(391): SWISSPROT Homolog: EC 1.14.13.9 Kynurenine 3-monooxygenase
  misc_feature: Useful for introducing or modulating the production of volatile compounds
MPIPKIAIIGAGPVGCTLARILHLSDVPVTVFEIDETPNYRGQGSTLDLHPKTGLQALKTAKLFDEFKEKARYDSQYMLMCDKNLNPFVEMGKTGGAVSERPEIDRAELRKLLIHSLPENTIKWGHKLKSVEEGNRLVFEHTTEDGFDLVVGCDGAFSKVRNYLSTDRPLEYSGIAYHQMVIPDAERTANNVYRLINRGNVFAHSFGKQFSIQQLGDGSINVASTVARSEDFINSHGLNDLKLEDMKKLLLDEKSDYCPQLREAIEKAQGPCMNKNLYTLPPGWHWNHRRGATVIGDAAHVMLPFAGEGVNLGMDDAQKLAAAIIKAVVNGGSADELDKQVAAYEKEMFPRMELYQRQTAEVTELWFKTPDENMRKIVPSVLSSHTKLMVPKMLQTPASVLIHTWWFFRERFSQ

SEQ ID NO: 19992 - DNA, 2695 bp, Muscodor strobelii
  misc_feature: SGI EST ID NO. CUFF.46775.1
  misc_feature: Variant of the nucleotide sequence at SEQ ID NO 19990
cggtttacaacaatttatgagttcgctggaataattaacgggttagacgtgtatggacaaattcgacgatacgcccagctggatgactaacaagaacaccaactacaaatatggaaattcgaatccaattgatcgtcgtccatttctaatatgcacacgaggacagatcttgagaggactggactgactcatccaaatttattttttggaaattaaatcggccatcatcaacaacgcattgatgttgcaactgaggtcgagcccttgtctatgaactgtactaatataagaaggtagcttcaacttatggtcaatgcgatgaacttcgcagatagcgcgaaataatcccgttaagggttaagataaatgatatatttgggtaggtactcttgcgcatgagggtctcaaattattcatcggcgatatgtccgtcgaacgattttacctaatgcagtatctatcgcatcgtttctaatgacgcccaccggttcttgcggtctcgaatcaaatagacaaagtcggtgcttgatgatgacgtccgaccgccaaaggccctgtattccgaatccgaactatcggcaccttagcgcaatttcttagattgacagccgaatgcgaatcctcattcgcatttgcggcacaggatacagggctgaatcccacaacgtcgaatcagctgtgagaggcgttaaagtcaacacataactatatcttacgatggcctttagcaagatgtatttatatcggcgatgtgagcctttatgtttcatcagaaacttgacttctatcactcctcgtcgtctcaaaacatgacccttggactctccagttcttagacgctgcacatttgacgagactacccgtcattgagttttgctcaccccactcaactcttgagccaccatgccgatacccaagattgctatcattggcgctgggccagttggttgtaccctggcacgcattctgcatctctctgacgtgccagtaaccgtatttgagatcgatgagactcccaactatcgtggacaaggcagcactctcgatcttcaccctaaaactggactacaagcattgaagaccgccaaacttttcgatgaattcaaagaaaaagctcgctatgactctcagtatatgttgatgtgcgacaagaacctcaatccatttgttgaaatgggtaaaacaggtggcgcagtaagcgagcgacctgaaattgatcgagccgagcttcggaaattgttgatacactcgctgcccgagaatactattaaatggggccacaagctgaagagcgtcgaggagggaaatcgcctagtttttgaacatacgaccgaggatgggtttgaccttgttgttggatgcgatggtgccttttctaaagtacgcaactatctttcgactgatagaccacttgagtatagcggaatcgcctatcatcagatggtcataccggatgcggagcgcaccgcaaacaacgtctacagactgatcaaccgtggcaacgtctttgcccactcttttgggaaacagttctcaatccaacagcttggtgacggaagcataaatgttgcctcaactgtcgcccgctcagaagacttcatcaacagtcacggcctcaacgacctcaagttagaggacatgaagaagttattactcgatgaaaaatcagactactgcccacagcttcgcgaggcgatcgagaaggcgcaaggaccttgtatgaataagaacctttacacactaccgcctgggtggcattggaaccatcgccgcggtgccactgttattggtgatgcagcgcacgtcatgcttccattcgctggcgaaggcgttaatttaggcatggatgatgcgcaaaagctcgccgcagcaattatcaaggcagttgtaaatggcggcagtgctgatgaactggacaaacaagttgccgcatacgagaaagagatgttcccacgtatggagttgtatcaacgtcaaacggccgaggtcacggaactttggttcaagactccagacgagaatatgaggaaaatcgtaccaagcgtattgagctcgcatacaaagctaatggtgcccaagatgctacagactccagcatctgtactcatccatacttggtggtttttcagggaaagattttctcaataattcgcatcaagaatgattggccggggatggtagttgaaatgagtactggcaagccttatcagggtcgcctgtgcttttcactcggatatacctctaaaatgacaatgtttgaattaatgctcactgccaggcatttggcaaaataaatgtaatcacacactatgatatagcaatgaatcaaacaacgaattacgcagcacagaaatcctcggtcaagatcaaactacggcattggaccaatttttacgtgatattaaagctagatatatatggtttcataccgaatggatgatgtcaacgcaaagaaatatgtaccaattcctaatgagtgtatcattcatttgctaatggccaggctattccatcggctcctccgtcttcgcttgccttggcctcgtgatcgacaatgcggaggtgacatttgctgactcgtccgcccgtctcgcctcatcgcctgcagaatactgccgccgggcgaaagtgggaaatgttcgacgttgttctcggagccggacaactatgttgagaacagcaaaaggcgcagtcg

SEQ ID NO: 19993 - DNA, 2895 bp, Muscodor strobelii
  misc_feature: SGI cDNA ID NO. 566736
  misc_feature: Reduced expression when VOC is produced
  misc_feature: Encodes the peptide sequence at SEQ ID NO 19994
atgcaggcgcccaaccccccgcagcgcaccctgcaacggcggtctcccggtcccaacgatggcccctcgaatgtccctacacgctccatgtctcccgccaacatgcagccacggtcttccaccgcttccagaggttcgggaggtggctcgagacggaatcaatcaagcggctcgaccatgcccctctcgcaaatcgaaaagagtgtcacccacctgctggtcgctaccaaacagctgctagaaactcttacccagtggtcccgcggtgctgccaccgacacgcaggtgtctgacgtctacgttcggctaggatacgagtttaacatggcctgccgcgccttcggtgccatcaacgtcgacacgtccgaccttggaaacgtgcccgaatccttgcgacacatattggaggccaccctgagccaggaagccagtaccgagagtctggagaagtacttgccccgcatacgcgacatcataatcaacctcctccacggcctgaagagaaaacagcagaagctccgccagaaacaatcgcgagaaaaggaaggagctgccgcggacgatagtggcatggccagtcgcaccatgagcaccagcacggtgggcagcgccaacagcggcctcacgagtctgttgaatgagggtatcgagagcagctacggcggcacgactttgcgggacagcaatacaagccaggagcccgaaggaaacaccactccagctggcgtcaatacttcccccagtcgcagataccagcgcgaacagtcgcagtcatccatgtcggagaagtcgtctctttcgagcaacaccatgcagaacatacctgtactgcccccgtatcctggagatgagaccatctccaccggcccgcccaacggcggcatagacatcgactcgtttcctccgccaccgccgccacccaagcagcagagcgctctagccgctttgcagaaagggaaagatctcgagaggagggcatctcgcagatactcggcatatcaagtttccaagctcttgggcgctccaacgaatggcgtgcccatgctgccgacccaaaatacgcccatacccaaccgtggccgcgccgaggttcgagagtccatgcgagccgttcaggtccgcgaagccatgcgacataatcggcaagaatctaatcagtccaagagcgtgttcgaaacgtcgcctccaagagttccaagccatatatcagaggaaagttcggccgcggaactaccaactcctcggccgggctcacccccaactcagtcaccagatacaaagtaccggcccagcgcaacgatatcggggccattgcaggatgcgtttcccgtcaatggtcccatatctccagacgatcccaaacccaagatcgaacttacggatagaccacgacccgagacacccagcaatagagagaagccggccttttctcaagaccagtcgcctccgttggacaaagaactgacactgttcctgcaatacaagtccaaagtgaagaaatttgtgctcccggaaggctacactggcttaactattggacgtctccagctggcctttattgagaaattctcctggaatactgctctcaacggtgccgatttacccgagatatacatccaagaccctgtctccggtgtgcgacatgaactcgaagatcttaatgacataaaagaccgcacagttttagcattgaatattgaaccgcttgacgaagtgaaaaagcacattgatgacgggctggggacactgaggaaaactatggatgaagtcaagcagaatatcaccgatcaagcgtcagcacttcagcaagtttctgatagacaactagagacggcgaaagagatggcccgtatggcagctgcaccacccgtggttatggatggtgccaaaacgaacagcatgggtccatcagccagacttaaccctagtcagcttagagagctacagagtctgcgtcgggatcttgctgttctgcgccaaacatactctaaatttcaaaccgaaatacagagctctatgtcctcgcttcgaagcaaggctgccgatgtcaaggtggcagccgccaaagcttcggtgccagatgttgagggtgacgccggctatgcatatgttgtacagggtcggaaacaactcaacacagattctgaccgtcttgtcaccaaagtcgacgatcttcaagaccttgtcgaggacttgcgtaaggatgtcgttaatcgcggcgtgcgacccaagcccagccagctcgaggaagtatccaaagatatccagattttgactaaggagctcaagaaggtagaggattacatgaaacacgagaaacccgtatggacgaagatttgggagaaggaactggaggaggtctgtcaaggtcgtgacgagctcaaacttatggaagatcttgttgttgatctcaaagatgatttggagaaagcatcagagacatttgggcttgtggaagcggctacaaaggagcagatgaaggagaacacgcctactgcgagacaattttctcggggcttacaaaatctaggtaatagcgtcaacccctctgctgccaaggaaggtgttctaggcgaagtacgagccctccagcctaaccacgaggaccgactcgaggctatcgaacgagcggaaaaacttcgacagagagagctcgagagtcggagggagaatccgctaaagaaagagctgacaaactttgtggaagagggcaaattgaagaagagcgggggctttgaggaagtcgaaagagcgcgaatagcaaaggacgatcgtatcagaaaggaggtctgggaacgcatgaatggtatcatcccagagaaccctattggcgaagacaccaatgggaatgaggaatcgactgagacaaatggcggacaagacaccacggagtaa

SEQ ID NO: 19994 - protein, 964 aa, Muscodor strobelii
  misc_feature: SGI Peptide ID NO. 566736
  misc_feature (489)..(924): Pfam Id: PF03915 Pfam Desc: Actin interacting protein 3
  misc_feature (640)..(924): Pfam Id: PF03915 Pfam Desc: Actin interacting protein 3
  misc_feature (489)..(623): Pfam Id: PF03915 Pfam Desc: Actin interacting protein 3
  misc_feature (1)..(946): NCBI GI: 256729449 Blast Desc: NECHADRAFT_47315 [Nectria haematococca mpVI 77-13-4]
  misc_feature (1)..(946): NCBI GI: 46117048 Blast Desc: FG04366.1 [Gibberella zeae PH-1]
  misc_feature (1)..(955): NCBI GI: 145605575 Blast Desc: MGG_11773 [Magnaporthe grisea 70-15] gi|145013393|gb|EDJ98034.1| MGG_11773 [Magnaporthe grisea 70-15]
  misc_feature (52)..(946): NCBI GI: 171689652 Blast Desc: protein product [Podospora anserina] gi|170944788|emb|CAP70899.1| protein product [Podospora anserina]
  misc_feature (60)..(941): NCBI GI: 16944508 Blast Desc: related to actin-interacting protein AIP3 [Neurospora crassa]
  misc_feature (60)..(938): NCBI GI: 164423505 Blast Desc: NCU08468 [Neurospora crassa OR74A] gi|157070122|gb|EAA34074.2| conserved [Neurospora crassa OR74A]
  misc_feature (1)..(937): NCBI GI: 156044108 Blast Desc: SS1G_10157 [Sclerotinia sclerotiorum 1980] gi|154694546|gb|EDN94284.1| SS1G_10157 [Sclerotinia sclerotiorum 1980]
  misc_feature (1)..(937): NCBI GI: 154299321 Blast Desc: BC1G_11146 [Botryotinia fuckeliana B05.10] gi|150857411|gb|EDN32603.1| BC1G_11146 [Botryotinia fuckeliana B05.10]
  misc_feature (7)..(938): NCBI GI: 116205157 Blast Desc: CHGG_10462 [Chaetomium globosum CBS 148.51] gi|88176590|gb|EAQ84058.1| CHGG_10462 [Chaetomium globosum CBS 148.51]
  misc_feature (62)..(933): NCBI GI: 169763890 Blast Desc: [Aspergillus oryzae RIB40] gi|83770873|dbj|BAE61006.1| protein product [Aspergillus oryzae]
  misc_feature: Useful for introducing or modulating the production of volatile compounds
MQAPNPPQRTLQRRSPGPNDGPSNVPTRSMSPANMQPRSSTASRGSGGGSRRNQSSGSTMPLSQIEKSVTHLLVATKQLLETLTQWSRGAATDTQVSDVYVRLGYEFNMACRAFGAINVDTSDLGNVPESLRHILEATLSQEASTESLEKYLPRIRDIIINLLHGLKRKQQKLRQKQSREKEGAAADDSGMASRTMSTSTVGSANSGLTSLLNEGIESSYGGTTLRDSNTSQEPEGNTTPAGVNTSPSRRYQREQSQSSMSEKSSLSSNTMQNIPVLPPYPGDETISTGPPNGGIDIDSFPPPPPPPKQQSALAALQKGKDLERRASRRYSAYQVSKLLGAPTNGVPMLPTQNTPIPNRGRAEVRESMRAVQVREAMRHNRQESNQSKSVFETSPPRVPSHISEESSAAELPTPRPGSPPTQSPDTKYRPSATISGPLQDAFPVNGPISPDDPKPKIELTDRPRPETPSNREKPAFSQDQSPPLDKELTLFLQYKSKVKKFVLPEGYTGLTIGRLQLAFIEKFSWNTALNGADLPEIYIQDPVSGVRHELEDLNDIKDRTVLALNIEPLDEVKKHIDDGLGTLRKTMDEVKQNITDQASALQQVSDRQLETAKEMARMAAAPPVVMDGAKTNSMGPSARLNPSQLRELQSLRRDLAVLRQTYSKFQTEIQSSMSSLRSKAADVKVAAAKASVPDVEGDAGYAYVVQGRKQLNTDSDRLVTKVDDLQDLVEDLRKDVVNRGVRPKPSQLEEVSKDIQILTKELKKVEDYMKHEKPVWTKIWEKELEEVCQGRDELKLMEDLVVDLKDDLEKASETFGLVEAATKEQMKENTPTARQFSRGLQNLGNSVNPSAAKEGVLGEVRALQPNHEDRLEAIERAEKLRQRELESRRENPLKKELTNFVEEGKLKKSGGFEEVERARIAKDDRIRKEVWERMNGIIPENPIGEDTNGNEESTETNGGQDTTE

SEQ ID NO: 19995 - DNA, 3734 bp, Muscodor strobelii
  misc_feature: SGI EST ID NO. CUFF.46814.0
  misc_feature: Variant of the nucleotide sequence at SEQ ID NO 19993
ccgatagggcttagcgcgtttcctgacggaacgggggcacggatcaggacgtggtaatggtgttcgaaacgtcgcgcctcaccacatggtcgtttgcccagtctcaaggcatttggccggcccgtcataccttctgatgtccatctgtgtgaatattgtcagtccagtgcagtgctctcccgtcagatcgcatttgaatttcgaagcttgtgtttagctactcgcatctcctgtcgccatctacctctttccgtccctacgttgcctctcctcccaaccttgctgccctgtcagagtcttgactcacgtccaagtgcccatctccgagttgctcactgccacgataccacctttgcgcgtccatccaacatacaatacttgctacgatccactcgactattcgtatctctgtagctctccagatcttcagatcatcgcatcttcggagggcgcgcaatccggtctgccggacaggcgaaagaggagggactagtcagaacacagtagagtaaacgcccgcatagccagctgcaaacacagagctgggaatctagagtgacgtcccggtcgagatcgaagttgaagccgcgatgcaggcgcccaaccccccgcagcgcaccctgcaacggcggtctcccggtcccaacgatggcccctcgaatgtccctacacgctccatgtctcccgccaacatgcagccacggtcttccaccgcttccagaggttcgggaggtggctcgagacggaatcaatcaagcggctcgaccatgcccctctcgcaaatcgaaaagagtgtcacccacctgctggtcgctaccaaacagctgctagaaactcttacccagtggtcccgcggtgctgccaccgacacgcaggtgtctgacgtctacgttcggctaggatacgagtttaacatggcctgccgcgccttcggtgccatcaacgtcgacacgtccgaccttggaaacgtgcccgaatccttgcgacacatattggaggccaccctgagccaggaagccagtaccgagagtctggagaagtacttgccccgcatacgcgacatcataatcaacctcctccacggcctgaagagaaaacagcagaagctccgccagaaacaatcgcgagaaaaggaaggagctgccgcggacgatagtggcatggccagtcgcaccatgagcaccagcacggtgggcagcgccaacagcggcctcacgagtctgttgaatgagggtatcgagagcagctacggcggcacgactttgcgggacagcaatacaagccaggagcccgaaggaaacaccactccagctggcgtcaatacttcccccagtcgcagataccagcgcgaacagtcgcagtcatccatgtcggagaagtcgtctctttcgagcaacaccatgcagaacatacctgtactgcccccgtatcctggagatgagaccatctccaccggcccgcccaacggcggcatagacatcgactcgtttcctccgccaccgccgccacccaagcagcagagcgctctagccgctttgcagaaagggaaagatctcgagaggagggcatctcgcagatactcggcatatcaagtttccaagctcttgggcgctccaacgaatggcgtgcccatgctgccgacccaaaatacgcccatacccaaccgtggccgcgccgaggttcgagagtccatgcgagccgttcaggtccgcgaagccatgcgacataatcggcaagaatctaatcagtccaagagcgtgttcgaaacgtcgcctccaagagttccaagccatatatcagaggaaagttcggccgcggaactaccaactcctcggccgggctcacccccaactcagtcaccagatacaaagtaccggcccagcgcaacgatatcggggccattgcaggatgcgtttcccgtcaatggtcccatatctccagacgatcccaaacccaagatcgaacttacggatagaccacgacccgagacacccagcaatagagagaagccggccttttctcaagaccagtcgcctccgttggacaaagaactgacactgttcctgcaatacaagtccaaagtgaagaaatttgtgctcccggaaggctacactggcttaactattggacgtctccagctggcctttattgagaaattctcctggaatactgctctcaacggtgccgatttacccgagatatacatccaagaccctgtctccggtgtgcgacatgaactcgaagatcttaatgacataaaagaccgcacagttttagcattgaatattgaaccgcttgacgaagtgaaaaagcacattgatgacgggctggggacactgaggaaaactatggatgaagtcaagcagaatatcaccgatcaagcgtcagcacttcagcaagtttctgatagacaactagagacggcgaaagagatggcccgtatggcagctgcaccacccgtggttatggatggtgccaaaacgaacagcatgggtccatcagccagacttaaccctagtcagcttagagagctacagagtctgcgtcgggatcttgctgttctgcgccaaacatactctaaatttcaaaccgaaatacagagctctatgtcctcgcttcgaagcaaggctgccgatgtcaaggtggcagccgccaaagcttcggtgccagatgttgagggtgacgccggctatgcatatgttgtacagggtcggaaacaactcaacacagattctgaccgtcttgtcaccaaagtcgacgatcttcaagaccttgtcgaggacttgcgtaaggatgtcgttaatcgcggcgtgcgacccaagcccagccagctcgaggaagtatccaaagatatccagattttgactaaggagctcaagaaggtagaggattacatgaaacacgagaaacccgtatggacgaagatttgggagaaggaactggaggaggtctgtcaaggtcgtgacgagctcaaacttatggaagatcttgttgttgatctcaaagatgatttggagaaagcatcagagacatttgggcttgtggaagcggctacaaaggagcagatgaaggagaacacgcctactgcgagacaattttctcggggcttacaaaatctaggtaatagcgtcaacccctctgctgccaaggaaggtgttctaggcgaagtacgagccctccagcctaaccacgaggaccgactcgaggctatcgaacgagcggaaaaacttcgacagagagagctcgagagtcggagggagaatccgctaaagaaagagctgacaaactttgtggaagagggcaaattgaagaagagcgggggctttgaggaagtcgaaagagcgcgaatagcaaaggacgatcgtatcagaaaggaggtctgggaacgcatgaatggtatcatcccagagaaccctattggcgaagacaccaatgggaatgaggaatcgactgagacaaatggcggacaagacaccacggagtaaatgtcagcaaggcgacttaacgttataccccgatttaatccttccactgttcatgattaccgatgtttataatgagttctgttcatctcggacaggaaagcataatgtctataccatagcctcggcgtgtgggggatagctgtttatataagcaaggttatagggaagggccgggagatggtttgctcgagcaaatcttgtagatagtgttacattagtggagcaatatgatatatgagtaaatgcgag

SEQ ID NO: 19996 - DNA, 903 bp, Muscodor strobelii
  misc_feature: SGI cDNA ID NO. 566737
  misc_feature: Encodes the peptide sequence at SEQ ID NO 19997
atgcattttctatcgacactcacggctgtggccggactcgtgacggttggcacttctcaatcgatcaccaaggtcaatgacttccccgggacgccgacgaagcttggaatgtatgtttatgtgccacccaacttgaaaacaccggcacctattatcgtagctatccaccattgccaaggttctgcttcagcctattccggcgagtctggattattgcctctagccggcccgcataactttatcgcgatcttcccgaattcaaaatcaggcggtggctgtttcgatgttgcttcgactgctagtctgacgcacaacggcggcggcgacagccagaccattataaacatggtgaattatgcggttaccaagtacggtggcgatcccgacaaagtctacgtgacgggcacgagctctggagctatgatgacaaatgttatggttggggcatatcccgatgttttcaaagccggatccgtatactccggagtaccagacggatgcttctatgtttcgggctctacggctacccaagaccctccgggatggaacaacaactgtgccaatggccaagtgacgaagaccgccgcgcaatggggcgacttgactcgctcgtatttcccgagctacaacggcactcgccctcggatgcagatctggcacggaactgcagacagcactcttcggtatccaaactacgccgagacaatgaagcaatggtccaacgtcctcggcctcacgacctcgaaagatacgcaaaacacgccacagagcggctacacgcagacgatctggggagatggtacgactaatactgcacagctggttggctatagcgctgcaggagttggccacaccgtacccgtgcacgcttcgcaggatcttgcgttcttcggcattgcttaa

SEQ ID NO: 19997 - protein, 300 aa, Muscodor strobelii
  misc_feature: SGI Peptide ID NO. 566737
  misc_feature (16)..(300): NCBI GI: 159157999 Blast Desc: acetylesterase [Aspergillus awamori]
  misc_feature (1)..(299): NCBI GI: 116196984 Blast Desc: CHGG_05090 [Chaetomium globosum CBS 148.51] gi|88181003|gb|EAQ88471.1| CHGG_05090 [Chaetomium globosum CBS 148.51]
  misc_feature (19)..(300): NCBI GI: 14326043 Blast Desc: acetyl xylan esterase [Aspergillus ficuum]
  misc_feature (21)..(299): NCBI GI: 85091898 Blast Desc: NCU04870 [Neurospora crassa OR74A] gi|28920527|gb|EAA29891.1| NCU04870 [Neurospora crassa OR74A]
  misc_feature (1)..(299): NCBI GI: 171676782 Blast Desc: protein product [Podospora anserina] gi|170936458|emb|CAP61115.1| protein product [Podospora anserina]
  misc_feature (19)..(300): NCBI GI: 145246646 Blast Desc: protein product [Podospora anserina] gi|170936458|emb|CAP61115.1| protein product [Podospora anserina]
  misc_feature (7)..(299): NCBI GI: 212541749 Blast Desc: acetyl xylan esterase, [Penicillium marneffei ATCC 18224] gi|210065936|gb|EEA20029.1| acetyl xylan esterase, [Penicillium marneffei ATCC 18224]
  misc_feature (18)..(299): NCBI GI: 70983864 Blast Desc: acetyl xylan esterase [Aspergillus fumigatus Af293] gi|66845084|gb|EAL85420.1| acetyl xylan esterase, [Aspergillus fumigatus Af293]
  misc_feature (21)..(300): NCBI GI: 169624630 Blast Desc: SNOG_15575 [Phaeosphaeria nodorum SN15] gi|111055830|gb|EAT76950.1| SNOG_15575 [Phaeosphaeria nodorum SN15]
  misc_feature (3)..(300): NCBI GI: 119485504 Blast Desc: acetyl xylan esterase, [Neosartorya fischeri NRRL 181] gi|119410342|gb|EAW20289.1| acetyl xylan esterase, [Neosartorya fischeri NRRL 181]
  misc_feature (7)..(299): SWISSPROT Homolog: EC 3.1.1.73 Feruloyl esterase
MHFLSTLTAVAGLVTVGTSQSITKVNDFPGTPTKLGMYVYVPPNLKTPAPIIVAIHHCQGSASAYSGESGLLPLAGPHNFIAIFPNSKSGGGCFDVASTASLTHNGGGDSQTIINMVNYAVTKYGGDPDKVYVTGTSSGAMMTNVMVGAYPDVFKAGSVYSGVPDGCFYVSGSTATQDPPGWNNNCANGQVTKTAAQWGDLTRSYFPSYNGTRPRMQIWHGTADSTLRYPNYAETMKQWSNVLGLTTSKDTQNTPQSGYTQTIWGDGTTNTAQLVGYSAAGVGHTVPVHASQDLAFFGIA

SEQ ID NO: 19998 - DNA, 630 bp, Muscodor strobelii
  misc_feature: SGI EST ID NO. CUFF.46791.0
  misc_feature: Variant of the nucleotide sequence at SEQ ID NO 19996
taccaagtacggtggcgatcccgacaaagtctacgtgacgggcacgagctctggagctatgatgacaaatgttatggttggggcatatcccgatgttttcaaagccggatccgtatactccggagtaccagacggatgcttctatgtttcgggctctacggctacccaagaccctccgggatggaacaacaactgtgccaatggccaagtgacgaagaccgccgcgcaatggggcgacttgactcgctcgtatttcccgagctacaacggcactcgccctcggatgcagatctggcacggaactgcagacagcactcttcggtatccaaactacgccgagacaatgaagcaatggtccaacgtcctcggcctcacgacctcgaaagatacgcaaaacacgccacagagcggctacacgcagacgatctggggagatggtacgactaatactgcacagctggttggctatagcgctgcaggagttggccacaccgtacccgtgcacgcttcgcaggatcttgcgttcttcggcattgcttaagaagccatactacttgatagcttagcgacatgattggcttcgtccctcgatactgttgactgagtgttgcatggaagatcaggctttta

SEQ ID NO: 19999 - DNA, 2676 bp, Muscodor strobelii
  misc_feature: SGI cDNA ID NO. 566738
  misc_feature: Reduced expression when VOC is produced
  misc_feature: Encodes the peptide sequence at SEQ ID NO 20000
atggccactcccgaagaccctgtctctggctcttcgcctccacgagacgattccccaacgccctcggacagggacacggacgcattcgaagacgccgtcgacactggctctgtccgatctctcaccaaccgcaaagcctcccagaccaaggtcccacagctatccagccccgatgccgagacggtccctgatctaccagaaactcatgccgagacactgaaaacgattgagcccgcagcagagagaaacgcagagaccgccgaccacgccaatgacattctcactgacacaacgaattcagcgcggagctcaaagcgcatctcgagcactactctagacaatgttgacctcgacgaaaatgcatcgagtgagcagcccaaaggttcggtcctcccagagattgtcgctcgcagcagagagacatcagctgagcggactgttgtgaccgcagaacaaccagcccctcagatcgtgaggcaacctaccaagaaactctctctcagcaatatcactgctagcttgccttctatgccatggtctcccaatcccgattcgccgcccaagacgagtcctagcgtcccaaccgcctccaacgcgcctttgccccctccgccgccacctactcgaaagattacgagtcccttcgcctggctatcccgcaactctacacaaaaggaaaatagcgttacgtcaccgcctgccacaactgctggctccccaagacgaaacaccgcgagctccgtcgccacactgaccagcaatccggagatgatgttgagcaaactggaggaggagggcgaaacgggcggcgcgaacggcaaaagtcgcccacagagaaatagcttgcgagaccgtttcaagatggtccggttgcgagaggaggcaggcatatctctcgaccccagcgacgaagacaagagccacggagccgtggcaaatttgattgtccgttctgctactatgtcgcctggtgctgaaaacgcacctgatttccaagggccaacgtcgcctctaccacccagcacagatacgaaattagcccctggcaccgtatcaggagtttcagcgggcccctccgccatcgctgatgccccggtagattgggatctttggcaatccgtcgtctacgagggcccagccgccgtagctcggaccagccccgaagaattaaaccgcgccataacaaccggcatccccaacgccattcgcggagtcgtttggcaagtgcttgctcaaagcaaggatgatgagctcgagatgacatacagagaattggtggctcgtggaaccgataaggagtttagaaaaagcaatggcacagcagccagtagtgtcagtgccgaaaaggatactgtagcatcttcggcatcctccatcacgtctgaacggtctggcggcagcggcaaaaaactgccgagcccgccgccccctgaaaccgaggttgccgtcaaggccccagctctttccgctgccgagaaacagaaggctctccagcaactcgagaaggtcataaggagagatctcggggctcggacaagctactcaaaacatgcggcggcagcaggcttacaagagggcctgtttggtgtttgcaaagcctatgccttgtacgacgccgaggtaggatatgcgcagggcatgaatttcctcatcatgcccctccttttcaacatgcccgaagaagaagcattctgtcttcttgtccggctgatgaaagagtacaagctgcgggatctttttgttcaggacatgcctggactccacatgcacttgcatcaatttgagcgcttactggaagatttcgagccggcgctttactgtcatcttcatcgtcgaggcatatctcctcatctctacgccacccaatggttcttaactctatttgcatacagatttccactccaattggtgttgaggatctatgacctcatcctgtccgagggcctttctgctatccttcggtttggcatcgtgctcatgcaaaaaaatgcttctacgctgctcggcatgtctgatatgtcacagctcaccgtcttcctcaaggacaagattttcgatgtctatattgaccagtcgccaagcgcaggaagtatccttgaaaacgggttcttcggcagcagctcttccaatgtcgataaagaggtctatcgagccgatcaactcgttcgagacgcatgtgaggtcaaattcactcctgaactgctcaagacctacgctgctgagtgggaagaaaagacacgggtagaaaaagagcgtgaacaggaactcgtgcagttacggacggccaacgccaagttcgcgaagcgggtccgcgaactagaggatcgcatcgcagcgaccgatcgtgagcaagcagatgtaatgaaccaactagtacaccaccaagtggagaatgaggagctcaaggataagaacgagtccctctctggtcaagtcaaggagctccgaaacgtcattgaaaagcagcctatggagattgaaggaaagtggcgtaaggagcggaatagcctcatggagcggaacgcgactgtgcatgatctgaatatacaacttgaacaggagaaggccggtctcgaggagcaattagtacggacgaagatggaacatgcagaggtcaactctgagcatgaggctcttaagcaaaagtggcaggacctcaagcgccacatcacttga

SEQ ID NO: 20000 - protein, 891 aa, Muscodor strobelii
  misc_feature: SGI Peptide ID NO. 566738
  misc_feature (467)..(670): Pfam Id: PF00566 Pfam Desc: TBC domain
  misc_feature (533)..(670): Pfam Id: PF00566 Pfam Desc: TBC domain
  misc_feature (16)..(890): NCBI GI: 46107498 Blast Desc: FG00632.1 [Gibberella zeae PH-1]
  misc_feature (21)..(890): NCBI GI: 164423477 Blast Desc: NCU08499 [Neurospora crassa OR74A] gi|157070109|gb|EAA34192.2| conserved [Neurospora crassa OR74A]
  misc_feature (27)..(888): NCBI GI: 154316654 Blast Desc: BC1G_04258 [Botryotinia fuckeliana B05.10] gi|150846058|gb|EDN21251.1| BC1G_04258 [Botryotinia fuckeliana B05.10]
  misc_feature (163)..(890): NCBI GI: 256734663 Blast Desc: NECHADRAFT_30754 [Nectria haematococca mpVI 77-13-4]
  misc_feature (22)..(888): NCBI GI: 156043417 Blast Desc: SS1G_10712 [Sclerotinia sclerotiorum 1980] gi|154695099|gb|EDN94837.1| SS1G_10712 [Sclerotinia sclerotiorum 1980]
  misc_feature (27)..(890): NCBI GI: 171689268 Blast Desc: protein product [Podospora anserina] gi|170944596|emb|CAP70707.1| protein product [Podospora anserina]
  misc_feature (15)..(890): NCBI GI: 116204557 Blast Desc: CHGG_10162 [Chaetomium globosum CBS 148.51] gi|88176290|gb|EAQ83758.1| CHGG_10162 [Chaetomium globosum CBS 148.51]
  misc_feature (27)..(890): NCBI GI: 145608256 Blast Desc: MGG_03253 [Magnaporthe grisea 70-15] gi|145015750|gb|EDK00240.1| MGG_03253 [Magnaporthe grisea 70-15]
  misc_feature (203)..(890): NCBI GI: 189200060 Blast Desc: GTPase-activating protein GYP5 [Pyrenophora tritici-repentis Pt-1C-BFP] gi|187983466|gb|EDU48954.1| GTPase-activating protein GYP5 [Pyrenophora tritici-repentis
  misc_feature (15)..(886): NCBI GI: 169608842 Blast Desc: SNOG_07506 [Phaeosphaeria nodorum SN15] gi|160701726|gb|EAT84972.2| SNOG_07506 [Phaeosphaeria nodorum SN15]
  misc_feature: Useful for introducing or modulating the production of volatile compounds
MATPEDPVSGSSPPRDDSPTPSDRDTDAFEDAVDTGSVRSLTNRKASQTKVPQLSSPDAETVPDLPETHAETLKTIEPAAERNAETADHANDILTDTTNSARSSKRISSTTLDNVDLDENASSEQPKGSVLPEIVARSRETSAERTVVTAEQPAPQIVRQPTKKLSLSNITASLPSMPWSPNPDSPPKTSPSVPTASNAPLPPPPPPTRKITSPFAWLSRNSTQKENSVTSPPATTAGSPRRNTASSVATLTSNPEMMLSKLEEEGETGGANGKSRPQRNSLRDRFKMVRLREEAGISLDPSDEDKSHGAVANLIVRSATMSPGAENAPDFQGPTSPLPPSTDTKLAPGTVSGVSAGPSAIADAPVDWDLWQSVVYEGPAAVARTSPEELNRAITTGIPNAIRGVVWQVLAQSKDDELEMTYRELVARGTDKEFRKSNGTAASSVSAEKDTVASSASSITSERSGGSGKKLPSPPPPETEVAVKAPALSAAEKQKALQQLEKVIRRDLGARTSYSKHAAAAGLQEGLFGVCKAYALYDAEVGYAQGMNFLIMPLLFNMPEEEAFCLLVRLMKEYKLRDLFVQDMPGLHMHLHQFERLLEDFEPALYCHLHRRGISPHLYATQWFLTLFAYRFPLQLVLRIYDLILSEGLSAILRFGIVLMQKNASTLLGMSDMSQLTVFLKDKIFDVYIDQSPSAGSILENGFFGSSSSNVDKEVYRADQLVRDACEVKFTPELLKTYAAEWEEKTRVEKEREQELVQLRTANAKFAKRVRELEDRIAATDREQADVMNQLVHHQVENEELKDKNESLSGQVKELRNVIEKQPMEIEGKWRKERNSLMERNATVHDLNIQLEQEKAGLEEQLVRTKMEHAEVNSEHEALKQKWQDLKRHIT

SEQ ID NO: 20001 - DNA, 3785 bp, Muscodor strobelii
  misc_feature: SGI EST ID NO. CUFF.46883.0
  misc_feature: Variant of the nucleotide sequence at SEQ ID NO 19999
aagggacgtgaacaaacctcattttctttgctcttccctcccatcaccgacacacaatagccaactaactgacggtcatcctgactggttctcggatctctcgctgccctacactttcattgatatcaacagcagacagcatctggtagtcttgccagtcgtgacaaccgcagcaaatcgacatcgacctgcctatttatctgatacgctgcctgccaatggccgagacgccgtcttgatacaacactgcaacccgtcacttctggcctcaactccgattactgttcctcactaccaaacgctccacgccgcctgaagccctggcgcgggaggcaacatggccactcccgaagaccctgtctctggctcttcgcctccacgagacgattccccaacgccctcggacagggacacggacgcattcgaagacgccgtcgacactggctctgtccgatctctcaccaaccgcaaagcctcccagaccaaggtcccacagctatccagccccgatgccgagacggtccctgatctaccagaaactcatgccgagacactgaaaacgattgagcccgcagcagagagaaacgcagagaccgccgaccacgccaatgacattctcactgacacaacgaattcagcgcggagctcaaagcgcatctcgagcactactctagacaatgttgacctcgacgaaaatgcatcgagtgagcagcccaaaggttcggtcctcccagagattgtcgctcgcagcagagagacatcagctgagcggactgttgtgaccgcagaacaaccagcccctcagatcgtgaggcaacctaccaagaaactctctctcagcaatatcactgctagcttgccttctatgccatggtctcccaatcccgattcgccgcccaagacgagtcctagcgtcccaaccgcctccaacgcgcctttgccccctccgccgccacctactcgaaagattacgagtcccttcgcctggctatcccgcaactctacacaaaaggaaaatagcgttacgtcaccgcctgccacaactgctggctccccaagacgaaacaccgcgagctccgtcgccacactgaccagcaatccggagatgatgttgagcaaactggaggaggagggcgaaacgggcggcgcgaacggcaaaagtcgcccacagagaaatagcttgcgagaccgtttcaagatggtccggttgcgagaggaggcaggcatatctctcgaccccagcgacgaagacaagagccacggagccgtggcaaatttgattgtccgttctgctactatgtcgcctggtgctgaaaacgcacctgatttccaagggccaacgtcgcctctaccacccagcacagatacgaaattagcccctggcaccgtatcaggagtttcagcgggcccctccgccatcgctgatgccccggtagattgggatctttggcaatccgtcgtctacgagggcccagccgccgtagctcggaccagccccgaagaattaaaccgcgccataacaaccggcatccccaacgccattcgcggagtcgtttggcaagtgcttgctcaaagcaaggatgatgagctcgagatgacatacagagaattggtggctcgtggaaccgataaggagtttagaaaaagcaatggcacagcagccagtagtgtcagtgccgaaaaggatactgtagcatcttcggcatcctccatcacgtctgaacggtctggcggcagcggcaaaaaactgccgagcccgccgccccctgaaaccgaggttgccgtcaaggccccagctctttccgctgccgagaaacagaaggctctccagcaactcgagaaggtcataaggagagatctcggggctcggacaagctactcaaaacatgcggcggcagcaggcttacaagagggcctgtttggtgtttgcaaagcctatgccttgtacgacgccgaggtaggatatgcgcagggcatgaatttcctcatcatgcccctccttttcaacatgcccgaagaagaagcattctgtcttcttgtccggctgatgaaagagtacaagctgcgggatctttttgttcaggacatgcctggactccacatgcacttgcatcaatttgagcgcttactggaagatttcgagccggcgctttactgtcatcttcatcgtcgaggcatatctcctcatctctacgccacccaatggttcttaactctatttgcatacagatttccactccaattggtgttgaggatctatgacctcatcctgtccgagggcctttctgctatccttcggtttggcatcgtgctcatgcaaaaaaatgcttctacgctgctcggcatgtctgatatgtcacagctcaccgtcttcctcaaggacaagattttcgatgtctatattgaccagtcgccaagcgcaggaagtatccttgaaaacgggttcttcggcagcagctcttccaatgtcgataaagaggtctatcgagccgatcaactcgttcgagacgcatgtgaggtcaaattcactcctgaactgctcaagacctacgctgctgagtgggaagaaaagacacgggtagaaaaagagcgtgaacaggaactcgtgcagttacggacggccaacgccaagttcgcgaagcgggtccgcgaactagaggatcgcatcgcagcgaccgatcgtgagcaagcagatgtaatgaaccaactagtacaccaccaagtggagaatgaggagctcaaggataagaacgagtccctctctggtcaagtcaaggagctccgaaacgtcattgaaaagcagcctatggagattgaaggaaagtggcgtaaggagcggaatagcctcatggagcggaacgcgactgtgcatgatctgaatatacaacttgaacaggagaaggccggtctcgaggagcaattagtacggacgaagatggaacatgcagaggtcaactctgagcatgaggctcttaagcaaaagtggcaggacctcaagcgccacatcacttgagcaccttactgagcacttgtagttgcaatgtcttcgacatcttcggtacatggttcacatgcacctcatccctgtacaaccacacagccttcttcaccccctttcttgatgcccatattggagttggtcagcatgcacgcgagagccggacactattttgatttttgtctgcgcttggcgtttgtggggatgaacaagaaaacagacggaattagacggccgaacaaaccgccacctggagagagcagtccagacctgatcagatcagatcagatggcgaccaggtacgccttatgaaagcgatatgcacgatatgatgtatggttcggggagatggcctttgtcgttgggtttatggagtagtatagctatgagacgagtacatacgagcagtatggtctcacttggactgactgccaggtgtatatgataggaatatcattgtatagcaatacagagacaaatacagactcatgagctgaatatccttgtctcacggaggtgagactggtgatcgtgaaactttctagctaacttccgaacagactgacgaatgacgctggtatatatatatatacgactaaactcctatatcgtgcttccaaaagggcgccgtatcgcttcatgggggaacaagagtatgtgggccacttcgtgacaccttaagtctttacaaactcatcatatatcatcagtagctgcaggttagacgtggtagacactgtgttaatatgatcgcataagagacgtgcctatccgctctcgattctct

SEQ ID NO: 20002 - DNA, 609 bp, Muscodor strobelii
  misc_feature: SGI cDNA ID NO. 566739
  misc_feature: Reduced expression when VOC is produced
  misc_feature: Encodes the peptide sequence at SEQ ID NO 20003
atgggtatctcacgcgactcccgccacaagcgttccgcctccggtgcgaagcgagcctactaccggaagaagcgcgctttcgaggccggccgccaggaggccaacacccgtatcggccccaagcgaatccacaccgtccgcacccgcggcggtaaccacaagtaccgtgccctgcgtctcgactcgggcaacttcgcctgggcctccgagggctgcacccgcaagacccgtgtcatcgtcgtcgcctaccacccttccaacaacgagctggtccgcaccaacaccctgaccaagtccgccgttgtccagatcgacgccgctcccttccgtcagtggtacgaggcccactacggtcagtccatcggccgtagacgccagcagaagtccggcaaggaggaggaggccgtcaagaagagcagctccgtcgagaagaagcaggctgcccgcttcgccgcccagggcaaggtcgaggccgccatcgagaagcagttcgaggccggtcgtctcttcgccgtcatcgccagccgacccggccagagcggtcgctgcgacggctacatcctcgagggtgaggagctcgctttctaccagcgcaagctccacaagtag

SEQ ID NO: 20003 - protein, 202 aa, Muscodor strobelii
  misc_feature: SGI Peptide ID NO. 566739
  misc_feature (1)..(188): Pfam Id: PF01201 Pfam Desc: Ribosomal protein S8e
  misc_feature (1)..(202): NCBI GI: 46107496 Blast Desc: FG00631.1 [Gibberella zeae PH-1]
  misc_feature (1)..(202): NCBI GI: 116204559 Blast Desc: conserved [Chaetomium globosum CBS 148.51] gi|88176291|gb|EAQ83759.1| conserved [Chaetomium globosum CBS 148.51]
  misc_feature (1)..(202): NCBI GI: 85110376 Blast Desc: 40S ribosomal protein S8 [Neurospora crassa OR74A] gi|16944654|emb|CAB92705.2| ribosomal protein Rps8bp [Neurospora crassa] gi|28925109|gb|EAA34193.1| 40S ribosomal protein S8
  misc_feature (1)..(202): NCBI GI: 261357038 Blast Desc: 40S ribosomal protein S8-B [Verticillium albo-atrum VaMs.102]
  misc_feature (1)..(201): NCBI GI: 171689276 Blast Desc: protein product [Podospora anserina] gi|170944600|emb|CAP70711.1| protein product [Podospora anserina]
  misc_feature (1)..(202): NCBI GI: 258565719 Blast Desc: 40S ribosomal protein S8-A [Uncinocarpus reesii 1704] gi|237907305|gb|EEP81706.1| 40S ribosomal protein S8-A [Uncinocarpus reesii 1704]
  misc_feature (1)..(202): NCBI GI: 242802541 Blast Desc: 40S ribosomal protein S8e [Talaromyces stipitatus ATCC 10500] gi|218717337|gb|EED16758.1| 40S ribosomal protein S8e [Talaromyces stipitatus ATCC 10500]
  misc_feature (1)..(202): NCBI GI: 115390907 Blast Desc: 40S ribosomal protein S8-B [Aspergillus terreus NIH2624] gi|114193882|gb|EAU35582.1| 40S ribosomal protein S8-B [Aspergillus terreus NIH2624]
  misc_feature (1)..(202): NCBI GI: 212540236 Blast Desc: 40S ribosomal protein S8e [Penicillium marneffei ATCC 18224] gi|210067572|gb|EEA21664.1| 40S ribosomal protein S8e [Penicillium marneffei ATCC 18224]
  misc_feature (1)..(202): NCBI GI: 145228883 Blast Desc: An01g03160 [Aspergillus niger] gi|134054842|emb|CAK43682.1| protein product [Aspergillus niger]
  misc_feature: Useful for introducing or modulating the production of volatile compounds
MGISRDSRHKRSASGAKRAYYRKKRAFEAGRQEANTRIGPKRIHTVRTRGGNHKYRALRLDSGNFAWASEGCTRKTRVIVVAYHPSNNELVRTNTLTKSAVVQIDAAPFRQWYEAHYGQSIGRRRQQKSGKEEEAVKKSSSVEKKQAARFAAQGKVEAAIEKQFEAGRLFAVIASRPGQSGRCDGYILEGEELAFYQRKLHK

SEQ ID NO: 20004 - DNA, 1073 bp, Muscodor strobelii
  misc_feature: SGI EST ID NO. CUFF.47504.2
  misc_feature: Variant of the nucleotide sequence at SEQ ID NO 20002
cccacatttgccagagaaattcacccccagagtttctatcgtttgtctttttgccctctccgtcgacaactccattccgcctcaccaccaccattcgccaaccctcctcggtcgattgccattgatataatcagcaatcatgggtatctcacgcgactcccgccacaagcgttccgcctccggtgcgaagcgagcctactaccggaagaagcgcgctttcgaggccggccgccaggaggccaacacccgtatcggccccaagcgaatccacaccgtccgcacccgcggcggtaaccacaagtaccgtgccctgcgtctcgactcgggcaacttcgcctgggcctccgagggctgcacccgcaagacccgtgtcatcgtcgtcgcctaccacccttccaacaacgagctggtccgcaccaacaccctgaccaagtccgccgttgtccagatcgacgccgctcccttccgtcagtggtacgaggcccactacggtcagtccatcggccgtagacgccagcagaagtccggcaaggaggaggaggccgtcaagaagagcagctccgtcgagaagaagcaggctgcccgcttcgccgcccagggcaaggtcgaggccgccatcgagaagcagttcgaggccggtcgtctcttcgccgtcatcgccagccgacccggccagagcggtcgctgcgacggctacatcctcgagggtgaggagctcgctttctaccagcgcaagctccacaagtagacgcatcgcctagctacgtgaggacgcaggggaagaggtacagaggaagaaaaatcgaggtgacactttgcacccatgagtatgagatgattgcgatattccccgcactggaaatggtgttcacggattgattcggctcgcttacaagcatgggaagggatcgcttctattaggtcaacatcaataaaagattggccacaatgaatggcattcgaggcagatacaacggcgttaatgtgcttatgactgtatgaatacagtacgattcccaagttcaaacattctgcctacctctctcggtccatgaattgccaatgttcccagg

SEQ ID NO: 20005 - DNA, 1578 bp, Muscodor strobelii
  misc_feature: SGI cDNA ID NO. 566740
  misc_feature: Encodes the peptide sequence at SEQ ID NO 20006
atgtctacaatcaccaaaacagatacatcaacctggcagagcgacgtcgcttgcccacagcctctcagtcccaagaaaatggctgagattcgcaacgcgctgactgcgatgacggctgcatcagagcgtgccgcctcgactgcaacttggtcggccgtggcgtcgcgacctcccagcgccaaagcaccttctccggtcaaacctcgaaaggtccttcaggttccccacggcttctccgcaatcgagcgtgagcaggtctacacgggtctaacatggccccagaagattccaaagcccctgagctacgacatagaccccgaatacatcgccgcatgcaatgtagcgtacgccaaagaaatcgctgcgctgcgtcaactgcgcatgtccccgagcactggtaatggactgatcgtcgccctcaacaagcatgtggtcgaagcagaaatcgagcatgctaagcgcaaggagatcgacgagcccgtgagtggccttcgtgcggcaatcaaggcggctgctatcgcgggagctgctagaaccggctcggatcgagacaaagcaagaaacgcacgtctcgccgctttcaacgctggacaattgatcgatagcaacacgagtggtgtatggtacaagcagggccatcagcgtgctatcatcccgttcaagcattatcatccgcgctgcccgagctggctcacctactatgacgagaaagacgaagaagaagaccggcggcgccatatcatggaatcctacggtgttagtgagcctccttctgagcaagatctggagtcttgtgtggaatccgacccggagagtgatgatacagtggcatccgtcatgggtgggtactgtacaagtgatgacgttcagaagatgagccatgagcaagccagttcgatggcttcaccttcgccttctctggcacagcaatatcaccatcaggcaatctatgagtatctaactaccggagagcaaccacgccagatgacctctcaattccctatcatcacacagcaacatcatcaaacaatcagccaggatccaagcgagggagccgcagtgtaccaattttcgacccaggtatggtcgggcttgcctaattacccaatgtatcctatgatggatcttcagaccggacaaacagtaaaggcccatggagcgattgctactacatccgatctggagccgattctcgtatatgaccctgttgtcggtgcttacacagagacggaggagtccatgcagtatcgacagcagcatgcggccacgatccaaagccatgtcagtgctggacaacctctgggtcagccagatggtaatgtcacccaggatcaacatcaatcctacacggtctcgagcccttccatctggactgacaatggatcactttacggacttgactggcctagcactggtgatatgaagcgcgaagctgagatgcgcatcaagttcggacagaatcccatcttgcctgtgccgcgatctcagcgcatgaatatgcaagctgaagtggaggaagctgcccgtgaggctgcccgcttacttcaagaggctgccattgccgcagaggatcagtag

SEQ ID NO: 20006 - protein, 525 aa, Muscodor strobelii
  misc_feature: SGI Peptide ID NO. 566740
MSTITKTDTSTWQSDVACPQPLSPKKMAEIRNALTAMTAASERAASTATWSAVASRPPSAKAPSPVKPRKVLQVPHGFSAIEREQVYTGLTWPQKIPKPLSYDIDPEYIAACNVAYAKEIAALRQLRMSPSTGNGLIVALNKHVVEAEIEHAKRKEIDEPVSGLRAAIKAAAIAGAARTGSDRDKARNARLAAFNAGQLIDSNTSGVWYKQGHQRAIIPFKHYHPRCPSWLTYYDEKDEEEDRRRHIMESYGVSEPPSEQDLESCVESDPESDDTVASVMGGYCTSDDVQKMSHEQASSMASPSPSLAQQYHHQAIYEYLTTGEQPRQMTSQFPIITQQHHQTISQDPSEGAAVYQFSTQVWSGLPNYPMYPMMDLQTGQTVKAHGAIATTSDLEPILVYDPVVGAYTETEESMQYRQQHAATIQSHVSAGQPLGQPDGNVTQDQHQSYTVSSPSIWTDNGSLYGLDWPSTGDMKREAEMRIKFGQNPILPVPRSQRMNMQAEVEEAAREAARLLQEAAIAAEDQ

SEQ ID NO: 20007 - DNA, 687 bp, Muscodor strobelii
  misc_feature: SGI EST ID NO. CUFF.46820.0
  misc_feature: Variant of the nucleotide sequence at SEQ ID NO 20005
gttagtgagcctccttctgagcaagatctggagtcttgtgtggaatccgacccggagagtgatgatacagtggcatccgtcatgggtgggtactgtacaagtgatgacgttcagaagatgagccatgagcaagccagttcgatggcttcaccttcgccttctctggcacagcaatatcaccatcaggcaatctatgagtatctaactaccggagagcaaccacgccagatgacctctcaattccctatcatcacacagcaacatcatcaaacaatcagccaggatccaagcgagggagccgcagtgtaccaattttcgacccaggtatggtcgggcttgcctaattacccaatgtatcctatgatggatcttcagaccggacaaacagtaaaggcccatggagcgattgctactacatccgatctggagccgattctcgtatatgaccctgttgtcggtgcttacacagagacggaggagtccatgcagtatcgacagcagcatgcggccacgatccaaagccatgtcagtgctggacaacctctgggtcagccagatggtaatgtcacccaggatcaacatcaatcctacacggtctcgagcccttccatctggactgacaatggatcactttacggacttgactggcctagcactggtgatatgaagcgcgaagctgagatgcgc

SEQ ID NO: 20008 - DNA, 1797 bp, Muscodor strobelii
  misc_feature: SGI cDNA ID NO. 566741
  misc_feature: Elevated expression when VOC is produced
  misc_feature: Encodes the peptide sequence at SEQ ID NO 20009
atgtggcctgctctaccccagtacaactatgtgttcgccatcggcacgttgttcgctctgctcgatgcgttcaacaacggcgctaacgatgttgcaaattcttgggctaccagtgtttcctctcggtccatctcataccggcaggctatgctgttcggtctcgttttcgagcttctaggtgccattaccgtcggtgcgagaaccgcagatacgatcaagaatggaattatcccgctctcagctttcagaggcgacgctggtgttcagatgctagctttcacgtgcgctcttgttgctgcttcctcatgggtgatgtggtgtaccagacactccacccacgtttcgtcgacctattcgctcatttccgctgtcgccggtgttggtgttgccctggctggcgcggatgaagttcactggggctggaacaacgggaaaggtttgggtgctatcttcgcaggtcttgtcatcgcacccatcgcctctggtggctttgctgccttcatcttcttgctcatcaagctcaccgttcacattcgcaagaaccctacaccttgggctgtatggacttcgcccgctttcttcttcatcgtcggtactatcttgactttgtccatcgttttcaagggatcgccgaaccttggtctgaccaagaagcctgattactggcttgctggtgttatcttgggctccggcgctgccttagccctcctttcggccatattcttcctgccctacgtccacactgtcgtgatcaagaaagaccaatccctcaaatggtgggagttcctcaagggccctctcttgttcaagagaccttacgtcgaaggcgctgagtcagctaaggttcggaactatgccgttgtccagaaggacgaggacgacgactcctcgactcaatctgcaggttctgtgagagacgttgatagtggctcaaacgcggaccatgagaagtccatggttgttaacgaggccaaggagaccaactacaagcagcttttggaagatggtgacgccaagcacaaggctaagctgtgcaagagccggggccctattggatgggctatgagaactcttcgcgacaaccccatgcacgctggtgagatctacgagcttaagaatatgaaggcattggcgatccgtcttcctgccatgatcgttgcaaccctcctctacggctttcattatgatatccacactgctcaaagtggcgtccatggtacgcctgacggaaagcgcatggcggcagtctacgcacacgccgagaaataccccaacgaggtcgagcatctttattccttcgtccagattctcactgcctgtaccgcctctttcgctcacggagctaacgacatcggcaactctgttggcccttgggctgcgatctactcggcttggacaactaacgacgcgaccaagaccaaggctcctgtccctctctggcaacttgctgtccttggcttgactatctctttcggtctcatcacctacggttacaacatcatgaaagtcatgggtaacaagatcacgtaccactcgcctagcagaggtacttctatggagctcggggccgccatcaccgtccttgtcttctcccagtactcgctcccggtttctacctctatgtgtattactggagctaccgttggtgtcggtctttgcaacggtaccttcaaggctgtcaactggcagcgtgtgcttctcttgcttattggctggatcctcactatccctatcgctggtactctgggtggcgttctcatgggaatcatcctcaacgctcctcatttcgctgcctag

SEQ ID NO: 20009 - protein, 598 aa, Muscodor strobelii
  misc_feature: SGI Peptide ID NO. 566741
  misc_feature (26)..(583): Pfam Id: PF01384 Pfam Desc: Phosphate transporter family
  misc_feature (417)..(583): Pfam Id: PF01384 Pfam Desc: Phosphate transporter family
  misc_feature (26)..(258): Pfam Id: PF01384 Pfam Desc: Phosphate transporter family
  misc_feature (5)..(598): NCBI GI: 159123353 Blast Desc: sodium/phosphate symporter, [Aspergillus fumigatus A1163]
  misc_feature (5)..(598): NCBI GI: 146324872 Blast Desc: sodium/phosphate symporter [Aspergillus fumigatus Af293] gi|129556617|gb|EAL86837.2| sodium/phosphate symporter, [Aspergillus fumigatus Af293]
  misc_feature (5)..(598): NCBI GI: 119483116 Blast Desc: sodium/phosphate symporter, [Neosartorya fischeri NRRL 181] gi|119409741|gb|EAW19689.1| sodium/phosphate symporter, [Neosartorya fischeri NRRL 181]
  misc_feature (5)..(598): NCBI GI: 212539516 Blast Desc: sodium/phosphate symporter, [Penicillium marneffei ATCC 18224] gi|210067212|gb|EEA21304.1| sodium/phosphate symporter, [Penicillium marneffei ATCC 18224]
  misc_feature (5)..(598): NCBI GI: 169765698 Blast Desc: [Aspergillus oryzae RIB40] gi|238482281|ref|XP_002372379.1| sodium/phosphate symporter, [Aspergillus flavus NRRL3357] gi|83765175|dbj|BAE55318.1| protein
  misc_feature (4)..(598): NCBI GI: 255953161 Blast Desc: Pc21g02690 [Penicillium chrysogenum Wisconsin 54-1255] gi|211589044|emb|CAP95166.1| Pc21g02690 [Penicillium chrysogenum Wisconsin 54-1255]
  misc_feature (5)..(598): NCBI GI: 115383670 Blast Desc: conserved [Aspergillus terreus NIH2624] gi|114196074|gb|EAU37774.1| conserved [Aspergillus terreus NIH2624]
  misc_feature (4)..(596): NCBI GI: 226288349 Blast Desc: phosphate-repressible phosphate permease [Paracoccidioides brasiliensis Pb18]
  misc_feature (5)..(596): NCBI GI: 242804311 Blast Desc: sodium/phosphate symporter, [Talaromyces stipitatus ATCC 10500] gi|218717694|gb|EED17115.1| sodium/phosphate symporter, [Talaromyces stipitatus ATCC 10500]
  misc_feature (5)..(598): NCBI GI: 39944480 Blast Desc: MGG_04251 [Magnaporthe grisea 70-15] gi|145015000|gb|EDJ99568.1| MGG_04251 [Magnaporthe grisea 70-15]
  misc_feature: Useful for introducing or modulating the production of volatile compounds
MWPALPQYNYVFAIGTLFALLDAFNNGANDVANSWATSVSSRSISYRQAMLFGLVFELLGAITVGARTADTIKNGIIPLSAFRGDAGVQMLAFTCALVAASSWVMWCTRHSTHVSSTYSLISAVAGVGVALAGADEVHWGWNNGKGLGAIFAGLVIAPIASGGFAAFIFLLIKLTVHIRKNPTPWAVWTSPAFFFIVGTILTLSIVFKGSPNLGLTKKPDYWLAGVILGSGAALALLSAIFFLPYVHTVVIKKDQSLKWWEFLKGPLLFKRPYVEGAESAKVRNYAVVQKDEDDDSSTQSAGSVRDVDSGSNADHEKSMVVNEAKETNYKQLLEDGDAKHKAKLCKSRGPIGWAMRTLRDNPMHAGEIYELKNMKALAIRLPAMIVATLLYGFHYDIHTAQSGVHGTPDGKRMAAVYAHAEKYPNEVEHLYSFVQILTACTASFAHGANDIGNSVGPWAAIYSAWTTNDATKTKAPVPLWQLAVLGLTISFGLITYGYNIMKVMGNKITYHSPSRGTSMELGAAITVLVFSQYSLPVSTSMCITGATVGVGLCNGTFKAVNWQRVLLLLIGWILTIPIAGTLGGVLMGIILNAPHFAA

SEQ ID NO: 20010 - DNA, 2376 bp, Muscodor strobelii
  misc_feature: SGI EST ID NO. CUFF.46860.0
  misc_feature: Variant of the nucleotide sequence at SEQ ID NO 20008
attcacgcttgttgcgtgccgcaacgccaagaatgcttgagaagctcggatgtgtcgatgctgggtaggggcgaagacatgaactctcgggtccttggcaccttgcgttgtatcctacgcggacacataaatcctggaggtccctcgcccttccctgtgtctcctttcccttgtcccgtcatctgcattgcttgtcaaccacttcccatctgactgctctgatctgtcgacaagatgtggcctgctctaccccagtacaactatgtgttcgccatcggcacgttgttcgctctgctcgatgcgttcaacaacggcgctaacgatgttgcaaattcttgggctaccagtgtttcctctcggtccatctcataccggcaggctatgctgttcggtctcgttttcgagcttctaggtgccattaccgtcggtgcgagaaccgcagatacgatcaagaatggaattatcccgctctcagctttcagaggcgacgctggtgttcagatgctagctttcacgtgcgctcttgttgctgcttcctcatgggtgatgtggtgtaccagacactccacccacgtttcgtcgacctattcgctcatttccgctgtcgccggtgttggtgttgccctggctggcgcggatgaagttcactggggctggaacaacgggaaaggtttgggtgctatcttcgcaggtcttgtcatcgcacccatcgcctctggtggctttgctgccttcatcttcttgctcatcaagctcaccgttcacattcgcaagaaccctacaccttgggctgtatggacttcgcccgctttcttcttcatcgtcggtactatcttgactttgtccatcgttttcaagggatcgccgaaccttggtctgaccaagaagcctgattactggcttgctggtgttatcttgggctccggcgctgccttagccctcctttcggccatattcttcctgccctacgtccacactgtcgtgatcaagaaagaccaatccctcaaatggtgggagttcctcaagggccctctcttgttcaagagaccttacgtcgaaggcgctgagtcagctaaggttcggaactatgccgttgtccagaaggacgaggacgacgactcctcgactcaatctgcaggttctgtgagagacgttgatagtggctcaaacgcggaccatgagaagtccatggttgttaacgaggccaaggagaccaactacaagcagcttttggaagatggtgacgccaagcacaaggctaagctgtgcaagagccggggccctattggatgggctatgagaactcttcgcgacaaccccatgcacgctggtgagatctacgagcttaagaatatgaaggcattggcgatccgtcttcctgccatgatcgttgcaaccctcctctacggctttcattatgatatccacactgctcaaagtggcgtccatggtacgcctgacggaaagcgcatggcggcagtctacgcacacgccgagaaataccccaacgaggtcgagcatctttattccttcgtccagattctcactgcctgtaccgcctctttcgctcacggagctaacgacatcggcaactctgttggcccttgggctgcgatctactcggcttggacaactaacgacgcgaccaagaccaaggctcctgtccctctctggcaacttgctgtccttggcttgactatctctttcggtctcatcacctacggttacaacatcatgaaagtcatgggtaacaagatcacgtaccactcgcctagcagaggtacttctatggagctcggggccgccatcaccgtccttgtcttctcccagtactcgctcccggtttctacctctatgtgtattactggagctaccgttggtgtcggtctttgcaacggtaccttcaaggctgtcaactggcagcgtgtgcttctcttgcttattggctggatcctcactatccctatcgctggtactctgggtggcgttctcatgggaatcatcctcaacgctcctcatttcgctgcctagacgagttatggcgtcgagctgaatagatttcagacaccaaatggctcacacctgcatctcatccacccacagctgacgaatgatgcgacataaaactacatacccttaatagattttatctcgtactgttgaccatgtgcaatgtatatagtgttcatcgatatcaaatataccctacaatttgcatcttttcaatattgcttcaaatgttatacgtctagatcacgtgccagttagcacgttaaacctgtcggctgcaacatgggtagttgctctcgttttcgttcattcctgtcctaaaccccacgtattgtaagtctgagaagttttagtttctgcttgctg

SEQ ID NO: 20011 - DNA, 3780 bp, Muscodor strobelii
  misc_feature: SGI cDNA ID NO. 566742
  misc_feature: Encodes the peptide sequence at SEQ ID NO 20012
atggccagcgagtccagtttcgggggaggaggcccgccgaatctcaacctgtcccccgaagagaagcgagtctacggaatcctgttccgccaggccgacaccgagaacgtcaacgtcgtcaccggcgagatcgccgtccagttcttcgagaagacaaagctcgactcccgcattctcggcgagatatggcagatagctgaccgagagaaccgggggttcttggaggccggcggcttcggcgtcgcccttcgactcatcggccattgccaggccggccgcgagccctctgcggaactcgccctccagcaaggtcctctgcccaagttcgacggcatcaacatcggcccagccccgacccccgcgcccttacagcaacagggcagcggcaccgcccagatacggataccgcctctgacccccgagaaggtctctcagtatgccgccattttcgaaaaccagaacctgcagcccggcaacgtgctgcctggcgggccagccaagaccatcttcgagaagtcgcagctccccaacgaggttctggggcgtatctggcaacttgccgacaccgagcagagaggcggtctggttctgacagagttcgtcatcgccatgcatcttctgacttctatgaagacgggtgccctgcgaggtttgcccagtattcttcccgccggcctgtatgaggcggccacaagacgtgctcctacatcagctcgacaaagtccgacagctgctggaccccctgtatccgccataccgcgacagttgagtggacaagcccagcctcggacgagcagccccttgggccgaccacctatgggccctcaagccctgggcttaccccctcagacaatcggaagcgactgggccatctcgccaactgacaaagcaaagtacgaccaattctacgctgacctagataagaccaacaagggttacattactggagaagaagctgtcccctttctcagccagtcaagattatccgaggatgccttggcccaaatttgggatctggcagacgtcaactcggaaggccagctcaccaaagataccttcgctgtcgcgatgtatcttattcgtcagcagcgcaccaagccgagcccgctgcctaccacgctacctgcgaacctgatcccgccgtctctgagaagccaggctcggccacctgttgggccctcgccttttgatgctcctgtgacggcgccagcacctatacctgcgcctcctccaccgacagcacccaaatctgccctagatgatctgtttggactcgatgcttcgcccagcccagctcccgcgcagggatccttatctccacaagggactggtgctttcgcgggcgcaaagccgacatcccctattcagtcctcgccaaccgggaataccttcaagccattcataccatcctcttcgtttggaagaactctgacagcacacgacactggaggctctggcagttcagccccggcttccaagccgtccaacatggaagatctccttggagacaacgaccctgaaatcagcaagaagctgacaaacgagacggcggagctggcgaacctgtctaatcagattggctctttgtccaaacagatgcaacaggttcagggacagcgcggtacaacccagactgaaattaatcaggccagtgagcagaagaagaatttcgagcagcgattatcgcaattgcgcacgctgtacgagaaggaggtcaaggaggtccgagttttggaagaccagctcaagacgatccgcgacgaaacgagaaagctcactcatgagatggtctccattgacggaaactacaaagacatccagactcaacaccaacaactctctcaagcactgcaagctgatcaacaagagaatgccaatctcaagcaacgcattagctctgtcaacgctgaagtagcccaattgaaaccgcagattgagaagcttaaatccgaggcacgtcaacataaaggtcttgtagctatcaacaagaaacagttgtcgaccgttgaaggagagcgtgacaagctccagtccgagatcgaggacttgaccaagagcaacgaagagttatcacgacaggcgagcgccagctctccggttgccgctccggctcaagtggccagtcctgcgccgtcaacgacaagtgctaataatcctttcttccggcgcacaggaagctcagacatcatgggtgccttcgcgtctccagctgctaagtcgtacaatgagaagtcctttgatgaaatctttggcggcttttcgcagagcaattcgggcactccaccgccggcaactacattcaaacctcaaaccactggcacctcgtctgctagtgtcggatccttcgccacgcctattggttctactccaaccatgagccgtcaggggacctcgaatgcggaggctactggatcagagtcacgacagccgggctcgccattcctccctttcagtgatgcttctgaatcttcagcacctgcacacccagggtcaccaccttttcctaaaactctcgaaccggctcccacaggccagagcaccacctcagcctcggacgcgggtcagagcctgaagcccgcccaatccgaacatccagaagctaaggatgttgcctcaactaatggctcggccgttgatgccttctcagatgagacgccaacgcccagcgcccccaagacaacattcagccaccgtgacagtgatccatttgcaggcatgaaagacacgggcaactccaaggttgacttcgattctgcctttgctggtttctccacctcatcgaacaagcctcaggataaacccaaagactcatccaatgcgttttctagcttcaacacagagttccccccaatttccgaactggaacgagatgatgaatcggactctgcaagcgaagggaatcgattcgaggatgacttcacatcggtttccccacccaggaagaccacgaacgatgctaatgctacatcagcgtctaacaccgcaaaagctgtagcatttgcaccagaaacttcagctgtcgagaatactacagccaagacgcactcatctcaaccctccaacctcagtgacctctctgctttccctgaaccccccaaagtctcacccacctttccctcccctaccaaggtagaaagcccatttgccactgcatcgaatacgacatccaacactggacctcccacatctaagagtgcgttcgatgagctagatgccgacttcgaagggctggaagatgctaaggaaggctccgccgacgacgagtttgccaatatttcaagatctaaccttgatgacttcaaccccgtcttcgacagcagcccaccacccagtcagactcgaacagactcctcgactgtgtcaaaggcatttggaacggaaagcagctatgactttggtaacttatcccaggcgtctactgataccgctaacgccactcctgtcgcaaacactggatcgtccgctaccgggtctggtcaagggcctacgccgcccgataatcatgactgggatgccatttttgccagtctagactctcctagcgatgctgctcctgagaagaagagtagcgatgagccgaagagccccactcagaatctgagcgcagaacgaccaggatttcccagcggtcgggcattgacagatgagggtcagcatgatgatccaatcttaaaaaatctgacgggcatggggtattcaagagcagatgcgctgaatgcgctggagaaatatgattacaacttggagagggctgcaaatttccttgctagcaagagttga

SEQ ID NO: 20012 - protein, 1259 aa, Muscodor strobelii
  misc_feature: SGI Peptide ID NO. 566742
  misc_feature (1219)..(1255): Pfam Id: PF00627 Pfam Desc: UBA/TS-N domain
  misc_feature (13)..(1259): NCBI GI: 256732979 Blast Desc: NECHADRAFT_38874 [Nectria haematococca mpVI 77-13-4]
  misc_feature (11)..(1259): NCBI GI: 145606110 Blast Desc: MGG_06649 [Magnaporthe grisea 70-15] gi|145013837|gb|EDJ98478.1| MGG_06649 [Magnaporthe grisea 70-15]
  misc_feature (62)..(1259): NCBI GI: 171689790 Blast Desc: protein product [Podospora anserina] gi|170944857|emb|CAP70969.1| protein product [Podospora anserina]
  misc_feature (13)..(1259): NCBI GI: 46121607 Blast Desc: FG05182.1 [Gibberella zeae PH-1]
  misc_feature (14)..(1259): NCBI GI: 261352959 Blast Desc: UBA/TS-N domain-containing protein [Verticillium albo-atrum VaMs.102]
  misc_feature (11)..(1259): NCBI GI: 85110074 Blast Desc: NCU09469 [Neurospora crassa OR74A] gi|28924894|gb|EAA33988.1| conserved [Neurospora crassa OR74A] gi|38524252|emb|CAE75717.1| related to EDE1 protein [Neurospora
  misc_feature (1)..(1250): NCBI GI: 116205309 Blast Desc: CHGG_10538 [Chaetomium globosum CBS 148.51] gi|88176666|gb|EAQ84134.1| CHGG_10538 [Chaetomium globosum CBS 148.51]
  misc_feature (13)..(1258): NCBI GI: 154313199 Blast Desc: BC1G_05601 [Botryotinia fuckeliana B05.10] gi|150849686|gb|EDN24879.1| BC1G_05601 [Botryotinia fuckeliana B05.10]
  misc_feature (13)..(1259): NCBI GI: 156062866 Blast Desc: SS1G_01549 [Sclerotinia sclerotiorum 1980] gi|154696885|gb|EDN96623.1| SS1G_01549 [Sclerotinia sclerotiorum 1980]
  misc_feature (10)..(1259): NCBI GI: 154288450 Blast Desc: [Ajellomyces capsulatus NAm1] gi|150408661|gb|EDN04202.1| [Ajellomyces capsulatus NAm1]
MASESSFGGGGPPNLNLSPEEKRVYGILFRQADTENVNVVTGEIAVQFFEKTKLDSRILGEIWQIADRENRGFLEAGGFGVALRLIGHCQAGREPSAELALQQGPLPKFDGINIGPAPTPAPLQQQGSGTAQIRIPPLTPEKVSQYAAIFENQNLQPGNVLPGGPAKTIFEKSQLPNEVLGRIWQLADTEQRGGLVLTEFVIAMHLLTSMKTGALRGLPSILPAGLYEAATRRAPTSARQSPTAAGPPVSAIPRQLSGQAQPRTSSPLGRPPMGPQALGLPPQTIGSDWAISPTDKAKYDQFYADLDKTNKGYITGEEAVPFLSQSRLSEDALAQIWDLADVNSEGQLTKDTFAVAMYLIRQQRTKPSPLPTTLPANLIPPSLRSQARPPVGPSPFDAPVTAPAPIPAPPPPTAPKSALDDLFGLDASPSPAPAQGSLSPQGTGAFAGAKPTSPIQSSPTGNTFKPFIPSSSFGRTLTAHDTGGSGSSAPASKPSNMEDLLGDNDPEISKKLTNETAELANLSNQIGSLSKQMQQVQGQRGTTQTEINQASEQKKNFEQRLSQLRTLYEKEVKEVRVLEDQLKTIRDETRKLTHEMVSIDGNYKDIQTQHQQLSQALQADQQENANLKQRISSVNAEVAQLKPQIEKLKSEARQHKGLVAINKKQLSTVEGERDKLQSEIEDLTKSNEELSRQASASSPVAAPAQVASPAPSTTSANNPFFRRTGSSDIMGAFASPAAKSYNEKSFDEIFGGFSQSNSGTPPPATTFKPQTTGTSSASVGSFATPIGSTPTMSRQGTSNAEATGSESRQPGSPFLPFSDASESSAPAHPGSPPFPKTLEPAPTGQSTTSASDAGQSLKPAQSEHPEAKDVASTNGSAVDAFSDETPTPSAPKTTFSHRDSDPFAGMKDTGNSKVDFDSAFAGFSTSSNKPQDKPKDSSNAFSSFNTEFPPISELERDDESDSASEGNRFEDDFTSVSPPRKTTNDANATSASNTAKAVAFAPETSAVENTTAKTHSSQPSNLSDLSAFPEPPKVSPTFPSPTKVESPFATASNTTSNTGPPTSKSAFDELDADFEGLEDAKEGSADDEFANISRSNLDDFNPVFDSSPPPSQTRTDSSTVSKAFGTESSYDFGNLSQASTDTANATPVANTGSSATGSGQGPTPPDNHDWDAIFASLDSPSDAAPEKKSSDEPKSPTQNLSAERPGFPSGRALTDEGQHDDPILKNLTGMGYSRADALNALEKYDYNLERAANFLASKS

SEQ ID NO: 20013 - DNA, 4813 bp, Muscodor strobelii
  misc_feature: SGI EST ID NO. CUFF.47092.2
  misc_feature: Variant of the nucleotide sequence at SEQ ID NO 20011
gagcagttgcgttgcagcgggagcttgaagtggcccaacgtgaggtaagtagtgaaaagtagcagtggcagcagtgcaaccagcctccccagaccacctagatcatactacctcaaccaacggcggctagcaactagcaactagcaactagcaacagcgcgcgacatcgccatcttgctatcgccaacccagagctaagctccgtacacctcgttttcctcaagcaaacaaacctcccgccctcccgatcccccctatccgcccagctcccccatccccatcatcgcctcccgagccccggacgctctcgccgtcgaccgccaccgctaggtccaagccgaactcgacctctcatcctggtcgcgcggagccatggccagcgagtccagtttcgggggaggtacgtcgagtctcagagctcttgttggtgtgcttgcgctgacctcgcgtgtccatctgtccaggaggcccgccgaatctcaacctgtcccccgaagagaagcgagtctacggaatcctgttccgccaggccgacaccgagaacgtcaacgtcgtcaccggcgagatcgccgtccagttcttcgagaagacaaagctcgactcccgcattctcggcgagatatggcagatagctgaccgagagaaccgggggttcttggaggccggcggcttcggcgtcgcccttcgactcatcggccattgccaggccggccgcgagccctctgcggaactcgccctccagcaaggtcctctgcccaagttcgacggcatcaacatcggcccagccccgacccccgcgcccttacagcaacagggcagcggcaccgcccagatacggataccgcctctgacccccgagaaggtctctcagtatgccgccattttcgaaaaccagaacctgcagcccggcaacgtgctgcctggcgggccagccaagaccatcttcgagaagtcgcagctccccaacgaggttctggggcgtatctggcaacttgccgacaccgagcagagaggcggtctggttctgacagagttcgtcatcgccatgcatcttctgacttctatgaagacgggtgccctgcgaggtttgcccagtattcttcccgccggcctgtatgaggcggccacaagacgtgctcctacatcagctcgacaaagtccgacagctgctggaccccctgtatccgccataccgcgacagttgagtggacaagcccagcctcggacgagcagccccttgggccgaccacctatgggccctcaagccctgggcttaccccctcagacaatcggaagcgactgggccatctcgccaactgacaaagcaaagtacgaccaattctacgctgacctagataagaccaacaagggttacattactggagaagaagctgtcccctttctcagccagtcaagattatccgaggatgccttggcccaaatttgggatctggcagacgtcaactcggaaggccagctcaccaaagataccttcgctgtcgcgatgtatcttattcgtcagcagcgcaccaagccgagcccgctgcctaccacgctacctgcgaacctgatcccgccgtctctgagaagccaggctcggccacctgttgggccctcgccttttgatgctcctgtgacggcgccagcacctatacctgcgcctcctccaccgacagcacccaaatctgccctagatgatctgtttggactcgatgcttcgcccagcccagctcccgcgcagggatccttatctccacaagggactggtgctttcgcgggcgcaaagccgacatcccctattcagtcctcgccaaccgggaataccttcaagccattcataccatcctcttcgtttggaagaactctgacagcacacgacactggaggctctggcagttcagccccggcttccaagccgtccaacatggaagatctccttggagacaacgaccctgaaatcagcaagaagctgacaaacgagacggcggagctggcgaacctgtctaatcagattggctctttgtccaaacagatgcaacaggttcagggacagcgcggtacaacccagactgaaattaatcaggccagtgagcagaagaagaatttcgagcagcgattatcgcaattgcgcacgctgtacgagaaggaggtcaaggaggtccgagttttggaagaccagctcaagacgatccgcgacgaaacgagaaagctcactcatgagatggtctccattgacggaaactacaaagacatccagactcaacaccaacaactctctcaagcactgcaagctgatcaacaagagaatgccaatctcaagcaacgcattagctctgtcaacgctgaagtagcccaattgaaaccgcagattgagaagcttaaatccgaggcacgtcaacataaaggtcttgtagctatcaacaagaaacagttgtcgaccgttgaaggagagcgtgacaagctccagtccgagatcgaggacttgaccaagagcaacgaagagttatcacgacaggcgagcgccagctctccggttgccgctccggctcaagtggccagtcctgcgccgtcaacgacaagtgctaataatcctttcttccggcgcacaggaagctcagacatcatgggtgccttcgcgtctccagctgctaagtcgtacaatgagaagtcctttgatgaaatctttggcggcttttcgcagagcaattcgggcactccaccgccggcaactacattcaaacctcaaaccactggcacctcgtctgctagtgtcggatccttcgccacgcctattggttctactccaaccatgagccgtcaggggacctcgaatgcggaggctactggatcagagtcacgacagccgggctcgccattcctccctttcagtgatgcttctgaatcttcagcacctgcacacccagggtcaccaccttttcctaaaactctcgaaccggctcccacaggccagagcaccacctcagcctcggacgcgggtcagagcctgaagcccgcccaatccgaacatccagaagctaaggatgttgcctcaactaatggctcggccgttgatgccttctcagatgagacgccaacgcccagcgcccccaagacaacattcagccaccgtgacagtgatccatttgcaggcatgaaagacacgggcaactccaaggttgacttcgattctgcctttgctggtttctccacctcatcgaacaagcctcaggataaacccaaagactcatccaatgcgttttctagcttcaacacagagttccccccaatttccgaactggaacgagatgatgaatcggactctgcaagcgaagggaatcgattcgaggatgacttcacatcggtttccccacccaggaagaccacgaacgatgctaatgctacatcagcgtctaacaccgcaaaagctgtagcatttgcaccagaaacttcagctgtcgagaatactacagccaagacgcactcatctcaaccctccaacctcagtgacctctctgctttccctgaaccccccaaagtctcacccacctttccctcccctaccaaggtagaaagcccatttgccactgcatcgaatacgacatccaacactggacctcccacatctaagagtgcgttcgatgagctagatgccgacttcgaagggctggaagatgctaaggaaggctccgccgacgacgagtttgccaatatttcaagatctaaccttgatgacttcaaccccgtcttcgacagcagcccaccacccagtcagactcgaacagactcctcgactgtgtcaaaggcatttggaacggaaagcagctatgactttggtaacttatcccaggcgtctactgataccgctaacgccactcctgtcgcaaacactggatcgtccgctaccgggtctggtcaagggcctacgccgcccgataatcatgactgggatgccatttttgccagtctagactctcctagcgatgctgctcctgagaagaagagtagcgatgagccgaagagccccactcagaatctgagcgcagaacgaccaggatttcccagcggtcgggcattgacagatgagggtcagcatgatgatccaatcttaaaaaatctgacgggcatggggtattcaagagcagatgcgctgaatgcgctggagaaatatgattacaacttggagagggctgcaaatttccttgctagcaagagttgaacgatttttccttactcagagcgcacatgaggcatgagagagagcgacccaatgcatgagcgttggaacatcggagatacctacttgagattgcttgcttgcatacgaagcgctatcctctccttttgttttcatttgtgcagactatgtttgtgcggtggaaaggggagaaggggaggaatgagggacgggaggggacgggagggaagtaatgtatagttttcctctgtatgtactttctgtgtgaatacaatacgtcgactatcttcgatttacacttcgcctgtactatttcttcatagtgcatgttactgcacgtaatagaagggggcacgggagagagcgaaatttgaagaaaggaaaaaaaaaaaaaaaaaaagttaggcagaagtcgctcgaactcgagacctccaaaaaagacgtctacgaagcgaaggaagtataggcctggaccgttaggtcaacttcactagtcataactaatgagctgtgtgtttgctacttcgctgggaaattgacatgctattcgactatatatacctttgcacctaagcaacagtggcaggcacgtggtcagacgtgggttccggataatcg

SEQ ID NO: 20014 - DNA, 3759 bp, Muscodor strobelii
  misc_feature: SGI cDNA ID NO. 566743
  misc_feature: Encodes the peptide sequence at SEQ ID NO 20015
atggccagcgagtccagtttcgggggaggaggcccgccgaatctcaacctgtcccccgaagagaagcgagtctacggaatcctgttccgccaggccgacaccgagaacgtcaacgtcgtcaccggcgagatcgccgtccagttcttcgagaagacaaagctcgactcccgcattctcggcgagatatggcagatagctgaccgagagaaccgggggttcttggaggccggcggcttcggcgtcgcccttcgactcatcggccattgccaggccggccgcgagccctctgcggaactcgccctccagcaaggtcctctgcccaagttcgacggcatcaacatcggcccagccccgacccccgcgcccttacagcaacagggcagcggcaccgcccagatacggataccgcctctgacccccgagaaggtctctcagtatgccgccattttcgaaaaccagaacctgcagcccggcaacgtgctgcctggcgggccagccaagaccatcttcgagaagtcgcagctccccaacgaggttctggggcgtatctggcaacttgccgacaccgagcagagaggcggtctggttctgacagagttcgtcatcgccatgcatcttctgacttctatgaagacgggtgccctgcgaggtttgcccagtattcttcccgccggcctgtatgaggcggccacaagacgtgctcctacatcagctcgacaaagtccgacagctgctggaccccctgtatccgccataccgcgacagttgagtggacaagcccagcctcggacgagcagccccttgggccgaccacctatgggccctcaagccctgggcttaccccctcagacaatcggaagcgactgggccatctcgccaactgacaaagcaaagtacgaccaattctacgctgacctagataagaccaacaagggttacattactggagaagaagctgtcccctttctcagccagtcaagattatccgaggatgccttggcccaaatttgggatctggcagacgtcaactcggaaggccagctcaccaaagataccttcgctgtcgcgatgtatcttattcgtcagcagcgcaccaagccgagcccgctgcctaccacgctacctgcgaacctgatcccgccgtctctgagaagccaggctcggccacctgttgggccctcgccttttgatgctcctgtgacggcgccagcacctatacctgcgcctcctccaccgacagcacccaaatctgccctagatgatctgtttggactcgatgcttcgcccagcccagctcccgcgcagggatccttatctccacaagggactggtgctttcgcgggcgcaaagccgacatcccctattcagtcctcgccaaccgggaataccttcaagccattcataccatcctcttcgtttggaagaactctgacagcacacgacactggaggctctggcagttcagccccggcttccaagccgtccaacatggaagatctccttggagacaacgaccctgaaatcagcaagaagctgacaaacgagacggcggagctggcgaacctgtctaatcagattggctctttgtccaaacagatgcaacaggttcagggacagcgcggtacaacccagactgaaattaatcaggccagtgagcagaagaagaatttcgagcagcgattatcgcaattgcgcacgctgtacgagaaggaggtcaaggaggtccgagttttggaagaccagctcaagacgatccgcgacgaaacgagaaagctcactcatgagatggtctccattgacggaaactacaaagacatccagactcaacaccaacaactctctcaagcactgcaagctgatcaacaagagaatgccaatctcaagcaacgcattagctctgtcaacgctgaagtagcccaattgaaaccgcagattgagaagcttaaatccgaggcacgtcaacataaaggtcttgtagctatcaacaagaaacagttgtcgaccgttgaaggagagcgtgacaagctccagtccgagatcgaggacttgaccaagagcaacgaagagttatcacgacaggcgagcgccagctctccggttgccgctccggctcaagtggccagtcctgcgccgtcaacgacaagtgctaataatcctttcttccggcgcacaggaagctcagacatcatgggtgccttcgcgtctccagctgctaagtcgtacaatgagaagtcctttgatgaaatctttggcggcttttcgcagagcaattcgggcactccaccgccggcaactacattcaaacctcaaaccactggcacctcgtctgctagtgtcggatccttcgccacgcctattggttctactccaaccatgagccgtcaggggacctcgaatgcggaggctactggatcagagtcacgacagccgggctcgccattcctccctttcagtgatgcttctgaatcttcagcacctgcacacccagggtcaccaccttttcctaaaactctcgaaccggctcccacaggccagagcaccacctcagcctcggacgcgggtcagagcctgaagcccgcccaatccgaacatccagaagctaaggatgttgcctcaactaatggctcggccgttgatgccttctcagatgagacgccaacgcccagcgcccccaagacaacattcagccaccgtgacagtgatccatttgcaggcatgaaagacacgggcaactccaaggttgacttcgattctgcctttgctggtttctccacctcatcgaacaagcctcaggataaacccaaagactcatccaatgcgttttctagcttcaacacagagttccccccaatttccgaactggaacgagatgatgaatcggactctgcaagcgaagggaatcgattcgaggatgacttcacatcggtttccccacccaggaagaccacgaacgatgctaatgctacatcagcgtctaacaccgcaaaagctgtagcatttgcaccagaaacttcagctgtcgagaatactacagccaagacgcactcatctcaaccctccaacctcagtgacctctctgctttccctgaaccccccaaagtctcacccacctttccctcccctaccaaggtagaaagcccatttgccactgcatcgaatacgacatccaacactggacctcccacatctaagagtgcgttcgatgagctagatgccgacttcgaagggctggaagatgctaaggaaggctccgccgacgacgagtttgccaatatttcaagatctaaccttgatgacttcaaccccgtcttcgacagcagcccaccacccagtcagactcgaacagactcctcgactgtgtcaaaggcatttggaacggaaagcagctatgactttggtaacttatcccaggcgtctactgataccgctaacgccactcctgtcgcaaacactggatcgtccgctaccgggtctggtcaagggcctacgccgcccgataatcatgactgggatgccatttttgccagtctagactctcctagcgatgctgctcctgagaagaagagtagcgatgagccgaagagccccactcagaatctgagcgcagaacgaccaggatttcccagcggtcgggcattgacagatgagggtcagcatgatgatccaatcttaaaaaatctgacgggcatggggtattcaagagcagatgcgctgaatgcgctggagaaatatgattacaacttggagagggtagggtga

SEQ ID NO: 20015 - protein, 1252 aa, Muscodor strobelii
  misc_feature: SGI Peptide ID NO. 566743
  misc_feature (13)..(1251): NCBI GI: 256732979 Blast Desc: NECHADRAFT_38874 [Nectria haematococca mpVI 77-13-4]
  misc_feature (11)..(1251): NCBI GI: 145606110 Blast Desc: MGG_06649 [Magnaporthe grisea 70-15] gi|145013837|gb|EDJ98478.1| MGG_06649 [Magnaporthe grisea 70-15]
  misc_feature (62)..(1252): NCBI GI: 171689790 Blast Desc: protein product [Podospora anserina] gi|170944857|emb|CAP70969.1| protein product [Podospora anserina]
  misc_feature (13)..(1251): NCBI GI: 46121607 Blast Desc: FG05182.1 [Gibberella zeae PH-1]
  misc_feature (14)..(1251): NCBI GI: 261352959 Blast Desc: UBA/TS-N domain-containing protein [Verticillium albo-atrum VaMs.102]
  misc_feature (11)..(1250): NCBI GI: 85110074 Blast Desc: NCU09469 [Neurospora crassa OR74A] gi|28924894|gb|EAA33988.1| conserved [Neurospora crassa OR74A] gi|38524252|emb|CAE75717.1| related to EDE1 protein [Neurospora
  misc_feature (1)..(1250): NCBI GI: 116205309 Blast Desc: CHGG_10538 [Chaetomium globosum CBS 148.51] gi|88176666|gb|EAQ84134.1| CHGG_10538 [Chaetomium globosum CBS 148.51]
  misc_feature (13)..(1251): NCBI GI: 154313199 Blast Desc: BC1G_05601 [Botryotinia fuckeliana B05.10] gi|150849686|gb|EDN24879.1| BC1G_05601 [Botryotinia fuckeliana B05.10]
  misc_feature (13)..(1251): NCBI GI: 156062866 Blast Desc: SS1G_01549 [Sclerotinia sclerotiorum 1980] gi|154696885|gb|EDN96623.1| SS1G_01549 [Sclerotinia sclerotiorum 1980]
  misc_feature (10)..(1252): NCBI GI: 154288450 Blast Desc: [Ajellomyces capsulatus NAm1] gi|150408661|gb|EDN04202.1| [Ajellomyces capsulatus NAm1]
MASESSFGGGGPPNLNLSPEEKRVYGILFRQADTENVNVVTGEIAVQFFEKTKLDSRILGEIWQIADRENRGFLEAGGFGVALRLIGHCQAGREPSAELALQQGPLPKFDGINIGPAPTPAPLQQQGSGTAQIRIPPLTPEKVSQYAAIFENQNLQPGNVLPGGPAKTIFEKSQLPNEVLGRIWQLADTEQRGGLVLTEFVIAMHLLTSMKTGALRGLPSILPAGLYEAATRRAPTSARQSPTAAGPPVSAIPRQLSGQAQPRTSSPLGRPPMGPQALGLPPQTIGSDWAISPTDKAKYDQFYADLDKTNKGYITGEEAVPFLSQSRLSEDALAQIWDLADVNSEGQLTKDTFAVAMYLIRQQRTKPSPLPTTLPANLIPPSLRSQARPPVGPSPFDAPVTAPAPIPAPPPPTAPKSALDDLFGLDASPSPAPAQGSLSPQGTGAFAGAKPTSPIQSSPTGNTFKPFIPSSSFGRTLTAHDTGGSGSSAPASKPSNMEDLLGDNDPEISKKLTNETAELANLSNQIGSLSKQMQQVQGQRGTTQTEINQASEQKKNFEQRLSQLRTLYEKEVKEVRVLEDQLKTIRDETRKLTHEMVSIDGNYKDIQTQHQQLSQALQADQQENANLKQRISSVNAEVAQLKPQIEKLKSEARQHKGLVAINKKQLSTVEGERDKLQSEIEDLTKSNEELSRQASASSPVAAPAQVASPAPSTTSANNPFFRRTGSSDIMGAFASPAAKSYNEKSFDEIFGGFSQSNSGTPPPATTFKPQTTGTSSASVGSFATPIGSTPTMSRQGTSNAEATGSESRQPGSPFLPFSDASESSAPAHPGSPPFPKTLEPAPTGQSTTSASDAGQSLKPAQSEHPEAKDVASTNGSAVDAFSDETPTPSAPKTTFSHRDSDPFAGMKDTGNSKVDFDSAFAGFSTSSNKPQDKPKDSSNAFSSFNTEFPPISELERDDESDSASEGNRFEDDFTSVSPPRKTTNDANATSASNTAKAVAFAPETSAVENTTAKTHSSQPSNLSDLSAFPEPPKVSPTFPSPTKVESPFATASNTTSNTGPPTSKSAFDELDADFEGLEDAKEGSADDEFANISRSNLDDFNPVFDSSPPPSQTRTDSSTVSKAFGTESSYDFGNLSQASTDTANATPVANTGSSATGSGQGPTPPDNHDWDAIFASLDSPSDAAPEKKSSDEPKSPTQNLSAERPGFPSGRALTDEGQHDDPILKNLTGMGYSRADALNALEKYDYNLERVG

SEQ ID NO: 20016 - DNA, 4813 bp, Muscodor strobelii; identical to SEQ ID NO: 20013
  misc_feature: SGI EST ID NO. CUFF.47092.2
  misc_feature: Variant of the nucleotide sequence at SEQ ID NO 20014

SEQ ID NO: 20017 - DNA, 2115 bp, Muscodor strobelii
  misc_feature: SGI cDNA ID NO. 566744
  misc_feature: Encodes the peptide sequence at SEQ ID NO 20018
atgtggcaacaagcggcgtacgatgaccccctgaagtactatgagcgcctcggccctcgccaacaagacatgaccaaagtctcgttcgagccacctcagatcttcatccccgccccgaaccgagactacccaggccaggtgtacctgcggatgaaagtcttgcaaggcaccatttacctctactcagatcggcgcgacagatatccccaagagatagctatgaatgggtgggatctgtatttcaggatgagaataagacacaaggacagcgatagaaatgacccaaagtatgcagcctaccagtcggcatcagggttctcgggtgccatattcgaactggtccagctgtatatggctttgtccgatccttcgaacccagacgaggtttttgacgaccggaagagcacatatggcgctacgagtcttactccgaacgccaagagcaatctcagaacggtcatgacggactggctcaagagcgctagactggagaggccaaaattaaatcttttgggatacatattcaccagccaaaggccacaaactctcgcttcggccgagagctcgctggtgcccaaggtcatagactataatgtctatccctggaaaggccccgacgggacacaagcggccagagacggaattgacgagaacgccttagtagtactagtcacgacgggttctcacacaccgccctaccctccaggaatcggctactcgggcccctttgccgagcgaggagctactctctgtatcaacgagaagtgcttctgggaagaatggatcattcgcgacgtccaaggggtcataaaggccgttgagatactcgtctcacggccaaatctggcctggggaaaaaaacacaacgttggtatcgcatatcaatttggatctaaaagccctcccgggagcttcagcctaaaacgcgttgtcacaaatgggcggatcacttgggcatgggcggggaaggcgcatacaagcatgagcaaacctgtgaaaatgtcggatagttatgaatggaagggggggaaacgtgtgaagcaacctgccatcttcttactcatcaaacagactgcccaatcttgggttactattaaactcaacagggaccacgagggagtgtttacaattgagggacgacacgttttctctcatgcgtttccaatttttaggagcaagaaagggtcgcgttgggtcgaccgcaatagccaatgggtaaagatcatcgcagattggcacatcgatttcagactccaggcgaccaacgacggcggggtggaaatcgcccagcggcccacgaacaagaactggctcacggtcaggactcagaagaagacgcaaatccctactaaccacgtctccctcgcccaatgggctcggacattggaaggacagctgcgcacgcgcgttacgcaagcagtgactaagatgtctgcgtcgctcaatcgagctttcagggtacagcacaagttcgtcatgcccgcgtcgggggtattcgcgatgagaaaccccaagttcaacgaccgtggtgatgtgttggtcgaactcgaatatctcaacttcgacgcccccaccatctcgaggcttgccctcgatagcgactcgggccagcttcctttttcggactattttcctttcaacaagatcaccttggcgtcgggagattacccctcgcgccaggaggatgtcgatggcactggtgataacgacgaagacgacggtctggacatggagccgcaccatgttgagcatgagtatgatctcgaagtcgtcgacatctccgagtatctagaaaacatttcacgcgcaagtctcgatgatcagcacgcggaggaggaggagaaggaagaccaccggcctgatatattcaagcatactgagataacttggtctgaatccgagtccgagccagaacacatcgtcgatcccgaatctgacgacgaggacgatagagatcatgtctcggatgatgaccatcatggtagcacttcccatgggcggggtggtcgtgatggctatgtagacacgtcgaagccgcaccggcgcccgcaaaagggacgtaccgaccataaggagggagccgtcgatgaggatgaggatgaggatgactactaa

SEQ ID NO: 20018 - protein, 704 aa, Muscodor strobelii
  misc_feature: SGI Peptide ID NO. 566744
  misc_feature (47)..(524): NCBI GI: 119474061 Blast Desc: NFIA_003650 [Neosartorya fischeri NRRL 181] gi|119407059|gb|EAW17009.1| NFIA_003650 [Neosartorya fischeri NRRL 181]
  misc_feature (42)..(524): NCBI GI: 256721685 Blast Desc: NECHADRAFT_82426 [Nectria haematococca mpVI 77-13-4]
  misc_feature (1)..(524): NCBI GI: 146323201 Blast Desc: AFUA_3G02430 [Aspergillus fumigatus Af293] gi|129556515|gb|EAL86528.2| AFUA_3G02430 [Aspergillus fumigatus Af293]
  misc_feature (1)..(524): NCBI GI: 238499163 Blast Desc: conserved [Aspergillus flavus NRRL3357] gi|220692569|gb|EED48915.1| conserved [Aspergillus flavus NRRL3357]
  misc_feature (1)..(327): NCBI GI: 256723962 Blast Desc: NECHADRAFT_72642 [Nectria haematococca mpVI 77-13-4]
  misc_feature (85)..(285): NCBI GI: 159128298 Blast Desc: AFUB_045880 [Aspergillus fumigatus A1163]
  misc_feature (1)..(281): NCBI GI: 169778452 Blast Desc: [Aspergillus oryzae RIB40] gi|83772429|dbj|BAE62558.1| protein product [Aspergillus oryzae]
  misc_feature (418)..(524): NCBI GI: 159128299 Blast Desc: AFUB_045890 [Aspergillus fumigatus A1163]
MWQQAAYDDPLKYYERLGPRQQDMTKVSFEPPQIFIPAPNRDYPGQVYLRMKVLQGTIYLYSDRRDRYPQEIAMNGWDLYFRMRIRHKDSDRNDPKYAAYQSASGFSGAIFELVQLYMALSDPSNPDEVFDDRKSTYGATSLTPNAKSNLRTVMTDWLKSARLERPKLNLLGYIFTSQRPQTLASAESSLVPKVIDYNVYPWKGPDGTQAARDGIDENALVVLVTTGSHTPPYPPGIGYSGPFAERGATLCINEKCFWEEWIIRDVQGVIKAVEILVSRPNLAWGKKHNVGIAYQFGSKSPPGSFSLKRVVTNGRITWAWAGKAHTSMSKPVKMSDSYEWKGGKRVKQPAIFLLIKQTAQSWVTIKLNRDHEGVFTIEGRHVFSHAFPIFRSKKGSRWVDRNSQWVKIIADWHIDFRLQATNDGGVEIAQRPTNKNWLTVRTQKKTQIPTNHVSLAQWARTLEGQLRTRVTQAVTKMSASLNRAFRVQHKFVMPASGVFAMRNPKFNDRGDVLVELEYLNFDAPTISRLALDSDSGQLPFSDYFPFNKITLASGDYPSRQEDVDGTGDNDEDDGLDMEPHHVEHEYDLEVVDISEYLENISRASLDDQHAEEEEKEDHRPDIFKHTEITWSESESEPEHIVDPESDDEDDRDHVSDDDHHGSTSHGRGGRDGYVDTSKPHRRPQKGRTDHKEGAVDEDEDEDDY

SEQ ID NO: 20019 - DNA, 342 bp, Muscodor strobelii
  misc_feature: SGI EST ID NO. CUFF.46851.0
  misc_feature: Variant of the nucleotide sequence at SEQ ID NO 20017
gaacggtcatgacggactggctcaagagcgctagactggagaggccaaaattaaatcttttgggatacatattcaccagccaaaggccacaaactctcgcttcggccgagagctcgctggtgcccaaggtcatagactataatgtctatccctggaaaggccccgacgggacacaagcggccagagacggaattgacgagaacgccttagtagtactagtcacgacgggttctcacacaccgccctaccctccaggaatcggctactcgggcccctttgccgagcgaggagctactctctgtatcaacgagaagtgcttctgggaagaatggatcattcgcg

SEQ ID NO: 20020 - DNA, 1353 bp, Muscodor strobelii
  misc_feature: SGI cDNA ID NO. 566745
  misc_feature: Encodes the peptide sequence at SEQ ID NO 20021
atgcgtgagatcatcagcatcaacgtcggtcaggcaggttgccagattgccaactcctgctgggagctttactgccttgagcacggtatccagcctgatggatacctaaccgaagagcgcaagaaggccgaccccgaccacggtttcagcaccttcttctccgagactggccagggcaagtatgttcctcgcactatttactgcgatctcgagcccaacgtcgtcgatgaggtccgcaccggcacctaccgaagcctcttccaccccgagcagatgatcaccggcaaggaggatgcctccaacaactacgcccgcggccactacacggtcggcaaggagctgatcgaccaggtcctggacaaggtcagacgcgttgccgacagctgcgctggtctccaaggcttcttggtcttccactcctttggcggaggtaccggttcgggtttcggtgccttgttgatggagcgcctgtccgtcgactacggcaagaagagcaagcttgagttctgcgtctaccctgccccccagaccgccacttccgtcgtcgagccttacaactccatcctcaccacccacaccaccctcgagcactctgactgctccttcatggtcgacaacgaggccatctacgacatctgccgccgcaacctcggcctcgagcgtcccaactacgagaacctcaaccgcttgatcgcccaagttgtctcctctatcactgcatccctccgtttcgacggctcgctcaacgtcgacttgaatgagttccagactaacttagtcccctacccccggatccatttccctctggtcgcctatgcgcctgtcatctcagccgccaaggccgcccacgaggccaactcggtccaggagatgaccatgtcttgcttcgagccctacaaccagatggtgaagtgcgacccccgcaacggcaagtacatggccacttgcctgctgtaccgcggtgatgttgttcccaaggatgcccatgccgccgtcgcgaccctcaagacgaagcgcaccatccagttcgtcgactggtgccccactggcttcaagcttggtatctgcttccagcctcctcagttggttcccaacggtgacctcgccaaggttgaccgtgctgtatgcatgctctccaacaccaccgctatcgccgaggcttggtccgccttgtccaccaagttcgatctcatgtactcgaagcgcgctttcgttcactggtacgttggtgagggcatggaggagggcgagttctccgaggctcgcgaggatctggctgccctcgagcgcgattacgaggaggttgccaccgactctctcgaagctgagggtgatgtcgaggctgagtactga

SEQ ID NO: 20021 - protein, 450 aa, Muscodor strobelii
  misc_feature: SGI Peptide ID NO. 566745
  misc_feature (49)..(246): Pfam Id: PF00091 Pfam Desc: Tubulin/FtsZ family, GTPase domain
  misc_feature (248)..(393): Pfam Id: PF03953 Pfam Desc: Tubulin/FtsZ family, C-terminal domain
  misc_feature (1)..(450): NCBI GI: 91076358 Blast Desc: : similar to alpha-tubulin isoform 1 [Tribolium castaneum] gi|270002884|gb|EEZ99331.1| tubulin alpha 1-like protein [Tribolium castaneum]
  misc_feature (1)..(418): NCBI GI: 1729840 Blast Desc: TBA_AJECA RecName: Full=Tubulin alpha chain gi|639762|gb|AAA61688.1| alpha-tubulin [Ajellomyces capsulatus]
  misc_feature (56)..(450): NCBI GI: 154288452 Blast Desc: tubulin alpha chain [Ajellomyces capsulatus NAm1] gi|150408662|gb|EDN04203.1| tubulin alpha chain [Ajellomyces capsulatus NAm1]
  misc_feature (1)..(440): NCBI GI: 109104620 Blast Desc: : similar to Tubulin alpha-3 chain (Alpha-tubulin 3) [Macaca mulatta]
  misc_feature (1)..(450): NCBI GI: 145606108 Blast Desc: MGG_06650 [Magnaporthe grisea 70-15] gi|145013836|gb|EDJ98477.1| MGG_06650 [Magnaporthe grisea 70-15]
  misc_feature (1)..(450): NCBI GI: 171689788 Blast Desc: protein product [Podospora anserina] gi|170944856|emb|CAP70968.1| protein product [Podospora anserina]
  misc_feature (1)..(450): NCBI GI: 85110072 Blast Desc: tubulin alpha-B chain [Neurospora crassa OR74A] gi|46397830|sp|P38669.2|TBA2_NEUCR RecName: Full=Tubulin alpha-B chain gi|28924893|gb|EAA33987.1| tubulin alpha-B chain crassa B
  misc_feature (1)..(450): NCBI GI: 4090251 Blast Desc: alpha-tubulin [Rhynchosporium secalis]
  misc_feature (1)..(450): NCBI GI: 121703225 Blast Desc: tubulin alpha-1 subunit [Aspergillus clavatus NRRL 1] gi|119398020|gb|EAW08451.1| tubulin alpha-1 subunit [Aspergillus clavatus NRRL 1]
  misc_feature (1)..(450): NCBI GI: 154313197 Blast Desc: tubulin alpha chain [Botryotinia fuckeliana B05.10] gi|150849685|gb|EDN24878.1| tubulin alpha chain [Botryotinia fuckeliana B05.10]
MREIISINVGQAGCQIANSCWELYCLEHGIQPDGYLTEERKKADPDHGFSTFFSETGQGKYVPRTIYCDLEPNVVDEVRTGTYRSLFHPEQMITGKEDASNNYARGHYTVGKELIDQVLDKVRRVADSCAGLQGFLVFHSFGGGTGSGFGALLMERLSVDYGKKSKLEFCVYPAPQTATSVVEPYNSILTTHTTLEHSDCSFMVDNEAIYDICRRNLGLERPNYENLNRLIAQVVSSITASLRFDGSLNVDLNEFQTNLVPYPRIHFPLVAYAPVISAAKAAHEANSVQEMTMSCFEPYNQMVKCDPRNGKYMATCLLYRGDVVPKDAHAAVATLKTKRTIQFVDWCPTGFKLGICFQPPQLVPNGDLAKVDRAVCMLSNTTAIAEAWSALSTKFDLMYSKRAFVHWYVGEGMEEGEFSEAREDLAALERDYEEVATDSLEAEGDVEAEY

SEQ ID NO: 20022 - DNA, 1960 bp, Muscodor strobelii
  misc_feature: SGI EST ID NO. CUFF.46857.0
  misc_feature: Variant of the nucleotide sequence at SEQ ID NO 20020
atccacactgagtccacagcgacctggaccaatacggtgtcgggcaacctgggaaaataaaaagaaacgcccccaccgacgacccttccgcctcgacgctatcaacagaacttctcgactcaactcccgacctaccgctatatcccttctcgtccaccaccttttggccgcctgttttgtttctctcccgtcttcttaacattgctctgtcgagtcctctcttctcacactcccgcgcttgcgtactctgctgccacaatgcgtgagatcatcagcatcaacgtcggtcaggcaggttgccagattgccaactcctgctgggagctttactgccttgagcacggtatccagcctgatggatacctaaccgaagagcgcaagaaggccgaccccgaccacggtttcagcaccttcttctccgagactggccagggcaagtatgttcctcgcactatttactgcgatctcgagcccaacgtcgtcgatgaggtccgcaccggcacctaccgaagcctcttccaccccgagcagatgatcaccggcaaggaggatgcctccaacaactacgcccgcggccactacacggtcggcaaggagctgatcgaccaggtcctggacaaggtcagacgcgttgccgacagctgcgctggtctccaaggcttcttggtcttccactcctttggcggaggtaccggttcgggtttcggtgccttgttgatggagcgcctgtccgtcgactacggcaagaagagcaagcttgagttctgcgtctaccctgccccccagaccgccacttccgtcgtcgagccttacaactccatcctcaccacccacaccaccctcgagcactctgactgctccttcatggtcgacaacgaggccatctacgacatctgccgccgcaacctcggcctcgagcgtcccaactacgagaacctcaaccgcttgatcgcccaagttgtctcctctatcactgcatccctccgtttcgacggctcgctcaacgtcgacttgaatgagttccagactaacttagtcccctacccccggatccatttccctctggtcgcctatgcgcctgtcatctcagccgccaaggccgcccacgaggccaactcggtccaggagatgaccatgtcttgcttcgagccctacaaccagatggtgaagtgcgacccccgcaacggcaagtacatggccacttgcctgctgtaccgcggtgatgttgttcccaaggatgcccatgccgccgtcgcgaccctcaagacgaagcgcaccatccagttcgtcgactggtgccccactggcttcaagcttggtatctgcttccagcctcctcagttggttcccaacggtgacctcgccaaggttgaccgtgctgtatgcatgctctccaacaccaccgctatcgccgaggcttggtccgccttgtccaccaagttcgatctcatgtactcgaagcgcgctttcgttcactggtacgttggtgagggcatggaggagggcgagttctccgaggctcgcgaggatctggctgccctcgagcgcgattacgaggaggttgccaccgactctctcgaagctgagggtgatgtcgaggctgagtactgagtgagagacgaactgtacgaggggcggcccgaaggagagaattttattcgttataccctgtctcgcctggactcctcagggggttttggcatgtcttcccacgctgtattttcgcgctcgagagtctggcatgcttatttctgatgaggctggaagctggctatagagatgaggctacgtctaagtttgtgtggcacaaaaaggtggttaaaagaaggatgttttacaccttgtgaattcgactttatgaacttctaatagctgtcattccaatcagacagtatggcagccctgttgtcttacgccgaatcaattaaaggcctctacatcaatagattgtgcatagctc

SEQ ID NO: 20023 - DNA, 699 bp, Muscodor strobelii
  misc_feature: SGI cDNA ID NO. 566746
  misc_feature: Encodes the peptide sequence at SEQ ID NO 20024
atgttggcttcacttatctttacacctctcctagtttgtttcgtccaagcaaacaccgagaagacgatatttcttggcccaccatcagttgacgcagtgtcagcatatcccaggctagctgacttacatgtccaagtcttaacccctgataacttcactatccgcacatatctcgaatctagctttccaaaccatcagtcagaatatggtagagattcctggtttattttagaccaattaaacccaggccaacgctatgaagtccgtgtctgctgggcagcaacttcaccagcagcctttagactcaatgtctatgagctccatgaagtctttagtgaccctcgcctgcagctggaggtatcccgatatgcacaatcactgaagtcggaagacgttggtcaggcccagcacttgccacaatctggcagctttgacggacatacttctgtcttacttctccagatcttcaccttagcagactattacaccacaaaccgaaccttaatgcaataccctcccccggtctttgtggacatcatattggaccctttcgtatttaatatcctccctcgatcactgctgccaacagtcggctacattatcatgatctctattgtttcctggttcctcggccgctgggtatcagaacagattcaccgcatggcagaagcgcctactcgggacaaaaaagatgcatag

SEQ ID NO: 20024 - protein, 232 aa, Muscodor strobelii
  misc_feature: SGI Peptide ID NO. 566746
  misc_feature (2)..(230): NCBI GI: 46107514 Blast Desc: FG00640.1 [Gibberella zeae PH-1]
  misc_feature (6)..(227): NCBI GI: 255950586 Blast Desc: Pc22g21640 [Penicillium chrysogenum Wisconsin 54-1255] gi|211593077|emb|CAP99452.1| Pc22g21640 [Penicillium chrysogenum Wisconsin 54-1255]
  misc_feature (15)..(231): NCBI GI: 145606030 Blast Desc: MGG_06708 [Magnaporthe grisea 70-15] gi|145013774|gb|EDJ98415.1| MGG_06708 [Magnaporthe grisea 70-15]
  misc_feature (10)..(232): NCBI GI: 261352961 Blast Desc: conserved [Verticillium albo-atrum VaMs.102]
  misc_feature (11)..(231): NCBI GI: 256735377 Blast Desc: NECHADRAFT_75145 [Nectria haematococca mpVI 77-13-4]
  misc_feature (11)..(223): NCBI GI: 119497263 Blast Desc: NFIA_022060 [Neosartorya fischeri NRRL 181] gi|119413554|gb|EAW23495.1| conserved [Neosartorya fischeri NRRL 181]
  misc_feature (12)..(214): NCBI GI: 225554591 Blast Desc: conserved [Ajellomyces capsulatus G186AR]
  misc_feature (1)..(231): NCBI GI: 189194950 Blast Desc: conserved [Pyrenophora tritici-repentis Pt-1C-BFP] gi|187979692|gb|EDU46318.1| conserved [Pyrenophora tritici-repentis Pt-1C-BFP]
  misc_feature (12)..(214): NCBI GI: 240276933 Blast Desc: conserved [Ajellomyces capsulatus H143]
  misc_feature (7)..(223): NCBI GI: 70990314 Blast Desc: conserved [Aspergillus fumigatus Af293] gi|66847638|gb|EAL87968.1| conserved [Aspergillus fumigatus Af293] gi|159130486|gb|EDP55599.1| conserved [Aspergillus A1163]
MLASLIFTPLLVCFVQANTEKTIFLGPPSVDAVSAYPRLADLHVQVLTPDNFTIRTYLESSFPNHQSEYGRDSWFILDQLNPGQRYEVRVCWAATSPAAFRLNVYELHEVFSDPRLQLEVSRYAQSLKSEDVGQAQHLPQSGSFDGHTSVLLLQIFTLADYYTTNRTLMQYPPPVFVDIILDPFVFNILPRSLLPTVGYIIMISIVSWFLGRWVSEQIHRMAEAPTRDKKDA

SEQ ID NO: 20025 - DNA, 3062 bp, Muscodor strobelii
  misc_feature: SGI EST ID NO. CUFF.46942.0
  misc_feature: Variant of the nucleotide sequence at SEQ ID NO 20023
caaagcccaacacagacaggaccacctctcccataatcccagtgcgaaaacactgggtccggcgttccggcagctaccggtccatgggtcgcacgggcttgtcgagtattattcatctcattataattctcggcgtgtcaggggggagaagagacgggaaagattcagtttgaaggccagggcttgtcaaccatattcgttctcagctctattaagctctcgagttgttcgccattcaagagcaagagtcgagtcctcttgtgctagctcacgactagataacatcatgatgttggcttcacttatctttacacctctcctagtttgtttcgtccaagcaaacaccgagaagacgatatttcttggcccaccatcagttgacgcagtgtcagcatatcccaggctagctgacttacatgtccaagtcttaacccctgataacttcactatccgcacatatctcgaatctagctttccaaaccatcagtcagaatatggtagagattcctggtttattttagaccaattaaacccaggccaacgctatgaagtccgtgtctgctgggcagcaacttcaccagcagcctttagactcaatgtctatgagctccatgaagtctttagtgaccctcgcctgcagctggaggtatcccgatatgcacaatcactgaagtcggaagacgttggtcaggcccagcacttgccacaatctggcagctttgacggacatacttctgtcttacttctccagatcttcaccttagcagactattacaccacaaaccgaaccttaatgcaataccctcccccggtctttgtggacatcatattggaccctttcgtatttaatatcctccctcgatcactgctgccaacagtcggctacattatcatgatctctattgtttcctggttcctcggccgctgggtatcagaacagattcaccgcatggcagaagcgcctactcgggacaaaaaagatgcataggcatgtactttccaaactttctgcctggaatccaaatcttaaggctattacatggacaacatgcgctctcttggaatgatttgtccacatataagctagatgcatcccaaaacggactcgaattggggtaagaaaggctccgatcatgcttgaatgcgtcatgctccaattacactcttacgagtcttcattctttactgtgtatatgcacaaatgcatttcaccatttcccaggatatcctccgccatgaggctggccatgtggaggtgcgtgatcagaatacgttggctgccctgggtagtgctgtggtgctcctgctggaggtggaggaggctgatactgctggttgtagtttgcgggcggtggcggccaattctggcccccgtaggaaggctgggcaggaccagaagatgcgtactgattttgatgcggggctgctcacgttagccgagtcccattagatgcattgagcctgacgtacggtatgttgattgctgcggtgctggagaatgattgtaggtggaagaggagccgcttggagaagcacctccgtagggtgaatcgtggtgtgctgatggatggcttgcgccttgaggatacccaggggtgctgtgttgtccaggctgggggtaggatggtgtgccctgctgcggatgtggaggattgtatgaaggcgcgctgtgttggttaggtggaggtgagctgtatgacgacgcaggcgccgttggggtttggtatgatgctggcggtgcttgaccactgtagcctgatgactgaccgcctgagttggaatagccataattctgtccctgtctctgctgttaacaaagatcgtagccttctgccacagcgtaacttactgattgaccgtgactgctgcctccaaacatgcctgctacgccgcccattacctgcccggccaatccaccggagtgatgagactgctgagactgcccaccgtgatagttcgttggctgctcgggtttgtggccggaagagaagagattcgacgccaattggccgactatgccgccgccacctccaccactagaatggtttcccgacgagctgccatgactgccgccatgactgttgccgtgtccacccgcgaggccccctataagctgaccagcgagactgcccagaccatttgaactcccgccaccgccgtgtggtttcccatggccgcctgacacctggttcaagagcgcattggcagccatgctctgtaccaattgtgactcgggtcagtacttggctatcgtgatttcggatttcagacatggaacaaagaatgtgcggaccaacataccccaaagcccctctcgcccgttggtccacccatgcctctcgagctgtccggaggcatgatgggctccatacgaccatcctcatgcttgattgtctgcgtgccatccgggtgtgttatgagctcgtggcggccgggaacgccgtatggatgctcattgggttgcgccggagtgccgcccggtgccgcgtcggtggggatctcccattgtgagacaccggtagacagctgaacatagtagtattttctacttgcaccatcccactgggcaatccatccgggaggaagatgtggtggttcgaacgtcggtccctcgttcggtgaggcggggccagccatggcgattgaggggctttcacagtcctctatccaccgcgatgctggcggtcgacaagttgcggcggggcacaggcggagttcaaagcaagcaggcagcactgtatggcagaaggaggttaatcagcgagcttaggtttgtacagaaatgccagctctacagtagtatgagtgaagacatacctggctatttctaaaatgaacttgaatgtaatacagacaaaaaaggtctgaaggtaaaagaaatgcaagacgaccttggcaggtgcacctaatgtatgtgaggtacgaccacagcgacagcaactggtgccgggtctttgccaggtggggcaactcgagataacaccaaccgcactcgtctctctttcgaccccgatgaagcgtcatcagctgtggcgatgcgagagctaacaagtccatgtgga

SEQ ID NO: 20026 - DNA, 1245 bp, Muscodor strobelii
  misc_feature: SGI cDNA ID NO. 566747
  misc_feature: Encodes the peptide sequence at SEQ ID NO 20027
atggctggccccgcctcaccgaacgagggaccgacgttcgaaccaccacatcttcctcccggatggattgcccagtgggatggtgcaagtagaaaatactactatgttcagctgtctaccggtgtctcacaatgggagatccccaccgacgcggcaccgggcggcactccggcgcaacccaatgagcatccatacggcgttcccggccgccacgagctcataacacacccggatggcacgcagacaatcaagcatgaggatggtcgtatggagcccatcatgcctccggacagctcgagaggcatgggtggaccaacgggcgagaggggctttgggagcatggctgccaatgcgctcttgaaccaggtgtcaggcggccatgggaaaccacacggcggtggcgggagttcaaatggtctgggcagtctcgctggtcagcttatagggggcctcgcgggtggacacggcaacagtcatggcggcagtcatggcagctcgtcgggaaaccattctagtggtggaggtggcggcggcatagtcggccaattggcgtcgaatctcttctcttccggccacaaacccgagcagccaacgaactatcacggtgggcagtctcagcagtctcatcactccggtggattggccgggcaggtaatgggcggcgtagcaggcatgtttggaggcagcagtcacggtcaatcaggacagaattatggctattccaactcaggcggtcagtcatcaggctacagtggtcaagcaccgccagcatcataccaaaccccaacggcgcctgcgtcgtcatacagctcacctccacctaaccaacacagcgcgccttcatacaatcctccacatccgcagcagggcacaccatcctacccccagcctggacaacacagcacccctgggtatcctcaaggcgcaagccatccatcagcacaccacgattcaccctacggaggtgcttctccaagcggctcctcttccacctacaatcattctccagcaccgcagcaatcaacataccccccgcatcaaaatcagtacgcatcttctggtcctgcccagccttcctacgggggccagaattggccgccaccgcccgcaaactacaaccagcagtatcagcctcctccacctccagcaggagcaccacagcactacccagggcagccaacgtattctgatcacgcacctccacatggccagcctcatggcggaggatatcctgggaaatggtga

SEQ ID NO: 20027 - protein, 414 aa, Muscodor strobelii
  misc_feature: SGI Peptide ID NO. 566747
  misc_feature (18)..(48): Pfam Id: PF00397 Pfam Desc: WW domain
  misc_feature (1)..(291): NCBI GI: 261352962 Blast Desc: conserved [Verticillium albo-atrum VaMs.102]
  misc_feature (1)..(272): NCBI GI: 145606028 Blast Desc: MGG_06709 [Magnaporthe grisea 70-15] gi|145013773|gb|EDJ98414.1| MGG_06709 [Magnaporthe grisea 70-15]
  misc_feature (1)..(277): NCBI GI: 46107516 Blast Desc: FG00641.1 [Gibberella zeae PH-1]
  misc_feature (1)..(120): NCBI GI: 256734657 Blast Desc: NECHADRAFT_98893 [Nectria haematococca mpVI 77-13-4]
  misc_feature (1)..(264): NCBI GI: 164428158 Blast Desc: NCU01748 [Neurospora crassa OR74A] gi|157072034|gb|EAA27935.2| NCU01748 [Neurospora crassa OR74A]
  misc_feature (1)..(264): NCBI GI: 16416095 Blast Desc: [Neurospora crassa]
  misc_feature (1)..(99): NCBI GI: 116204593 Blast Desc: CHGG_10180 [Chaetomium globosum CBS 148.51] gi|88176308|gb|EAQ83776.1| CHGG_10180 [Chaetomium globosum CBS 148.51]
  misc_feature (9)..(276): NCBI GI: 156062860 Blast Desc: SS1G_01546 [Sclerotinia sclerotiorum 1980] gi|154696882|gb|EDN96620.1| SS1G_01546 [Sclerotinia sclerotiorum 1980]
  misc_feature (1)..(124): NCBI GI: 154313193 Blast Desc: BC1G_05598 [Botryotinia fuckeliana B05.10] gi|150849683|gb|EDN24876.1| BC1G_05598 [Botryotinia fuckeliana B05.10]
  misc_feature (16)..(277): NCBI GI: 169596865 Blast Desc: SNOG_01202 [Phaeosphaeria nodorum SN15] gi|160707385|gb|EAT90851.2| SNOG_01202 [Phaeosphaeria nodorum SN15]
MAGPASPNEGPTFEPPHLPPGWIAQWDGASRKYYYVQLSTGVSQWEIPTDAAPGGTPAQPNEHPYGVPGRHELITHPDGTQTIKHEDGRMEPIMPPDSSRGMGGPTGERGFGSMAANALLNQVSGGHGKPHGGGGSSNGLGSLAGQLIGGLAGGHGNSHGGSHGSSSGNHSSGGGGGGIVGQLASNLFSSGHKPEQPTNYHGGQSQQSHHSGGLAGQVMGGVAGMFGGSSHGQSGQNYGYSNSGGQSSGYSGQAPPASYQTPTAPASSYSSPPPNQHSAPSYNPPHPQQGTPSYPQPGQHSTPGYPQGASHPSAHHDSPYGGASPSGSSSTYNHSPAPQQSTYPPHQNQYASSGPAQPSYGGQNWPPPPANYNQQYQPPPPPAGAPQHYPGQPTYSDHAPPHGQPHGGGYPGKW

SEQ ID NO: 20028 - DNA, 2927 bp, Muscodor strobelii
  misc_feature: SGI EST ID NO. CUFF.46943.2
  misc_feature: Variant of the nucleotide sequence at SEQ ID NO 20026
tccacatggacttgttagctctcgcatcgccacagctgatgacgcttcatcggggtcgaaagagagacgagtgcggttggtgttatctcgagttgccccacctggcaaagacccggcaccagttgctgtcgctgtggtcgtacctcacatacattaggtgcacctgccaaggtcgtcttgcatttcttttaccttcagaccttttttgtctgtattacattcaagttcattttagaaatagccaggtatgtcttcactcatactactgtagagctggcatttctgtacaaacctaagctcgctgattaacctccttctgccatacagtgctgcctgcttgctttgaactccgcctgtgccccgccgcaacttgtcgaccgccagcatcgcggtggatagaggactgtgaaagcccctcaatcgccatggctggccccgcctcaccgaacgagggaccgacgttcgaaccaccacatcttcctcccggatggattgcccagtgggatggtgcaagtagaaaatactactatgttcagctgtctaccggtgtctcacaatgggagatccccaccgacgcggcaccgggcggcactccggcgcaacccaatgagcatccatacggcgttcccggccgccacgagctcataacacacccggatggcacgcagacaatcaagcatgaggatggtcgtatggagcccatcatgcctccggacagctcgagaggcatgggtggaccaacgggcgagaggggctttgggagcatggctgccaatgcgctcttgaaccaggtgtcaggcggccatgggaaaccacacggcggtggcgggagttcaaatggtctgggcagtctcgctggtcagcttatagggggcctcgcgggtggacacggcaacagtcatggcggcagtcatggcagctcgtcgggaaaccattctagtggtggaggtggcggcggcatagtcggccaattggcgtcgaatctcttctcttccggccacaaacccgagcagccaacgaactatcacggtgggcagtctcagcagtctcatcactccggtggattggccgggcaggtaatgggcggcgtagcaggcatgtttggaggcagcagtcacggtcaatcaggacagaattatggctattccaactcaggcggtcagtcatcaggctacagtggtcaagcaccgccagcatcataccaaaccccaacggcgcctgcgtcgtcatacagctcacctccacctaaccaacacagcgcgccttcatacaatcctccacatccgcagcagggcacaccatcctacccccagcctggacaacacagcacccctgggtatcctcaaggcgcaagccatccatcagcacaccacgattcaccctacggaggtgcttctccaagcggctcctcttccacctacaatcattctccagcaccgcagcaatcaacataccccccgcatcaaaatcagtacgcatcttctggtcctgcccagccttcctacgggggccagaattggccgccaccgcccgcaaactacaaccagcagtatcagcctcctccacctccagcaggagcaccacagcactacccagggcagccaacgtattctgatcacgcacctccacatggccagcctcatggcggaggatatcctgggaaatggtgaaatgcatttgtgcatatacacagtaaagaatgaagactcgtaagagtgtaattggagcatgacgcattcaagcatgatcggagcctttcttaccccaattcgagtccgttttgggatgcatctagcttatatgtggacaaatcattccaagagagcgcatgttgtccatgtaatagccttaagatttggattccaggcagaaagtttggaaagtacatgcctatgcatcttttttgtcccgagtaggcgcttctgccatgcggtgaatctgttctgatacccagcggccgaggaaccaggaaacaatagagatcatgataatgtagccgactgttggcagcagtgatcgagggaggatattaaatacgaaagggtccaatatgatgtccacaaagaccgggggagggtattgcattaaggttcggtttgtggtgtaatagtctgctaaggtgaagatctggagaagtaagacagaagtatgtccgtcaaagctgccagattgtggcaagtgctgggcctgaccaacgtcttccgacttcagtgattgtgcatatcgggatacctccagctgcaggcgagggtcactaaagacttcatggagctcatagacattgagtctaaaggctgctggtgactaaagacaattgagttcaaaagtatatctgacttatatatcagaaagcttacagttgctgcccagcagacacggacttcatagcgttggcctgggtttaattggtctaaaataaaccaggaatctctaccatattctgactgatggtttggaaagctagattcgagatatgtgcggatagtgaagttatcaggggttaagacttggacatgtaagtcagctagcctgggatatgctgacactgcgtcaactgatggtgggccaagaaatatcgtcttctcggtgtttgcttggacgaaacaaactaggagaggtgtaaagataagtgaagccaacatcatgatgttatctagtcgtgagctagcacaagaggactcgactcttgctcttgaatggcgaacaactcgagagcttaatagagctgagaacgaatatggttgacaagccctggccttcaaactgaatctttcccgtctcttctcccccctgacacgccgagaattataatgagatgaataatactcgacaagcccgtgcgacccatggaccggtagctgccggaacgccggacccagtgttttcgcactgggattatgggagaggtggtcctgtctgtgttgggc

SEQ ID NO: 20029 - DNA, 12249 bp, Muscodor strobelii
  misc_feature: SGI cDNA ID NO. 566748
  misc_feature: Encodes the peptide sequence at SEQ ID NO 20030
atgggaaagatcacgaaggctatccaagccaaacacaaggagactctgtctccgatggtgcaggaattcgtcgatttagcttcttcgacacccttgcacctcttgacccagacccttgccacattcccctcgcgatggccttttcctcgaggagatctataccattggatccctcttctgaatagattcgacaccctcctagaatcattctgccaaatctataaactgaacgagggccctcagactcgagaattcggttgcgagctgttgctccatttccgcaagtccaaggagtcaggcgacatagaagagctgcctgaactcgacgacaagaatgatggtgacgcagctcttatcgagtctatcctaaagtttacccagatgcttctggatcattgtggcaaccgcagtatatacgccagcagtgcccacttgaatgacctgctgcatagtacagacttcaacatcatctgtgccacccttcaagtcggcgtggagcttgctcaacgataccaggcttcagttaagcgcatccacggcatggctactcgacaggtgcacacggctctattgtcgaatcactacaatatcgaccttgagcgcgtacagcaactcgcacagccttttgtgaagacgcccattgtcaagcctacggaacccagctcgttgtctacgcctggcagtgtcggtaaaggcaaggataaggcatccggaggaagtaccaagaatgcggcctccatgtttgcgaatgatctgtgttctatagcaagatccaacccagacgatgccgacgattctaaaacacgatggaagggctgggccgatatcaaactgacgtattatccatcccccgacacctcttcagaggagcactcacatacgtccgtacctaagcgagggaatgcaaatgcgccttcgagtcctacgcctctccgccgtagcaactccgctcagacgccccacagcacaccttctcgtacgaatcgtccaatctcaggatcattagatgacacccctggctcagcccctcgatctgtaggtggaggtcgtgaggaaggggcttcgcatggtccacaatcgctggtgatcacacaggctgctgtcacttcttcttcgatcttcgaagctttaagcagagcgccatctgacttgcctagccaaagcaagtacgagtatctcaaccgtttgcgcgtggccaaagccctgactgggtctgtggagtctcggcaacaggctctgaaggcacggctcttggctatacagaatttagcttacattcatgttgagtcaaccttcattgagaaagtccttaggcaagacagcgacgagccgcgccgcttccagctagtgtatcaattagccgagttgattcatcccggggcggatggcgcaaaacctataccgctcgaccttcagtcaattgcactctcgctcctcgaggctatcgcttcattccattcaaaggtgtctgacatcttctccgccttgaatgcaactgtcaaccatggcgtgctcctttacattataagaaaggccgttgctgagatgaagtcggatgacgcaggcgagcagtggactctgaaggatgaatggcgtgacaagctgttctctctcaccctccatatcacgatggccatggctaatacatctgtgcggaacacgccggagattatagcagctggtctattagatatcctagttgagatcctcaacctcagatccaatgttgccgagcgaactcatggtacactggtcggttttctggacagcttagtgtataacgtacaaagctcctttgagtctttagctaatgccgacgggcttgacgcaattaccaacttgatcactcacgaagtagatctcgccaagcagttagttgccgctggcaagggaacaccagcaagtcatcgatcgcagattgttgactatgagatccctttttatcagcaacagaatctcaaattcctcctgaaattcatacaccacctgatggcgaacacttttacttaccacggaaacactgagcgcttactacgcaatcttgtcgacaagtctgaccttctcaacagcctccgtgagatcattgagaatatgacgctcttcggatcgctcgtttggaccaacagcgtagtcatcttgggtgattttctgaacaacgatccgaccagtttctctgccatcttagatgccggactgatccagagttatctgaccgccctaactggcagagctgttaaggctgggccaactggtgcgacgacggcttcttcgcacgagcacgacaatggtgaagatcgagatgctcttgatgtcgagcttcttggatcagacacagattccgatcgccttgaatcagacgccaggacccaccctcctccccaggacgtcttggaaacacctcgagatcatcccctggccaggggtattctcgcttcagtggagcctatatcaactgtgcccagcgtcttgaacgccatttgcttgaataaccagggcatgaagatggtagtttccacacaagctcttgatagcttctttgaaatttttgagagcccagaacatgttcgtgtgatgctccaggacgaatctctgtctcatgccatagggggcagcttcgatgaactcgctcgtcaccatccgtcacttcggccgactatctccaatgctgttatggacatgattgcaagagttaattacctaggacgcaccaaggcccgtgattgcaactggggagcgaaattggtccacggagttcctagccacacagtcacagccgtgccagaggaacgtaaatcaaacaatgaggcagacgttcaaatgacagatattgatgcacacgaggatcgcgaagtagacagcagtgaatcagacactatgaccgtccactcctccatatgtccttacatcagcgccatcgctgggttcctgtcgcattatcttcacaacaataatttgaagatgattctggtcaacaatggctgtatcgagcaacttttagacctctatacctccccaagtttaccgtacgacttcgcaaaatctgacgctgccagaaatctgcagcaagtgatttcttcacttatcgaagcagcgccgatttatggtatcccctctgtactcaagcgcacgcaggccgctatttctgagcttgacgtacttgttgaagcccgaggctcagttccatacttcgagccaatttttgcagaaaatggtgtttccggtgtgccggccgcgggtggaacctctgtcattaaagcattactgaatgcgcaatccctcatgaacgtccttctccactcgttcccgttcacgtctcgagctcagacgatcacgctacctccagtaaacttcttcgactatcatagccagctaattaggtcattgggcccattaatccaagccgccatcgtcgaaaaggctgctatggcaggtcgcatgccatgtaggtggtggccaaaagctgatgagcaattgcaagccacctcgcggtttagcctcggagacgtatctttgtctgaagaaggcgagcgggagctccgcaaactcgaaagctttactcttactgaaattcttgcgtctatgtctgtctggaaacaaaatgccgatgacaaaacggaaatggaagaggagttggctaccgaggctgaacgttcgagcccacgctaccagaatttccagactatccaagtgttacttgacggactcgtgcccactactctctcattattccaaacatatgggagagcattgttaccaagacgtgatcgcgacttgtatgcaaggacacatcacatgcagttagcggaggatctcgccctcactgttataagagggtttgacattcccgacagtggactcaccgctccgggccttctttactggtacatcgttcttttcgctgtgcacgatttgcttatccctaatcctgcagatgctcgctctgataggcagatatatacgcccgtcatcgtgccagttcttttggccttcaagagacatgggggcttgaagctcttgaatagcatattgatcaaactcaaaaacgagatctgccaagagcatgagagtggcgaagaagtccgtaaattgagactcagtgctctcagcatgaagaagattcttgacctatatgctgtgattgcaagtggcaaaacgctcaccgatgctgttagccaagtccatcttcttcaacgaagttctggctctgaccgccgtgcggacgcgcaagttgcaccgaaccttgtggtggatattcgtgcgcgaatacttccggttgtccgagagctttgggaatcgcctcttgtcgaacaaggcacccagtccgtagtcgggcgaacaatcgaaatactgaaatcaattacagccgcagacttcgagaataatgcatacaagcgctcggacaagacacctttgcctgtatacctagagcttaccaatatcaagtttccatggtcgcagcataatgatcaaagacgaagtctccgcgagagctcaagtgcaccggacgatcttgttcgagaggccatttaccgaagcaatggtggtcatgctatggcaacggattactgtatggcacatgagaaagggtttgctggttccagaaacccaatccctgagaaagacagactggaagaaacggcagatatatcttctccatccaaccaaaccgaatcagcaaattcatcgtccgccgtcaacacaactgcgccagagaatgtgttttctggagacatatcaaataatgctataccagcagatggggaggacatgatgctcgatgggcttgacttggatacggagtttctgcgctcccttcgtgatggcgctccggtatctaatgaacccgtcgtgccacaattccttcagcaggaacccgatgagcacgatggacctccaacaagctcagcccaagactccacgtctggaacacaacctcggccagatgaagccgaggcaacaataatggctaaagaagaccttgatgaggaaagaaacaagcttcgcttcaacttgatcgataggtgtctggatgtcataggggctcatccagatgctgcctacgaagtttcagaactaattacgtcgattgttcatcaaagtcccggagatgacgctgcatctatcagacaggaaattggcgaaacgttggtcaacgcattgatgtcttttgcgatggatgatgatttaaagtctaacggccgatgcatcgctgcgtatgctcatcttctgtcccttctactccaagaaaagctctttttcaaggttactgctaccgtcttgaaagagaatgtcagcgaattcctgcgattcctaagtgtaccgagcgcctcttcggaggaacttgcaccctggattccctacatcttgctcatcttcgagatcctccttagtgatgatgagaatggccagcttgatggaattgaatggaaggtgcctgaagaactagaccccgacgccgtcgagccattgaaatggaaccccccagatctcaatgtccagcaagacgagagaacaatattactcggtctgatactggagattctcccccgaattggcaaagaggaatcactcgctgtcgccgtcttcagaattttagtgattctgactcgggatcgtacagtcgctcgacagattggtgacaagaaaaacctacaacgcctttttgtcactgccaaacaactttctggaggtggatctctccgcctcaatcaaaccaaaatttcttcctatatcctctccatccttcgccatatcatcgaggatgaagaggtcatcaagcagatcatgcgaagtgagatacaaacatggatcgagaatgggaatagaagaaattcgcagagtctggatgttcacgcctacttgaagcatttctcacacatggtactccgcgatcccaaattgttcgcagaagtttctaaccacatgctcaaaattcctcgatgggctccgccgagagaaggtagcagtgctaaattccaacctatcattctcaaagaacagccgtcggtagcgcccaaagatgagattgcgcctgctgtacgggctacggaggacctgtccattcacgacattaaaccatctactgaaaatgaagaaaagcctgtcgacgaagctgcgaagtctgcccagcaagatgtcaagcgtccgatcatcgagaatccggacggtgtgatacacttcctgctctgtgagctcctaaactacaaggaagttgacgacaaagagccaaacctggccggtaaagatgccaaatcgacaagcgaacagatctccaccagcgcaactgcagaaagtgaaagccgatcgaccgaaggaaaagataagaaggccaaggcttctttcaagtccgacgagcatccgatatttatctatcgctgctttttgctccattgtctcacagaacttctccagagctacaaccggactaaaatcgagttcatcaatttcaagaggaacgctccccttttcgccaacacgccagttaagcccagggctagtgtcttgaactacctgctcactgaccttctttacccaagtcacctcgaaggctcatcggatacaatcttacacaagaaaaaatacgcgacggctgtccagacacaacaccttttggtcgctcttgtaagcaagacgggagaaaagccaataacacgcggcctggacaaatacgactacgatgatgagtctgatctcatgttcgtgaggaaatttgtgctggacaccatcttgaagtcttacaaagacgctactgtctccaacgatccattcgacactagatatgctaggatgcttgccttatcggacgtaatgcatctcatgatgggcgagaacaaggacaaagacacagctttcacagcacggaatcctgctgattctataagcccatcgcaggctcagatgcggcggctaatgtacgagaagggatacctcgctgcactgacggcatcgattgctgatatcgatctggccttcccacccgtcaaacgtactatcaagtatattctccgtgtgctccgtattctaacaagtacagccatacatttgagtcactcaaacatcataccgtcaactccttctcaagataacatcgcagatgagcttatctcgacaagttccatttcagatatcgaagatgatcgagaggagacaccggatctctatcgtaactctgcgctcggcatgcttgaaccgggccgagacatggatgaggactactcagaggattcagaagatgacgatgatgaagagatgtatgacgaagaatacgacgaggacatagattatggatccgaagatcgcgaagaagctgttagcgaccaagaggacgaagacctcgaaagcatgggccccattgaaggtctgtccggtgagcctggcgttatagaagtcacaatggatgacgacgatgacgatgatgagatggacgaagacgacgacgatgacgaggaaagcgatgacgaagatgacgattccgacggcatggatgacgtggatgatcgtatcgagttcgcagacgctgaaggcaatccactcgaagacgatggtgcttcgggatgggagagcgaaactgatgaagcaatcgacgacgaacacgaggaaattgactatgaggcagaagcccaagatctccaagaagccgctatgcatcacttggatgatgtagacgggcttggtcggttcggaaacatcatgcgtgtcatcggagagggaggtgatttccaggcagtggaggagctcaacaacctcaatgaaaggttcatggaaaatatggaagacgaggaggatgacgaagcagacgaggatgaggatgaaatggatgatgagtatgcctttgaggaggatttcacgaatgatgcaccgcctagagacattgtggcaccgcctagcttagggtgggacacggttgttcttgagcagggggctatgtttggcaatcgtcgtcgtcaacatgcaatcgaccggcatcctgcgctccctttcataatgggccaccgcgagcttggtaactttggcgatccccgaacccgaactgggcactctcgtgacacacgagcacctaacaacgaggacggtgtcaatccccttttacgcagaactgccggcaatagccgggatgcatcgcctcgaccgtcaaactccatgagcaacaatttcgttcgtctgggctttaccggcagtttggtcggtggtcctggtaatgataataccatatctgtgattaacgatctaatggcgtctctacccatgcacataggccgacacggccacgctttccagctgtcggttggagccgggcaccgatcgatcggtgacatttccttgcccttcaactttcactcgcgcgatttccggtccgatagccgccgagacacgtaccaagaaccgatacagtccacttccttcaatgaccagtcaacagtgaatcgctggatcgaagaggtcaaaattatttttggttcacagtaccaagacacagcagtcaagcttcatgcagtcctggcctctcatctagtgcctcctgccatgagtcgagagatgaccttgcaagcagaggagcagcgagtcatagaagagaagaagaagaagcgcgaggaggaagagagaaaaattaaagaagccgaagaaaaagctgctcgggagaaaaaggaagcagaagaacgcgaaagggctgcggaagaagaagccaaggcactcgccgccgccgccgcagccgccgaaacacaaacggcaatcggtactgatcagggcgcacaaccccaccagaccgatgcagatgcgatggaaggtgttgaacaaactgatgactctattactgcagctcaggatgggtctgccccaacgagccagacacgtgtcttcactacaattaggggagaacaagtcgatgtgaccgaactaggaatcgatcctgactatttggaagcccttcctgaagagttccgtgaggaagtcattgcccagactgtcagctctcgaagggctgaggcacgggaagccccgggacgtacaggagaacagcagcccgaagagttagaaacattcttgaacgcccttcccgacgagcttcgtcaagaaatcatccaatcggaacgccaagaacaacgccgacgggacaattcggctcagcgtagagccgctgctggtcaagcgaatgcagcagcccaagcgcaggatatggacgccgctagcatccttatgacattcccaccggcccttagagatcaggtgttgatggaccaaggagcggagattgtggatcaccttccgccggagctggcagctcaggcacgacgcgtactcaggcatcaacaaccctcgggagtaccagatcctcgaccgtcttttggctcttcgcgcgtgcgagacgctattcaggcagccacatcatccgataacgatcgtaagccgccgcggaaaacggttgttcagatgttggataaatctggcgtcgccacattactccgccttatgtttatcaacatgaagggaggttctatagagaactctctgaagaatgtcttcaaggatgtctgcgaaaacatgcaaaacagaatcgaggttgtgagcactctacttcaaattctgcaagatggttctacagacctagatgcagtagagcgaagttttgcacatctgtccataaaagcgaagcagcccaaagacaaggaccccaagatgcagacccctcaaggcctaaagcggacattcacaaacataaacaatcatcattttgtgcagcccagttcggaaacatcgcctctcttgatcgtccagcagtgtttggacttgctttgctatcttgccgatcagaatgtccagataccatcattattccttacagagcatgatgccgtatctgctacggtcaagcgtagcctgagccgcaaaggcaagggcaaagacaacaaagctcacaagttcgcgatcaactctttgctttctctgcttgaccgagatcttgttatggagagctccactatcatggactccctctctcaactcctgagtagagtcacatatcctcttcttgctcttgatcgtaaggaaaaggaagcagttgaagcgattgagatcctagaggcacagatcaaagccgagaagcaggccgagaagccaagtacatcgcacagtactatggagggacatgaatcagcttctcagccggaagcagcccccaaagatatttctccaactcatgatgtcatcaacgccgacacgactgcccctggatccggcagcgaagcacagaacccggttgacagctctgctaaagactctgagactaccgagctagaaaaggcgcttgaaaagaagcaagccggcttgaaaaagattcgacaactgcatcctcctgcggtccctgactcgaacctcacacttgtcatcaagatcttcgtagctcgggaatgcagttcgaagacgttcaaagagactttgtctgcaatcaagaacttgtcaatcatacaaggggcaatgctcgttttcggccaagaactcgcacggcaagcgcaaatcttaagtgagagaattgtcgttcagttggatgaactgttaccgcatatcgagaaggccgtctcaggtaccgaaattcaaggagttgcactctccaagttctcgcccggtgcctcggatcagaacaagctacttcgtgtcttgacagcgcttgatcacctatttgcgcagaaaaagacggaaacagcgcaaatatcgtctgccgaggagactcaaaagcaagatctcctaagcaatctttaccgcaattcgaccttcaatgctctctgggagaagctcagtgcttgtctaagtgctatccgggagcgtgaaaacctcatgaacgtagctactatactgctgcccctcattgaagctttgatggtggtctgcaaggacagcactcaaggcgaggcgactaccatgaagaaccaagccgccaaagatactgtgctctcaagtccccaacctgaagctcacatggctggccttttcttcactttcaccgaagaccatcgacgagtactcaatgaactcgtacgtaataacccgtcacttatgaaagggacattctcgcacctcgtcaagaaccccaaggttcttgaattcgacaacaaaaaggcctggtttactcgtagcgtgcacaataagcagcaagctacccacaggccgttccctaccctccaactccaagtccggcgcgaccatgttttccacgactctttcaaatccctctatttcaagagcggtgacgaaatgaagtttggcaagctcaatattcgattccatggtgaagaaggtgtggatgctggcggtgtcacacgagaatggttccaagttctggccaggcaaatgtttgatgccaactacgctctgttcgtacctgtttccagcgacagaacaactttccatcccaacaaactgagcggtataaacgacgagcatctcatgtttttcaaattcattggccgtattatcggaaaagcactctacgaaggccgtctgcttgagtgctacttcagccgtgccgtctacaagcgaatcttaggaaagccggtatcggtgaaagatatggagtcattcgatcccgagtactacaaatctttatcctggatgctggacaacgacatcactgatattatcactgagacgttttcagtcgaagacgacgagtttggagtaaccaagatcgaggatctatgtgagaacggtcgcagcataccagtcaccgaagacaacaaacatgattatgttcgtttggtggttgaacacaaacttttgtcctctgtcaaggaacagatggaacacttccttaagggtttccatgaaatcatccccgccgatctcatttcaattttcaatgagcaggagctagagttactgatctctggcctgccggacattgatatcgacgactggaagagcaataccgagtatcacaattacacgccatcgtcaccacagatccagtggttctggcgtgccttgcgatcatacgacaaagaagaggtagccaagcttctacagttcgtcacaggaaccagcaaagtgcctctgaatggcttcaaggagctcgagggaatgaacggagtgaaccgcttcaacatccatcgcgactatggcaataaggatcgcctccctagttctcacacatgcttcaatcaactcgatttgcccgagtatgagagctacgaaatccttcgtgcacagctgctcaaagccatcacaaccgggagcgactactttgggtttgcatag

SEQ ID NO: 20030 - protein, 4082 aa, Muscodor strobelii
  misc_feature: SGI Peptide ID NO. 566748
  misc_feature (110)..(520): Pfam Id: PF06012 Pfam Desc: Domain of Function (DUF908)
  misc_feature (578)..(1011): Pfam Id: PF06025 Pfam Desc: Domain of Function (DUF913)
  misc_feature (3776)..(4082): Pfam Id: PF00632 Pfam Desc: HECT-domain (ubiquitin-transferase)
  misc_feature (1)..(4082): NCBI GI: 46107500 Blast Desc: FG00633.1 [Gibberella zeae PH-1]
  misc_feature (1)..(4082): NCBI GI: 145608258 Blast Desc: MGG_03252 [Magnaporthe grisea 70-15] gi|145015751|gb|EDK00241.1| MGG_03252 [Magnaporthe grisea 70-15]
  misc_feature (1)..(4082): NCBI GI: 16944653 Blast Desc: related to TOM1 protein [Neurospora crassa]
  misc_feature (1)..(4082): NCBI GI: 164423474 Blast Desc: NCU08501 [Neurospora crassa OR74A] gi|166215033|sp|Q9P4Z1.3|TOM1_NEUCR RecName: Full=E3 ubiquitin-protein ligase TOM1-like gi|157070108|gb|EAA34194.2|
  misc_feature (1)..(4082): NCBI GI: 156043419 Blast Desc: SS1G_10713 [Sclerotinia sclerotiorum 1980] gi|154695100|gb|EDN94838.1| SS1G_10713 [Sclerotinia sclerotiorum 1980]
  misc_feature (1)..(4082): NCBI GI: 226285090 Blast Desc: E3 ubiquitin-protein ligase HUWE1 [Paracoccidioides brasiliensis Pb01]
  misc_feature (1)..(4082): NCBI GI: 226290018 Blast Desc: E3 ubiquitin-protein ligase HUWE1 [Paracoccidioides brasiliensis Pb18]
  misc_feature (1)..(4082): NCBI GI: 67523019 Blast Desc: AN1966.2 [Aspergillus nidulans FGSC A4] gi|40745975|gb|EAA65131.1| AN1966.2 [Aspergillus nidulans FGSC A4] gi|259487325|tpe|CBF85910.1| TPA: ubiquitin-protein ligase
  misc_feature (74)..(4082): NCBI GI: 225682602 Blast Desc: linoleate diol synthase [Paracoccidioides brasiliensis Pb03]
  misc_feature (1)..(4082): NCBI GI: 258567364 Blast Desc: HECT protein [Uncinocarpus reesii 1704] gi|237905872|gb|EEP80273.1| HECT protein [Uncinocarpus reesii 1704]
MGKITKAIQAKHKETLSPMVQEFVDLASSTPLHLLTQTLATFPSRWPFPRGDLYHWIPLLNRFDTLLESFCQIYKLNEGPQTREFGCELLLHFRKSKESGDIEELPELDDKNDGDAALIESILKFTQMLLDHCGNRSIYASSAHLNDLLHSTDFNIICATLQVGVELAQRYQASVKRIHGMATRQVHTALLSNHYNIDLERVQQLAQPFVKTPIVKPTEPSSLSTPGSVGKGKDKASGGSTKNAASMFANDLCSIARSNPDDADDSKTRWKGWADIKLTYYPSPDTSSEEHSHTSVPKRGNANAPSSPTPLRRSNSAQTPHSTPSRTNRPISGSLDDTPGSAPRSVGGGREEGASHGPQSLVITQAAVTSSSIFEALSRAPSDLPSQSKYEYLNRLRVAKALTGSVESRQQALKARLLAIQNLAYIHVESTFIEKVLRQDSDEPRRFQLVYQLAELIHPGADGAKPIPLDLQSIALSLLEAIASFHSKVSDIFSALNATVNHGVLLYIIRKAVAEMKSDDAGEQWTLKDEWRDKLFSLTLHITMAMANTSVRNTPEIIAAGLLDILVEILNLRSNVAERTHGTLVGFLDSLVYNVQSSFESLANADGLDAITNLITHEVDLAKQLVAAGKGTPASHRSQIVDYEIPFYQQQNLKFLLKFIHHLMANTFTYHGNTERLLRNLVDKSDLLNSLREIIENMTLFGSLVWTNSVVILGDFLNNDPTSFSAILDAGLIQSYLTALTGRAVKAGPTGATTASSHEHDNGEDRDALDVELLGSDTDSDRLESDARTHPPPQDVLETPRDHPLARGILASVEPISTVPSVLNAICLNNQGMKMVVSTQALDSFFEIFESPEHVRVMLQDESLSHAIGGSFDELARHHPSLRPTISNAVMDMIARVNYLGRTKARDCNWGAKLVHGVPSHTVTAVPEERKSNNEADVQMTDIDAHEDREVDSSESDTMTVHSSICPYISAIAGFLSHYLHNNNLKMILVNNGCIEQLLDLYTSPSLPYDFAKSDAARNLQQVISSLIEAAPIYGIPSVLKRTQAAISELDVLVEARGSVPYFEPIFAENGVSGVPAAGGTSVIKALLNAQSLMNVLLHSFPFTSRAQTITLPPVNFFDYHSQLIRSLGPLIQAAIVEKAAMAGRMPCRWWPKADEQLQATSRFSLGDVSLSEEGERELRKLESFTLTEILASMSVWKQNADDKTEMEEELATEAERSSPRYQNFQTIQVLLDGLVPTTLSLFQTYGRALLPRRDRDLYARTHHMQLAEDLALTVIRGFDIPDSGLTAPGLLYWYIVLFAVHDLLIPNPADARSDRQIYTPVIVPVLLAFKRHGGLKLLNSILIKLKNEICQEHESGEEVRKLRLSALSMKKILDLYAVIASGKTLTDAVSQVHLLQRSSGSDRRADAQVAPNLVVDIRARILPVVRELWESPLVEQGTQSVVGRTIEILKSITAADFENNAYKRSDKTPLPVYLELTNIKFPWSQHNDQRRSLRESSSAPDDLVREAIYRSNGGHAMATDYCMAHEKGFAGSRNPIPEKDRLEETADISSPSNQTESANSSSAVNTTAPENVFSGDISNNAIPADGEDMMLDGLDLDTEFLRSLRDGAPVSNEPVVPQFLQQEPDEHDGPPTSSAQDSTSGTQPRPDEAEATIMAKEDLDEERNKLRFNLIDRCLDVIGAHPDAAYEVSELITSIVHQSPGDDAASIRQEIGETLVNALMSFAMDDDLKSNGRCIAAYAHLLSLLLQEKLFFKVTATVLKENVSEFLRFLSVPSASSEELAPWIPYILLIFEILLSDDENGQLDGIEWKVPEELDPDAVEPLKWNPPDLNVQQDERTILLGLILEILPRIGKEESLAVAVFRILVILTRDRTVARQIGDKKNLQRLFVTAKQLSGGGSLRLNQTKISSYILSILRHIIEDEEVIKQIMRSEIQTWIENGNRRNSQSLDVHAYLKHFSHMVLRDPKLFAEVSNHMLKIPRWAPPREGSSAKFQPIILKEQPSVAPKDEIAPAVRATEDLSIHDIKPSTENEEKPVDEAAKSAQQDVKRPIIENPDGVIHFLLCELLNYKEVDDKEPNLAGKDAKSTSEQISTSATAESESRSTEGKDKKAKASFKSDEHPIFIYRCFLLHCLTELLQSYNRTKIEFINFKRNAPLFANTPVKPRASVLNYLLTDLLYPSHLEGSSDTILHKKKYATAVQTQHLLVALVSKTGEKPITRGLDKYDYDDESDLMFVRKFVLDTILKSYKDATVSNDPFDTRYARMLALSDVMHLMMGENKDKDTAFTARNPADSISPSQAQMRRLMYEKGYLAALTASIADIDLAFPPVKRTIKYILRVLRILTSTAIHLSHSNIIPSTPSQDNIADELISTSSISDIEDDREETPDLYRNSALGMLEPGRDMDEDYSEDSEDDDDEEMYDEEYDEDIDYGSEDREEAVSDQEDEDLESMGPIEGLSGEPGVIEVTMDDDDDDDEMDEDDDDDEESDDEDDDSDGMDDVDDRIEFADAEGNPLEDDGASGWESETDEAIDDEHEEIDYEAEAQDLQEAAMHHLDDVDGLGRFGNIMRVIGEGGDFQAVEELNNLNERFMENMEDEEDDEADEDEDEMDDEYAFEEDFTNDAPPRDIVAPPSLGWDTVVLEQGAMFGNRRRQHAIDRHPALPFIMGHRELGNFGDPRTRTGHSRDTRAPNNEDGVNPLLRRTAGNSRDASPRPSNSMSNNFVRLGFTGSLVGGPGNDNTISVINDLMASLPMHIGRHGHAFQLSVGAGHRSIGDISLPFNFHSRDFRSDSRRDTYQEPIQSTSFNDQSTVNRWIEEVKIIFGSQYQDTAVKLHAVLASHLVPPAMSREMTLQAEEQRVIEEKKKKREEEERKIKEAEEKAAREKKEAEERERAAEEEAKALAAAAAAAETQTAIGTDQGAQPHQTDADAMEGVEQTDDSITAAQDGSAPTSQTRVFTTIRGEQVDVTELGIDPDYLEALPEEFREEVIAQTVSSRRAEAREAPGRTGEQQPEELETFLNALPDELRQEIIQSERQEQRRRDNSAQRRAAAGQANAAAQAQDMDAASILMTFPPALRDQVLMDQGAEIVDHLPPELAAQARRVLRHQQPSGVPDPRPSFGSSRVRDAIQAATSSDNDRKPPRKTVVQMLDKSGVATLLRLMFINMKGGSIENSLKNVFKDVCENMQNRIEVVSTLLQILQDGSTDLDAVERSFAHLSIKAKQPKDKDPKMQTPQGLKRTFTNINNHHFVQPSSETSPLLIVQQCLDLLCYLADQNVQIPSLFLTEHDAVSATVKRSLSRKGKGKDNKAHKFAINSLLSLLDRDLVMESSTIMDSLSQLLSRVTYPLLALDRKEKEAVEAIEILEAQIKAEKQAEKPSTSHSTMEGHESASQPEAAPKDISPTHDVINADTTAPGSGSEAQNPVDSSAKDSETTELEKALEKKQAGLKKIRQLHPPAVPDSNLTLVIKIFVARECSSKTFKETLSAIKNLSIIQGAMLVFGQELARQAQILSERIVVQLDELLPHIEKAVSGTEIQGVALSKFSPGASDQNKLLRVLTALDHLFAQKKTETAQISSAEETQKQDLLSNLYRNSTFNALWEKLSACLSAIRERENLMNVATILLPLIEALMVVCKDSTQGEATTMKNQAAKDTVLSSPQPEAHMAGLFFTFTEDHRRVLNELVRNNPSLMKGTFSHLVKNPKVLEFDNKKAWFTRSVHNKQQATHRPFPTLQLQVRRDHVFHDSFKSLYFKSGDEMKFGKLNIRFHGEEGVDAGGVTREWFQVLARQMFDANYALFVPVSSDRTTFHPNKLSGINDEHLMFFKFIGRIIGKALYEGRLLECYFSRAVYKRILGKPVSVKDMESFDPEYYKSLSWMLDNDITDIITETFSVEDDEFGVTKIEDLCENGRSIPVTEDNKHDYVRLVVEHKLLSSVKEQMEHFLKGFHEIIPADLISIFNEQELELLISGLPDIDIDDWKSNTEYHNYTPSSPQIQWFWRALRSYDKEEVAKLLQFVTGTSKVPLNGFKELEGMNGVNRFNIHRDYGNKDRLPSSHTCFNQLDLPEYESYEILRAQLLKAITTGSDYFGFA

SEQ ID NO: 20031 - DNA, 13232 bp, Muscodor strobelii
  misc_feature: SGI EST ID NO. CUFF.47255.0
  misc_feature: Variant of the nucleotide sequence at SEQ ID NO 20029
tgacaaggcgcaacacctgaaccacaagtttcctgcacatgcacgacacctcaactttcttttctcccaaacatttccctgatctctctcccacctcgccaacaatctcgttgggctctcgcgctgctacgagatcctcacttgcagtcggagctgtctcgagttacatcacttcccttgacaccgctgccttggagctggtactgacgaacagcggcctgcacccgcctgcttcgtccgccacattgtgaggtcaaccttcaaggtccagcttcgtccacgcacccgatcttgcccgcacctcttcacagtctcaccctcacgcacatcccacttcagtctataccttcgtgcggcaccgacattcatccgccatactgtgccacctacttacttccctgcccaatcatctctcagccgcgcagcccgcgggccaaaaccatcttgaccttagcctgagccccacgatatcggttcgcaaggctgagagctcgcgacccagattcattgccgagcaggttccggaactcgcagtgtcgccgcccactgcaccgagaaacacgtcaattatccagttggcgggagcagtccataatacttggatgctccagcgtgctacgtcaagttgtcggtctcgcgcattcgagcgtcggtagtggagggggagttgacactttgttcgcggctctgccgccccagccttcaccatgggaaagatcacgaaggctatccaagccaaacacaaggagactctgtctccgatggtgcaggaattcgtcgatttagcttcttcgacacccttgcacctcttgacccagacccttgccacattcccctcgcgatggccttttcctcgaggagatctataccattggatccctcttctgaatagattcgacaccctcctagaatcattctgccaaatctataaactgaacgagggccctcagactcgagaattcggttgcgagctgttgctccatttccgcaagtccaaggagtcaggcgacatagaagagctgcctgaactcgacgacaagaatgatggtgacgcagctcttatcgagtctatcctaaagtttacccagatgcttctggatcattgtggcaaccgcagtatatacgccagcagtgcccacttgaatgacctgctgcatagtacagacttcaacatcatctgtgccacccttcaagtcggcgtggagcttgctcaacgataccaggcttcagttaagcgcatccacggcatggctactcgacaggtgcacacggctctattgtcgaatcactacaatatcgaccttgagcgcgtacagcaactcgcacagccttttgtgaagacgcccattgtcaagcctacggaacccagctcgttgtctacgcctggcagtgtcggtaaaggcaaggataaggcatccggaggaagtaccaagaatgcggcctccatgtttgcgaatgatctgtgttctatagcaagatccaacccagacgatgccgacgattctaaaacacgatggaagggctgggccgatatcaaactgacgtattatccatcccccgacacctcttcagaggagcactcacatacgtccgtacctaagcgagggaatgcaaatgcgccttcgagtcctacgcctctccgccgtagcaactccgctcagacgccccacagcacaccttctcgtacgaatcgtccaatctcaggatcattagatgacacccctggctcagcccctcgatctgtaggtggaggtcgtgaggaaggggcttcgcatggtccacaatcgctggtgatcacacaggctgctgtcacttcttcttcgatcttcgaagctttaagcagagcgccatctgacttgcctagccaaagcaagtacgagtatctcaaccgtttgcgcgtggccaaagccctgactgggtctgtggagtctcggcaacaggctctgaaggcacggctcttggctatacagaatttagcttacattcatgttgagtcaaccttcattgagaaagtccttaggcaagacagcgacgagccgcgccgcttccagctagtgtatcaattagccgagttgattcatcccggggcggatggcgcaaaacctataccgctcgaccttcagtcaattgcactctcgctcctcgaggctatcgcttcattccattcaaaggtgtctgacatcttctccgccttgaatgcaactgtcaaccatggcgtgctcctttacattataagaaaggccgttgctgagatgaagtcggatgacgcaggcgagcagtggactctgaaggatgaatggcgtgacaagctgttctctctcaccctccatatcacgatggccatggctaatacatctgtgcggaacacgccggagattatagcagctggtctattagatatcctagttgagatcctcaacctcagatccaatgttgccgagcgaactcatggtacactggtcggttttctggacagcttagtgtataacgtacaaagctcctttgagtctttagctaatgccgacgggcttgacgcaattaccaacttgatcactcacgaagtagatctcgccaagcagttagttgccgctggcaagggaacaccagcaagtcatcgatcgcagattgttgactatgagatccctttttatcagcaacagaatctcaaattcctcctgaaattcatacaccacctgatggcgaacacttttacttaccacggaaacactgagcgcttactacgcaatcttgtcgacaagtctgaccttctcaacagcctccgtgagatcattgagaatatgacgctcttcggatcgctcgtttggaccaacagcgtagtcatcttgggtgattttctgaacaacgatccgaccagtttctctgccatcttagatgccggactgatccagagttatctgaccgccctaactggcagagctgttaaggctgggccaactggtgcgacgacggcttcttcgcacgagcacgacaatggtgaagatcgagatgctcttgatgtcgagcttcttggatcagacacagattccgatcgccttgaatcagacgccaggacccaccctcctccccaggacgtcttggaaacacctcgagatcatcccctggccaggggtattctcgcttcagtggagcctatatcaactgtgcccagcgtcttgaacgccatttgcttgaataaccagggcatgaagatggtagtttccacacaagctcttgatagcttctttgaaatttttgagagcccagaacatgttcgtgtgatgctccaggacgaatctctgtctcatgccatagggggcagcttcgatgaactcgctcgtcaccatccgtcacttcggccgactatctccaatgctgttatggacatgattgcaagagttaattacctaggacgcaccaaggcccgtgattgcaactggggagcgaaattggtccacggagttcctagccacacagtcacagccgtgccagaggaacgtaaatcaaacaatgaggcagacgttcaaatgacagatattgatgcacacgaggatcgcgaagtagacagcagtgaatcagacactatgaccgtccactcctccatatgtccttacatcagcgccatcgctgggttcctgtcgcattatcttcacaacaataatttgaagatgattctggtcaacaatggctgtatcgagcaacttttagacctctatacctccccaagtttaccgtacgacttcgcaaaatctgacgctgccagaaatctgcagcaagtgatttcttcacttatcgaagcagcgccgatttatggtatcccctctgtactcaagcgcacgcaggccgctatttctgagcttgacgtacttgttgaagcccgaggctcagttccatacttcgagccaatttttgcagaaaatggtgtttccggtgtgccggccgcgggtggaacctctgtcattaaagcattactgaatgcgcaatccctcatgaacgtccttctccactcgttcccgttcacgtctcgagctcagacgatcacgctacctccagtaaacttcttcgactatcatagccagctaattaggtcattgggcccattaatccaagccgccatcgtcgaaaaggctgctatggcaggtcgcatgccatgtaggtggtggccaaaagctgatgagcaattgcaagccacctcgcggtttagcctcggagacgtatctttgtctgaagaaggcgagcgggagctccgcaaactcgaaagctttactcttactgaaattcttgcgtctatgtctgtctggaaacaaaatgccgatgacaaaacggaaatggaagaggagttggctaccgaggctgaacgttcgagcccacgctaccagaatttccagactatccaagtgttacttgacggactcgtgcccactactctctcattattccaaacatatgggagagcattgttaccaagacgtgatcgcgacttgtatgcaaggacacatcacatgcagttagcggaggatctcgccctcactgttataagagggtttgacattcccgacagtggactcaccgctccgggccttctttactggtacatcgttcttttcgctgtgcacgatttgcttatccctaatcctgcagatgctcgctctgataggcagatatatacgcccgtcatcgtgccagttcttttggccttcaagagacatgggggcttgaagctcttgaatagcatattgatcaaactcaaaaacgagatctgccaagagcatgagagtggcgaagaagtccgtaaattgagactcagtgctctcagcatgaagaagattcttgacctatatgctgtgattgcaagtggcaaaacgctcaccgatgctgttagccaagtccatcttcttcaacgaagttctggctctgaccgccgtgcggacgcgcaagttgcaccgaaccttgtggtggatattcgtgcgcgaatacttccggttgtccgagagctttgggaatcgcctcttgtcgaacaaggcacccagtccgtagtcgggcgaacaatcgaaatactgaaatcaattacagccgcagacttcgagaataatgcatacaagcgctcggacaagacacctttgcctgtatacctagagcttaccaatatcaagtttccatggtcgcagcataatgatcaaagacgaagtctccgcgagagctcaagtgcaccggacgatcttgttcgagaggccatttaccgaagcaatggtggtcatgctatggcaacggattactgtatggcacatgagaaagggtttgctggttccagaaacccaatccctgagaaagacagactggaagaaacggcagatatatcttctccatccaaccaaaccgaatcagcaaattcatcgtccgccgtcaacacaactgcgccagagaatgtgttttctggagacatatcaaataatgctataccagcagatggggaggacatgatgctcgatgggcttgacttggatacggagtttctgcgctcccttcgtgatggcgctccggtatctaatgaacccgtcgtgccacaattccttcagcaggaacccgatgagcacgatggacctccaacaagctcagcccaagactccacgtctggaacacaacctcggccagatgaagccgaggcaacaataatggctaaagaagaccttgatgaggaaagaaacaagcttcgcttcaacttgatcgataggtgtctggatgtcataggggctcatccagatgctgcctacgaagtttcagaactaattacgtcgattgttcatcaaagtcccggagatgacgctgcatctatcagacaggaaattggcgaaacgttggtcaacgcattgatgtcttttgcgatggatgatgatttaaagtctaacggccgatgcatcgctgcgtatgctcatcttctgtcccttctactccaagaaaagctctttttcaaggttactgctaccgtcttgaaagagaatgtcagcgaattcctgcgattcctaagtgtaccgagcgcctcttcggaggaacttgcaccctggattccctacatcttgctcatcttcgagatcctccttagtgatgatgagaatggccagcttgatggaattgaatggaaggtgcctgaagaactagaccccgacgccgtcgagccattgaaatggaaccccccagatctcaatgtccagcaagacgagagaacaatattactcggtctgatactggagattctcccccgaattggcaaagaggaatcactcgctgtcgccgtcttcagaattttagtgattctgactcgggatcgtacagtcgctcgacagattggtgacaagaaaaacctacaacgcctttttgtcactgccaaacaactttctggaggtggatctctccgcctcaatcaaaccaaaatttcttcctatatcctctccatccttcgccatatcatcgaggatgaagaggtcatcaagcagatcatgcgaagtgagatacaaacatggatcgagaatgggaatagaagaaattcgcagagtctggatgttcacgcctacttgaagcatttctcacacatggtactccgcgatcccaaattgttcgcagaagtttctaaccacatgctcaaaattcctcgatgggctccgccgagagaaggtagcagtgctaaattccaacctatcattctcaaagaacagccgtcggtagcgcccaaagatgagattgcgcctgctgtacgggctacggaggacctgtccattcacgacattaaaccatctactgaaaatgaagaaaagcctgtcgacgaagctgcgaagtctgcccagcaagatgtcaagcgtccgatcatcgagaatccggacggtgtgatacacttcctgctctgtgagctcctaaactacaaggaagttgacgacaaagagccaaacctggccggtaaagatgccaaatcgacaagcgaacagatctccaccagcgcaactgcagaaagtgaaagccgatcgaccgaaggaaaagataagaaggccaaggcttctttcaagtccgacgagcatccgatatttatctatcgctgctttttgctccattgtctcacagaacttctccagagctacaaccggactaaaatcgagttcatcaatttcaagaggaacgctccccttttcgccaacacgccagttaagcccagggctagtgtcttgaactacctgctcactgaccttctttacccaagtcacctcgaaggctcatcggatacaatcttacacaagaaaaaatacgcgacggctgtccagacacaacaccttttggtcgctcttgtaagcaagacgggagaaaagccaataacacgcggcctggacaaatacgactacgatgatgagtctgatctcatgttcgtgaggaaatttgtgctggacaccatcttgaagtcttacaaagacgctactgtctccaacgatccattcgacactagatatgctaggatgcttgccttatcggacgtaatgcatctcatgatgggcgagaacaaggacaaagacacagctttcacagcacggaatcctgctgattctataagcccatcgcaggctcagatgcggcggctaatgtacgagaagggatacctcgctgcactgacggcatcgattgctgatatcgatctggccttcccacccgtcaaacgtactatcaagtatattctccgtgtgctccgtattctaacaagtacagccatacatttgagtcactcaaacatcataccgtcaactccttctcaagataacatcgcagatgagcttatctcgacaagttccatttcagatatcgaagatgatcgagaggagacaccggatctctatcgtaactctgcgctcggcatgcttgaaccgggccgagacatggatgaggactactcagaggattcagaagatgacgatgatgaagagatgtatgacgaagaatacgacgaggacatagattatggatccgaagatcgcgaagaagctgttagcgaccaagaggacgaagacctcgaaagcatgggccccattgaaggtctgtccggtgagcctggcgttatagaagtcacaatggatgacgacgatgacgatgatgagatggacgaagacgacgacgatgacgaggaaagcgatgacgaagatgacgattccgacggcatggatgacgtggatgatcgtatcgagttcgcagacgctgaaggcaatccactcgaagacgatggtgcttcgggatgggagagcgaaactgatgaagcaatcgacgacgaacacgaggaaattgactatgaggcagaagcccaagatctccaagaagccgctatgcatcacttggatgatgtagacgggcttggtcggttcggaaacatcatgcgtgtcatcggagagggaggtgatttccaggcagtggaggagctcaacaacctcaatgaaaggttcatggaaaatatggaagacgaggaggatgacgaagcagacgaggatgaggatgaaatggatgatgagtatgcctttgaggaggatttcacgaatgatgcaccgcctagagacattgtggcaccgcctagcttagggtgggacacggttgttcttgagcagggggctatgtttggcaatcgtcgtcgtcaacatgcaatcgaccggcatcctgcgctccctttcataatgggccaccgcgagcttggtaactttggcgatccccgaacccgaactgggcactctcgtgacacacgagcacctaacaacgaggacggtgtcaatccccttttacgcagaactgccggcaatagccgggatgcatcgcctcgaccgtcaaactccatgagcaacaatttcgttcgtctgggctttaccggcagtttggtcggtggtcctggtaatgataataccatatctgtgattaacgatctaatggcgtctctacccatgcacataggccgacacggccacgctttccagctgtcggttggagccgggcaccgatcgatcggtgacatttccttgcccttcaactttcactcgcgcgatttccggtccgatagccgccgagacacgtaccaagaaccgatacagtccacttccttcaatgaccagtcaacagtgaatcgctggatcgaagaggtcaaaattatttttggttcacagtaccaagacacagcagtcaagcttcatgcagtcctggcctctcatctagtgcctcctgccatgagtcgagagatgaccttgcaagcagaggagcagcgagtcatagaagagaagaagaagaagcgcgaggaggaagagagaaaaattaaagaagccgaagaaaaagctgctcgggagaaaaaggaagcagaagaacgcgaaagggctgcggaagaagaagccaaggcactcgccgccgccgccgcagccgccgaaacacaaacggcaatcggtactgatcagggcgcacaaccccaccagaccgatgcagatgcgatggaaggtgttgaacaaactgatgactctattactgcagctcaggatgggtctgccccaacgagccagacacgtgtcttcactacaattaggggagaacaagtcgatgtgaccgaactaggaatcgatcctgactatttggaagcccttcctgaagagttccgtgaggaagtcattgcccagactgtcagctctcgaagggctgaggcacgggaagccccgggacgtacaggagaacagcagcccgaagagttagaaacattcttgaacgcccttcccgacgagcttcgtcaagaaatcatccaatcggaacgccaagaacaacgccgacgggacaattcggctcagcgtagagccgctgctggtcaagcgaatgcagcagcccaagcgcaggatatggacgccgctagcatccttatgacattcccaccggcccttagagatcaggtgttgatggaccaaggagcggagattgtggatcaccttccgccggagctggcagctcaggcacgacgcgtactcaggcatcaacaaccctcgggagtaccagatcctcgaccgtcttttggctcttcgcgcgtgcgagacgctattcaggcagccacatcatccgataacgatcgtaagccgccgcggaaaacggttgttcagatgttggataaatctggcgtcgccacattactccgccttatgtttatcaacatgaagggaggttctatagagaactctctgaagaatgtcttcaaggatgtctgcgaaaacatgcaaaacagaatcgaggttgtgagcactctacttcaaattctgcaagatggttctacagacctagatgcagtagagcgaagttttgcacatctgtccataaaagcgaagcagcccaaagacaaggaccccaagatgcagacccctcaaggcctaaagcggacattcacaaacataaacaatcatcattttgtgcagcccagttcggaaacatcgcctctcttgatcgtccagcagtgtttggacttgctttgctatcttgccgatcagaatgtccagataccatcattattccttacagagcatgatgccgtatctgctacggtcaagcgtagcctgagccgcaaaggcaagggcaaagacaacaaagctcacaagttcgcgatcaactctttgctttctctgcttgaccgagatcttgttatggagagctccactatcatggactccctctctcaactcctgagtagagtcacatatcctcttcttgctcttgatcgtaaggaaaaggaagcagttgaagcgattgagatcctagaggcacagatcaaagccgagaagcaggccgagaagccaagtacatcgcacagtactatggagggacatgaatcagcttctcagccggaagcagcccccaaagatatttctccaactcatgatgtcatcaacgccgacacgactgcccctggatccggcagcgaagcacagaacccggttgacagctctgctaaagactctgagactaccgagctagaaaaggcgcttgaaaagaagcaagccggcttgaaaaagattcgacaactgcatcctcctgcggtccctgactcgaacctcacacttgtcatcaagatcttcgtagctcgggaatgcagttcgaagacgttcaaagagactttgtctgcaatcaagaacttgtcaatcatacaaggggcaatgctcgttttcggccaagaactcgcacggcaagcgcaaatcttaagtgagagaattgtcgttcagttggatgaactgttaccgcatatcgagaaggccgtctcaggtaccgaaattcaaggagttgcactctccaagttctcgcccggtgcctcggatcagaacaagctacttcgtgtcttgacagcgcttgatcacctatttgcgcagaaaaagacggaaacagcgcaaatatcgtctgccgaggagactcaaaagcaagatctcctaagcaatctttaccgcaattcgaccttcaatgctctctgggagaagctcagtgcttgtctaagtgctatccgggagcgtgaaaacctcatgaacgtagctactatactgctgcccctcattgaagctttgatggtggtctgcaaggacagcactcaaggcgaggcgactaccatgaagaaccaagccgccaaagatactgtgctctcaagtccccaacctgaagctcacatggctggccttttcttcactttcaccgaagaccatcgacgagtactcaatgaactcgtacgtaataacccgtcacttatgaaagggacattctcgcacctcgtcaagaaccccaaggttcttgaattcgacaacaaaaaggcctggtttactcgtagcgtgcacaataagcagcaagctacccacaggccgttccctaccctccaactccaagtccggcgcgaccatgttttccacgactctttcaaatccctctatttcaagagcggtgacgaaatgaagtttggcaagctcaatattcgattccatggtgaagaaggtgtggatgctggcggtgtcacacgagaatggttccaagttctggccaggcaaatgtttgatgccaactacgctctgttcgtacctgtttccagcgacagaacaactttccatcccaacaaactgagcggtataaacgacgagcatctcatgtttttcaaattcattggccgtattatcggaaaagcactctacgaaggccgtctgcttgagtgctacttcagccgtgccgtctacaagcgaatcttaggaaagccggtatcggtgaaagatatggagtcattcgatcccgagtactacaaatctttatcctggatgctggacaacgacatcactgatattatcactgagacgttttcagtcgaagacgacgagtttggagtaaccaagatcgaggatctatgtgagaacggtcgcagcataccagtcaccgaagacaacaaacatgattatgttcgtttggtggttgaacacaaacttttgtcctctgtcaaggaacagatggaacacttccttaagggtttccatgaaatcatccccgccgatctcatttcaattttcaatgagcaggagctagagttactgatctctggcctgccggacattgatatcgacgactggaagagcaataccgagtatcacaattacacgccatcgtcaccacagatccagtggttctggcgtgccttgcgatcatacgacaaagaagaggtagccaagcttctacagttcgtcacaggaaccagcaaagtgcctctgaatggcttcaaggagctcgagggaatgaacggagtgaaccgcttcaacatccatcgcgactatggcaataaggatcgcctccctagttctcacacatgcttcaatcaactcgatttgcccgagtatgagagctacgaaatccttcgtgcacagctgctcaaagccatcacaaccgggagcgactactttgggtttgcataggaccttggagagatgagatagatgagctcggtccttgacagaagggtcgatgtgtaattgtgtatgttaagagtaaaatgaatgcatttggagcgggattaatattgagcatcctggacgagcttgatcacaatggcggagtgcaggccgctacttgatggttcagtccgaaggaaaagttacagttgcgcccacagggtaaattctatagtgctaccgctcaatcaagacaaagtagttgtcaatgactagctatattctataaaatgctcgtgg

SEQ ID NO: 20032 - DNA, 1008 bp, Muscodor strobelii
  misc_feature: SGI cDNA ID NO. 566749
  misc_feature: Encodes the peptide sequence at SEQ ID NO 20033
atgaagttcgccgagatcatcgtcgccgcagctaatctggctaccgccgtggcagcacccgctgccacgagcaccgagaagcgagcgagcaaattcacgttcgttggcgttagtgaatcgggcgccgaatttggcaataccgctcttcccgggcagctggggaaggactatacttggccggatcagaatgccatcaatacattgatcggcaagggaatgaacactttcagagtcccaatcatgatggagcggttcatccccacgaagatgacgggaactgttaacgaaacatatgcctctggacttgacaccatcgtcaacttcatcaccggaaaaggcgcatacgcaataatcgaccctcacaactttggtcgttactacagtaacatcatcaccgacgtcgacggcttcggtacatggtggtcggtaatggcaaagcgatacgcaagtaactccaaagtcatcttcgacaccaacaacgagttccacgacgaagacaacactctcgtcgcgaacctcaaccaaaaagccattgactccatccgcgccgccggcgccacgagccagtacatcttcgttgaaggaaactcttggaccggagcttggcactggacatcgagcggtacagcagacggaatggcgaagttgacagacccccagaacaagatcgtctacgagatgcatcaatatctcgactccgacggctccggcacctcaaccgcctgtgtgtcttccaccattggcaaggaacgtcttgccgacgccaccgcctggctcaaagccaatggcaagaagggcatcatcggtgagactgctggcggagccaattcgcaatgtatcagcgctcttcagggtatgcttgggtatatggccgacaatagcgacgtctggactggttggctttggtggggagctggaccttggtggggaaattacatctatggcatggaaccgccttctggaaccgcgtacacgggtgtccttccgtcactcactcaatacatctag

SEQ ID NO: 20033 - protein, 335 aa, Muscodor strobelii
  misc_feature: SGI Peptide ID NO. 566749
  misc_feature (37)..(313): Pfam Id: PF00150 Pfam Desc: Cellulase (glycosyl hydrolase family 5)
  misc_feature (1)..(335): NCBI GI: 256730710 Blast Desc: NECHADRAFT_30163 [Nectria haematococca mpVI 77-13-4]
  misc_feature (1)..(335): NCBI GI: 46109478 Blast Desc: FG01621.1 [Gibberella zeae PH-1]
  misc_feature (1)..(335): NCBI GI: 24942374 Blast Desc: AF487830_1 EGI [Thermoascus aurantiacus] gi|61676026|gb|AAX51678.1| endo-beta-1,4-glucanase [Thermoascus aurantiacus var. levisporus]
  misc_feature (1)..(335): NCBI GI: 16356671 Blast Desc: EGI precursor [Thermoascus aurantiacus]
  misc_feature (26)..(334): NCBI GI: 1929906 Blast Desc: endo-beta-1,4-glucanase [Macrophomina phaseolina]
  misc_feature (1)..(335): NCBI GI: 21264634 Blast Desc: AF440003_1 endoglucanase [Talaromyces emersonii] gi|21264637|gb|AAL33639.2|AF440013_1 endo beta 1,4 glucanase [Talaromyces emersonii]
  misc_feature (32)..(335): NCBI GI: 23200107 Blast Desc: AF440003_1 endoglucanase [Talaromyces emersonii] gi|21264637|gb|AAL33639.2|AF440013_1 endo beta 1,4 glucanase [Talaromyces emersonii]
  misc_feature (27)..(335): NCBI GI: 170083838 Blast Desc: endo-1,4-beta-D-glucanase [Penicillium brasilianum]
  misc_feature (1)..(335): NCBI GI: 238493509 Blast Desc: extracellular endoglucanase/cellulase, [Aspergillus flavus NRRL3357] gi|220696485|gb|EED52827.1| extracellular endoglucanase/cellulase, [Aspergillus flavus NRRL3357]
  misc_feature (29)..(335): NCBI GI: 23200122 Blast Desc: extracellular endoglucanase/cellulase, [Aspergillus flavus NRRL3357] gi|220696485|gb|EED52827.1| extracellular endoglucanase/cellulase, [Aspergillus flavus NRRL3357]
  misc_feature (24)..(335): SWISSPROT Homolog: EC 3.2.1.4 Cellulase
MKFAEIIVAAANLATAVAAPAATSTEKRASKFTFVGVSESGAEFGNTALPGQLGKDYTWPDQNAINTLIGKGMNTFRVPIMMERFIPTKMTGTVNETYASGLDTIVNFITGKGAYAIIDPHNFGRYYSNIITDVDGFGTWWSVMAKRYASNSKVIFDTNNEFHDEDNTLVANLNQKAIDSIRAAGATSQYIFVEGNSWTGAWHWTSSGTADGMAKLTDPQNKIVYEMHQYLDSDGSGTSTACVSSTIGKERLADATAWLKANGKKGIIGETAGGANSQCISALQGMLGYMADNSDVWTGWLWWGAGPWWGNYIYGMEPPSGTAYTGVLPSLTQYI

SEQ ID NO: 20034 - DNA, 171 bp, Muscodor strobelii
  misc_feature: SGI EST ID NO. CUFF.46875.0
  misc_feature: Variant of the nucleotide sequence at SEQ ID NO 20032
gggagctggaccttggtggggaaattacatctatggcatggaaccgccttctggaaccgcgtacacgggtgtccttccgtcactcactcaatacatctagttgaagatgaatgcataacttgtacatatcaagcgcagggcaagaacttcatgatcagtagccatcgcaac

SEQ ID NO: 20035 - DNA, 279 bp, Muscodor strobelii
  misc_feature: SGI cDNA ID NO. 566750
  misc_feature: Reduced expression when VOC is produced
  misc_feature: Encodes the peptide sequence at SEQ ID NO 20036
atgcagcccacgcggtgtttgttgaagggccggtccgtatggaaaggccctcacatcgtccctctgccaattgcgcgcccagcgcccggcgagaagatgaagcccatccgcacacaagcccgcgccgccaccatcctgcccaatttcgtcggtctgaagttccaggtctacaacggaaagatatacaacgacgttacgattaccgaggatatggtcggacacaagttgggcgaattctcggtcacgagaaagccgtttatctgggcgagaggaaagtag

SEQ ID NO: 20036 - protein, 92 aa, Muscodor strobelii
  misc_feature: SGI Peptide ID NO. 566750
  misc_feature (11)..(88): Pfam Id: PF00203 Pfam Desc: Ribosomal protein S19
  misc_feature (1)..(92): NCBI GI: 171683836 Blast Desc: protein product [Podospora anserina] gi|170941878|emb|CAP67531.1| protein product [Podospora anserina]
  misc_feature (1)..(92): NCBI GI: 154311797 Blast Desc: mitochondrial ribosome small subunit component S19 [Botryotinia fuckeliana B05.10] gi|150850582|gb|EDN25775.1| mitochondrial ribosome small subunit component S19 [Botryotinia
  misc_feature (1)..(88): NCBI GI: 156047757 Blast Desc: SS1G_09568 [Sclerotinia sclerotiorum 1980] gi|154693963|gb|EDN93701.1| SS1G_09568 [Sclerotinia sclerotiorum 1980]
  misc_feature (1)..(80): NCBI GI: 85110701 Blast Desc: mitochondrial ribosomal protein S19 [Neurospora crassa OR74A] gi|16944609|emb|CAD11378.1| ribosomal protein S19, mitochondrial [Neurospora crassa] gi|28925274|gb|EAA34353.1| S19
  misc_feature (1)..(90): NCBI GI: 46109480 Blast Desc: FG01622.1 [Gibberella zeae PH-1]
  misc_feature (1)..(92): NCBI GI: 189189160 Blast Desc: mitochondrial ribosomal protein S19 [Pyrenophora tritici-repentis Pt-1C-BFP] gi|187972525|gb|EDU40024.1| mitochondrial ribosomal protein S19 [Pyrenophora tritici-repentis
  misc_feature (1)..(92): NCBI GI: 145255259 Blast Desc: An18g04490 [Aspergillus niger] gi|134084499|emb|CAK43253.1| protein product [Aspergillus niger]
  misc_feature (16)..(80): NCBI GI: 261356910 Blast Desc: mitochondrial ribosomal protein S19 [Verticillium albo-atrum VaMs.102]
  misc_feature (1)..(92): NCBI GI: 146416593 Blast Desc: conserved [Pichia guilliermondii ATCC 6260] gi|146391391|gb|EDK39549.1| conserved [Pichia guilliermondii ATCC 6260]
  misc_feature (1)..(92): NCBI GI: 50422431 Blast Desc: DEHA0E11484g [Debaryomyces hansenii CBS767] gi|49655449|emb|CAG88020.1| DEHA2E10890p [Debaryomyces hansenii]
  misc_feature: Useful for introducing or modulating the production of volatile compounds
MQPTRCLLKGRSVWKGPHIVPLPIARPAPGEKMKPIRTQARAATILPNFVGLKFQVYNGKIYNDVTITEDMVGHKLGEFSVTRKPFIWARGK

SEQ ID NO: 20037 - DNA, 2030 bp, Muscodor strobelii
  misc_feature: SGI EST ID NO. CUFF.46920.0
  misc_feature: Variant of the nucleotide sequence at SEQ ID NO 20035
cgggccgccagtcgctgaacgaaagatatgtccgaagtaccttgatgcatatcgcgacgcaagctttcttagcatcgacacatcgtcatcgaacacaacatccaagatgcagcccacgcggtgtttgttgaagggccggtccgtatggaaaggccctcacatcgtccctctgccaattgcgcgcccagcgcccggcgagaagatgaagcccatccgcacacaagcccgcgccgccaccatcctgcccaatttcgtcggtctgaagttccaggtctacaacggaaagatatacaacgacgttacgattaccgaggatatggtcggacacaagttgggcgaattctcggtcacgagaaagccgtttatctgggcgagaggaaagtagatgtaggaagatctgaaggtgtacgatagcttacggggagaatacccagccgacgaggatcaaaaaaagcatggggcgaggagaatagaattgcggcggcaagaggaattcggcatcccagcacagcacggcgtttgatgggtcagactggggattctggccgatttgtacacttgatcactgtacatatatcgtagaatttgccaaaattgtacaaacagacaaattgaactacgcataaaaccgggaggggttcacagatcattacgaccactccagcacgcaacgctgtctcatatatcaacaaattacacacggctgggatagctttctacacagacatatcatggtttgtgataaatatcttcattcttagctaccagaacctagcgaagatatcctcgggaatctagcgaagaagcaatgaaaagcagcacgcctgaacgccaagcgccactctagccatgatcaagcaatcctatccgtaatgctgatatcgtaacgtaacaacccttcgcggaggcagccattctgccaatgacattcatcgtccacgcctatcggtagaactcgctcctcttgatattgaccccgtactcgccgacagccatacccagatcctccatcgtgaggacagtgcggttctgacttccaccctgtccaccgcctccatagcccgctcgctggatacccagaggtccgccacggccctggtccttgccgcccgccggcgcttgaccggggacggttataccggccgctgcgccgagattgcccatcgggttgttggtgctggtgttggaggcgcggatccggctgtactgatatgaatctgctgcgacgtctgcgacaaacttctggactgcgagggcgatgaggcgtgcgaggcgtggatcggtgtgtggtggcggaggtagaccggctttggtcatgtagtagtttgtgactgcgtcggggatctgcggagggggtttgttagcttcttggtattggtgggacaaccacggaggcgagacgtagacgatatttggactggagatggggcaaaccgtacgataggggcgtagtcatccatcttggcgagaaactccttgagcgaggtgtctttgcgcgtagctgccttgttgggctcggccggcacaacgtgctcctcttcgggttgggtggcggcggcgccctggagggtctgctcgtgttcggtaggtgcgctcgccatggctgcgatgtggtgtctaagtttgtcgcgtggttgtcttgaggctacgaggtcgtggggtccgtctcagctatggcgacgtggatggttgagccgggacgacttgggatcaagccgatgctcaaggctcgaagcacaggataagcctccagaggggtcagggggcttccgtggccgtcgctgggggtcaacacgcccagacacgcgacttggtgtgtcaattgatgcaagagatagatgtcgcgatgtacgagtggtgcgccaaaccagccgccgtcgtgggggatggggttgatgatgacgacgcggtgggtgaacgttcgcgaggctcaggtacggagttgcagatagaaactggggtattctagaacaggggtgggtcaaacgctagtctcagaagggtagtcccattatccgcctccacattct

SEQ ID NO: 20038 - DNA, 564 bp, Muscodor strobelii
  misc_feature: SGI cDNA ID NO. 566751
  misc_feature: Encodes the peptide sequence at SEQ ID NO 20039
atggcgagcgcacctaccgaacacgagcagaccctccagggcgccgccgccacccaacccgaagaggagcacgttgtgccggccgagcccaacaaggcagctacgcgcaaagacacctcgctcaaggagtttctcgccaagatggatgactacgcccctatcatccccgacgcagtcacaaactactacatgaccaaagccggtctacctccgccaccacacaccgatccacgcctcgcacgcctcatcgccctcgcagtccagaagtttgtcgcagacgtcgcagcagattcatatcagtacagccggatccgcgcctccaacaccagcaccaacaacccgatgggcaatctcggcgcagcggccggtataaccgtccccggtcaagcgccggcgggcggcaaggaccagggccgtggcggacctctgggtatccagcgagcgggctatggaggcggtggacagggtggaagtcagaaccgcactgtcctcacgatggaggatctgggtatggctgtcggcgagtacggggtcaatatcaagaggagcgagttctaccgatag

SEQ ID NO: 20039 - protein, 187 aa, Muscodor strobelii
  misc_feature: SGI Peptide ID NO. 566751
  misc_feature (53)..(106): Pfam Id: PF03540 Pfam Desc: Transcription initiation factor TFIID 23-30kDa subunit
  misc_feature (27)..(187): NCBI GI: 261356909 Blast Desc: transcription initiation factor TFIID subunit 10 [Verticillium albo-atrum VaMs.102]
  misc_feature (32)..(187): NCBI GI: 116200259 Blast Desc: CHGG_08285 [Chaetomium globosum CBS 148.51] gi|88179564|gb|EAQ87032.1| CHGG_08285 [Chaetomium globosum CBS 148.51]
  misc_feature (32)..(187): NCBI GI: 171683834 Blast Desc: protein product [Podospora anserina] gi|170941877|emb|CAP67530.1| protein product [Podospora anserina]
  misc_feature (26)..(187): NCBI GI: 85110703 Blast Desc: NCU08729 [Neurospora crassa OR74A] gi|28925275|gb|EAA34354.1| conserved [Neurospora crassa OR74A]
  misc_feature (1)..(187): NCBI GI: 46109482 Blast Desc: FG01623.1 [Gibberella zeae PH-1]
  misc_feature (5)..(187): NCBI GI: 16944608 Blast Desc: related to transcription factor TAF25 [Neurospora crassa]
  misc_feature (31)..(187): NCBI GI: 256730711 Blast Desc: [Nectria haematococca mpVI 77-13-4]
  misc_feature (13)..(187): NCBI GI: 39961902 Blast Desc: MGG_09574 [Magnaporthe grisea 70-15] gi|145011082|gb|EDJ95738.1| MGG_09574 [Magnaporthe grisea 70-15]
  misc_feature (23)..(187): NCBI GI: 154311799 Blast Desc: BC1G_05933 [Botryotinia fuckeliana B05.10] gi|150850583|gb|EDN25776.1| BC1G_05933 [Botryotinia fuckeliana B05.10]
  misc_feature (22)..(187): NCBI GI: 156047759 Blast Desc: SS1G_09569 [Sclerotinia sclerotiorum 1980] gi|154693964|gb|EDN93702.1| SS1G_09569 [Sclerotinia sclerotiorum 1980]
MASAPTEHEQTLQGAAATQPEEEHVVPAEPNKAATRKDTSLKEFLAKMDDYAPIIPDAVTNYYMTKAGLPPPPHTDPRLARLIALAVQKFVADVAADSYQYSRIRASNTSTNNPMGNLGAAAGITVPGQAPAGGKDQGRGGPLGIQRAGYGGGGQGGSQNRTVLTMEDLGMAVGEYGVNIKRSEFYR

SEQ ID NO: 20040 - DNA, 1936 bp, Muscodor strobelii
  misc_feature: SGI EST ID NO. CUFF.46921.2
  misc_feature: Variant of the nucleotide sequence at SEQ ID NO 20038
agaatgtggaggcggataatgggactacccttctgagactagcgtttgacccacccctgttctagaataccccagtttctatctgcaactccgtacctgagcctcgcgaacgttcacccaccgcgtcgtcatcatcaaccccatcccccacgacggcggctggtttggcgcaccactcgtacatcgcgacatctatctcttgcatcaattgacacaccaagtcgcgtgtctgggcgtgttgacccccagcgacggccacggaagccccctgacccctctggaggcttatcctgtgcttcgagccttgagcatcggcttgatcccaagtcgtcccggctcaaccatccacgtcgccatagctgagacggaccccacgacctcgtagcctcaagacaaccacgcgacaaacttagacaccacatcgcagccatggcgagcgcacctaccgaacacgagcagaccctccagggcgccgccgccacccaacccgaagaggagcacgttgtgccggccgagcccaacaaggcagctacgcgcaaagacacctcgctcaaggagtttctcgccaagatggatgactacgcccctatcatccccgacgcagtcacaaactactacatgaccaaagccggtctacctccgccaccacacaccgatccacgcctcgcacgcctcatcgccctcgcagtccagaagtttgtcgcagacgtcgcagcagattcatatcagtacagccggatccgcgcctccaacaccagcaccaacaacccgatgggcaatctcggcgcagcggccggtataaccgtccccggtcaagcgccggcgggcggcaaggaccagggccgtggcggacctctgggtatccagcgagcgggctatggaggcggtggacagggtggaagtcagaaccgcactgtcctcacgatggaggatctgggtatggctgtcggcgagtacggggtcaatatcaagaggagcgagttctaccgataggcgtggacgatgaatgtcattggcagaatggctgcctccgcgaagggttgttacgttacgatatcagcattacggataggattgcttgatcatggctagagtggcgcttggcgttcaggcgtgctgcttttcattgcttcttcgctagattcccgaggatatcttcgctaggttctggtagctaagaatgaagatatttatcacaaaccatgatatgtctgtgtagaaagctatcccagccgtgtgtaatttgttgatatatgagacagcgttgcgtgctggagtggtcgtaatgatctgtgaacccctcccggttttatgcgtagttcaatttgtctgtttgtacaattttggcaaattctacgatatatgtacagtgatcaagtgtacaaatcggccagaatccccagtctgacccatcaaacgccgtgctgtgctgggatgccgaattcctcttgccgccgcaattctattctcctcgccccatgctttttttgatcctcgtcggctgggtattctccccgtaagctatcgtacaccttcagatcttcctacatctactttcctctcgcccagataaacggctttctcgtgctgcgtggcatcattagcttcccaagtctcccaactcgaacccgggtccagaaagacgaaaattcaaaagaggaacatacaccgagaattcgcccaacttgtgtccgaccatatcctcggtaatcgtaacgtcgttgtatatctttccgttgtagacctggaacttcagaccgacgaaattgggcaggatggtggcggcgcgggcttgtgtgcggatgggcttcatcttctcgccgggcgctgggcgcgcaattggcagactagagatccggcgcattagttgctggatatcgtggattgggagacggtgtggtgcgtcggaagttgtcttacgggacgatgtgagggc

SEQ ID NO: 20041 - DNA, 969 bp, Muscodor strobelii
  misc_feature: SGI cDNA ID NO. 566752
  misc_feature: Encodes the peptide sequence at SEQ ID NO 20042
atgggcgacatggcgaacgagatcaagctgctctcggggaatagtcacccaatcctcgccaagctggtcgctgaccggcttggcgtagatatcgcaaagactatgagtctgaactactccaatcaggaaaccagtgtcacgattggagagtccgttcgggatgaagatgtcttcatcttgcagtccactgcccctggcgacatcaacgatggcctcatggagcttctcatcatgatccatgcctgcagaacagcttcggcacgacgaatcaccgccgtcgtcccgaattttccctatgcacgacaagacaagaaggacaagagtcgcgcgcccatctctgccaagctcgttgccaacatgctgcaaaccgccggttgcaaccacgtcatcacgatggatctccatgcttcgcaaattcagggcttcttcaatgtccctgtcgacaacctctatggcgagccgagtgtcttgcgttggatcagagagaaccatggtataaaggacaccatcattgtgtcccccgatgccggcggcacgaaacgcgcaagcgcaattgcaggccgcctaggcatacacttcgccatgatccacaaagagcgccctcgccccaacgttgtcggccgtatggctctcgttggtgacgtaacaggcaagatcgcaatcctcgtcgacgacatggccgatacctgcggtactctggccaaggccgcacagacagttaaagacagcggcgccagagaggttatcgcaattgtcacacacggtatcctgagtggtaatgccatccagacgttgaacgacagctgcctgaccaaaatcgtcgtcaccaatactgtcccgctcgccgacaagacagagctttgtcctaagctgaaggtcattgatgtttccccgactattgctgaggccattcgtcggacgcacaatggagaaagtgtcagtttcctttttgatcacgcccctgcctag

SEQ ID NO: 20042 - protein, 322 aa, Muscodor strobelii
  misc_feature: SGI Peptide ID NO. 566752
  misc_feature (144)..(274): Pfam Id: PF00156 Pfam Desc: Phosphoribosyl transferase domain
  misc_feature (1)..(321): NCBI GI: 145612465 Blast Desc: MGG_07148 [Magnaporthe grisea 70-15] gi|145019623|gb|EDK03851.1| MGG_07148 [Magnaporthe grisea 70-15]
  misc_feature (1)..(321): NCBI GI: 256727715 Blast Desc: [Nectria haematococca mpVI 77-13-4]
  misc_feature (1)..(321): NCBI GI: 46134617 Blast Desc: FG09299.1 [Gibberella zeae PH-1]
  misc_feature (6)..(321): NCBI GI: 156043501 Blast Desc: conserved [Sclerotinia sclerotiorum 1980] gi|154695141|gb|EDN94879.1| conserved [Sclerotinia sclerotiorum 1980]
  misc_feature (4)..(321): NCBI GI: 261353927 Blast Desc: ribose-phosphate pyrophosphokinase [Verticillium albo-atrum VaMs.102]
  misc_feature (5)..(320): NCBI GI: 238843940 Blast Desc: ribose-phosphate pyrophosphokinase [Microsporum canis CBS 113480]
  misc_feature (6)..(322): NCBI GI: 226290019 Blast Desc: ribose-phosphate pyrophosphokinase [Paracoccidioides brasiliensis Pb18]
  misc_feature (5)..(322): NCBI GI: 169771513 Blast Desc: [Aspergillus oryzae RIB40] gi|238485908|ref|XP_002374192.1| phosphoribosyl diphosphate synthase isoform 4 [Aspergillus flavus NRRL3357] protein product
  misc_feature (6)..(320): NCBI GI: 261199884 Blast Desc: ribose-phosphate pyrophosphokinase [Ajellomyces dermatitidis SLH14081] gi|239594551|gb|EEQ77132.1| ribose-phosphate pyrophosphokinase [Ajellomyces dermatitidis
  misc_feature (6)..(322): NCBI GI: 226285091 Blast Desc: ribose-phosphate pyrophosphokinase [Paracoccidioides brasiliensis Pb01]
  misc_feature (5)..(322): SWISSPROT Homolog: EC 2.7.6.1 Ribose-phosphate diphosphokinase
MGDMANEIKLLSGNSHPILAKLVADRLGVDIAKTMSLNYSNQETSVTIGESVRDEDVFILQSTAPGDINDGLMELLIMIHACRTASARRITAVVPNFPYARQDKKDKSRAPISAKLVANMLQTAGCNHVITMDLHASQIQGFFNVPVDNLYGEPSVLRWIRENHGIKDTIIVSPDAGGTKRASAIAGRLGIHFAMIHKERPRPNVVGRMALVGDVTGKIAILVDDMADTCGTLAKAAQTVKDSGAREVIAIVTHGILSGNAIQTLNDSCLTKIVVTNTVPLADKTELCPKLKVIDVSPTIAEAIRRTHNGESVSFLFDHAPA

SEQ ID NO: 20043 - DNA, 3207 bp, Muscodor strobelii
  misc_feature: SGI EST ID NO. CUFF.47763.0
  misc_feature: Variant of the nucleotide sequence at SEQ ID NO 20041
caacatcaaaggcaccccgcgatttagcagaggcgcacgccgattgggcctacccgcatgtcactcatcatttttttatgttgtcgtccgaccagcggcgttcctgtttctgctgcactgccgccaatcctagctgcgtccgcggatgtataaagataatcacatctcacaacctcattcctagtcttctcccccttccctcccgtcactatgggcgacatggcgaacgagatcaagctgctctcggggaatagtcacccaatcctcgccaagctggtcgctgaccggcttggcgtagatatcgcaaagactatgagtctgaactactccaatcaggaaaccagtgtcacgattggagagtccgttcgggatgaagatgtcttcatcttgcagtccactgcccctggcgacatcaacgatggcctcatggagcttctcatcatgatccatgcctgcagaacagcttcggcacgacgaatcaccgccgtcgtcccgaattttccctatgcacgacaagacaagaaggacaagagtcgcgcgcccatctctgccaagctcgttgccaacatgctgcaaaccgccggttgcaaccacgtcatcacgatggatctccatgcttcgcaaattcagggcttcttcaatgtccctgtcgacaacctctatggcgagccgagtgtcttgcgttggatcagagagaaccatggtataaaggacaccatcattgtgtcccccgatgccggcggcacgaaacgcgcaagcgcaattgcaggccgcctaggcatacacttcgccatgatccacaaagagcgccctcgccccaacgttgtcggccgtatggctctcgttggtgacgtaacaggcaagatcgcaatcctcgtcgacgacatggccgatacctgcggtactctggccaaggccgcacagacagttaaagacagcggcgccagagaggttatcgcaattgtcacacacggtatcctgagtggtaatgccatccagacgttgaacgacagctgcctgaccaaaatcgtcgtcaccaatactgtcccgctcgccgacaagacagagctttgtcctaagctgaaggtcattgatgtttccccgactattgctgaggccattcgtcggacgcacaatggagaaagtgtcagtttcctttttgatcacgcccctgcctagaccatagcgtatagagggaatttacatggacggcgaggcgaggcgcacgggcttggtataaattgcttggtattgcatgcttctcttcttgctttcttaagaactcacagacagtaagcgtatgagcatggatatagagagactacaaaaaaatcggggttggcgtaatggtaattcttctgatcagaattctgttgttttgcattaaaggactataatgtatagacattttgtatatacagacttgggaaggctatgctggatttttatggatagcattgagcattgatacggcgaaaattgatttcggaaaaaagattccgctttagtaactcacagttcgtagtgccgttgcgatatgatagggccacacgtgaatttcaatcatagcagtgtactaataatagccgcgtactaatggtagcactactgacaactctcatgtcacatagataggatcgtctcaaaaagaagacactgggtgagctcgtactcggctttttctcatttttgttcttttgggcgggcacacccggggaatacactatatgcccccgtcgggcctatctaagaagccgtttcttcattactgaatagtcgtaatgctaatgcctaccgtttcattgccatgattttcgtaccgaaatgcaacaacacccagaagtgacaccttaccaaacgccaggaagcatttacttgcgcatggagctggcccgtctcttgcgggcgtcggccttggtggcgcggacctcggcgacacgcttggcgaggagctgagcgtactcgttctgtcacatatgtcagaacatgcagcttaagagagagtgagatgagtagtgaacatacggcctcgtccttgaccttctcggcctggcggcgcttgagggcggtgcggtgacgcttgtgctggagacgctggggagtgacgagtctctggatgcggggagccttggtgtaggcagccttgccctcacccttgggctggacctcacgtcggataacgtacttgcggacctatgcgaagaaaaggaaaacaccgaggttagtcacaacaggttctcaagtgtacatactaggatgatatatctatcctctcttctcagactctactcggtggtgtttactgcgttgggattcttctctctcatcccgcagaggcaacgaccgagtaggcgatgacgagtggtgtagttcgacttacatcgtcatccttgctgaggccgaagaagcggcggatcttggtggcacgcttggggccgaggcgcttgggcttgacgtcgtcggtgaggccggggatctcgctctcgccctgcttgacgatggagagagcgaggacggagaggtccatgccgacgatgcagccacggacggacttgcgcttgcgctcaccggtgcggcggggtcggtagcaggagtggccctcggagagcaggaggcggacacgggtcgggtgcaggacaccttgcttcatggggaaaccctgcttgtcgtttcctccggtgatgcggaagatgtagcccttgaactcgtcgccaaggttgtcgccgacaacttcctggcccatctgtataggagagacatgttagcatttcccaacttcgtaaccagtcgtctcgtgatgtttgtatgtatgaccagccgcaacagcacaaatttctcgaggtcggcagacggtcggtgcaaataagaatccccgtttacgcgagtacgctcgatcgggttgcataagagaaattgtgaccgttttgtcttcatcgtggaaattggctattggcgggcggcggagtgcatcggcagacgggctggactagacggggagcaacaacgtacacgcttctccatgaagtcgcggagcttgcgctcatcctcgatctcgatgagcttctgggtgccattggcggggtaagagatgtttaatttcatcttgtcggtggttggcgagggacactgggcgatgagggaggaggtcgaatcgtgggcacacgaggcaaacgaaaagtgaactgggtgtcggtctgtggttttctc

SEQ ID NO: 20044 - DNA, 720 bp, Muscodor strobelii
  misc_feature: SGI cDNA ID NO. 566753
  misc_feature: Reduced expression when VOC is produced
  misc_feature: Encodes the peptide sequence at SEQ ID NO 20045
atgaaattaaacatctcttaccccgccaatggcacccagaagctcatcgagatcgaggatgagcgcaagctccgcgacttcatggagaagcgtatgggccaggaagttgtcggcgacaaccttggcgacgagttcaagggctacatcttccgcatcaccggaggaaacgacaagcagggtttccccatgaagcaaggtgtcctgcacccgacccgtgtccgcctcctgctctccgagggccactcctgctaccgaccccgccgcaccggtgagcgcaagcgcaagtccgtccgtggctgcatcgtcggcatggacctctccgtcctcgctctctccatcgtcaagcagggcgagagcgagatccccggcctcaccgacgacgtcaagcccaagcgcctcggccccaagcgtgccaccaagatccgccgcttcttcggcctcagcaaggatgacgatgtccgcaagtacgttatccgacgtgaggtccagcccaagggtgagggcaaggctgcctacaccaaggctccccgcatccagagactcgtcactccccagcgtctccagcacaagcgtcaccgcaccgccctcaagcgccgccaggccgagaaggtcaaggacgaggccaacgagtacgctcagctcctcgccaagcgtgtcgccgaggtccgcgccaccaaggccgacgcccgcaagagacgggccagctccatgcgcaagtaa

SEQ ID NO: 20045 - protein, 239 aa, Muscodor strobelii
  misc_feature: SGI Peptide ID NO. 566753
  misc_feature (1)..(127): Pfam Id: PF01092 Pfam Desc: Ribosomal protein S6e
  misc_feature (3)..(239): NCBI GI: 46107502 Blast Desc: FG00634.1 [Gibberella zeae PH-1]
  misc_feature (1)..(239): NCBI GI: 171689252 Blast Desc: protein product [Podospora anserina] gi|170944588|emb|CAP70699.1| protein product [Podospora anserina]
  misc_feature (1)..(239): NCBI GI: 154316668 Blast Desc: 40S ribosomal protein S6 [Botryotinia fuckeliana B05.10] gi|150846065|gb|EDN21258.1| 40S ribosomal protein S6 [Botryotinia fuckeliana B05.10]
  misc_feature (1)..(239): NCBI GI: 85110380 Blast Desc: 40S ribosomal protein S6 [Neurospora crassa OR74A] gi|28925111|gb|EAA34195.1| 40S ribosomal protein S6 [Neurospora crassa OR74A] gi|38524207|emb|CAE75674.1| 40s ribosomal protein
  misc_feature (1)..(239): NCBI GI: 156043499 Blast Desc: conserved [Sclerotinia sclerotiorum 1980] gi|154695140|gb|EDN94878.1| conserved [Sclerotinia sclerotiorum 1980]
  misc_feature (1)..(239): NCBI GI: 116204563 Blast Desc: conserved [Chaetomium globosum CBS 148.51] gi|88176293|gb|EAQ83761.1| conserved [Chaetomium globosum CBS 148.51]
  misc_feature (1)..(238): NCBI GI: 189199146 Blast Desc: 40S ribosomal protein S6-B [Pyrenophora tritici-repentis Pt-1C-BFP] gi|187983009|gb|EDU48497.1| 40S ribosomal protein S6-B [Pyrenophora tritici-repentis Pt-1C-BFP]
  misc_feature (1)..(239): NCBI GI: 39942312 Blast Desc: conserved [Magnaporthe grisea 70-15] gi|145015771|gb|EDK00261.1| conserved [Magnaporthe grisea 70-15]
  misc_feature (1)..(238): NCBI GI: 169608902 Blast Desc: SNOG_07535 [Phaeosphaeria nodorum SN15] gi|111063881|gb|EAT85001.1| SNOG_07535 [Phaeosphaeria nodorum SN15]
  misc_feature (1)..(239): NCBI GI: 238843939 Blast Desc: 40S ribosomal protein S6 [Microsporum canis CBS 113480]
  misc_feature: Useful for introducing or modulating the production of volatile compounds
MKLNISYPANGTQKLIEIEDERKLRDFMEKRMGQEVVGDNLGDEFKGYIFRITGGNDKQGFPMKQGVLHPTRVRLLLSEGHSCYRPRRTGERKRKSVRGCIVGMDLSVLALSIVKQGESEIPGLTDDVKPKRLGPKRATKIRRFFGLSKDDDVRKYVIRREVQPKGEGKAAYTKAPRIQRLVTPQRLQHKRHRTALKRRQAEKVKDEANEYAQLLAKRVAEVRATKADARKRRASSMRK

SEQ ID NO: 20046 - DNA, 3078 bp, Muscodor strobelii
  misc_feature: SGI EST ID NO. CUFF.47764.1
  misc_feature: Variant of the nucleotide sequence at SEQ ID NO 20044
gagaaaaccacagaccgacacccagttcacttttcgtttgcctcgtgtgcccacgattcgacctcctccctcatcgcccagtgtccctcgccaaccaccgacaagatgaaattaaacatctcttaccccgccaatggcacccagaagctcatcgagatcgaggatgagcgcaagctccgcgacttcatggagaagcgtatgggccaggaagttgtcggcgacaaccttggcgacgagttcaagggctacatcttccgcatcaccggaggaaacgacaagcagggtttccccatgaagcaaggtgtcctgcacccgacccgtgtccgcctcctgctctccgagggccactcctgctaccgaccccgccgcaccggtgagcgcaagcgcaagtccgtccgtggctgcatcgtcggcatggacctctccgtcctcgctctctccatcgtcaagcagggcgagagcgagatccccggcctcaccgacgacgtcaagcccaagcgcctcggccccaagcgtgccaccaagatccgccgcttcttcggcctcagcaaggatgacgatgtccgcaagtacgttatccgacgtgaggtccagcccaagggtgagggcaaggctgcctacaccaaggctccccgcatccagagactcgtcactccccagcgtctccagcacaagcgtcaccgcaccgccctcaagcgccgccaggccgagaaggtcaaggacgaggccaacgagtacgctcagctcctcgccaagcgtgtcgccgaggtccgcgccaccaaggccgacgcccgcaagagacgggccagctccatgcgcaagtaaatgcttcctggcgtttggtaaggtgtcacttctgggtgttgttgcatttcggtacgaaaatcatggcaatgaaacggtaggcattagcattacgactattcagtaatgaagaaacggcttcttagataggcccgacgggggcatatagtgtattccccgggtgtgcccgcccaaaagaacaaaaatgagaaaaagccgagtacgagctcacccagtgtcttctttttgagacgatcctatctatgtgacatgagagttgtcagtagtgctaccattagtacgcggctattattagtacactgctatgattgaaattcacgtgtggccctatcatatcgcaacggcactacgaactgtgagttactaaagcggaatcttttttccgaaatcaattttcgccgtatcaatgctcaatgctatccataaaaatccagcatagccttcccaagtctgtatatacaaaatgtctatacattatagtcctttaatgcaaaacaacagaattctgatcagaagaattaccattacgccaaccccgatttttttgtagtctctctatatccatgctcatacgcttactgtctgtgagttcttaagaaagcaagaagagaagcatgcaataccaagcaatttataccaagcccgtgcgcctcgcctcgccgtccatgtaaattccctctatacgctatggtctaggcaggggcgtgatcaaaaaggaaactacatatcattagcacatcgttcaagatcgagtagcgatcaatctcaaacatacctgacactttctccattgtgcgtccgacgaatggcctcagcaatagtcggggaaacatcaatgaccttcagcttaggacaaagctctgtcttgtcggcgagcgggacagtattggtgacgacgattttggtcaggcagctgtcgttcaacgtctggatggcattaccactcaggataccgtgtgtgacaattgcgataacctctctggcgccgctgtctttaactgtctgtgcggccttggccagagtaccgcaggtatcggccatgtcgtcgacgaggattgcgatcttgcctgttacgtcaccaacgagagccatacggccgacaacgttggggcgagggcgctctttgtggatcatggcgaagtgtatgcctaggcggcctgcaattgcgcttgcgctatggtgggtgtcagttgaggacgaggagagaaggcaatttgacaaaacaaaccgtttcgtgccgccggcatcgggggacacaatgatggtgtcctttataccatggttctctctgatccaacgcaagacactcggctcgccatagaggttgtcgacagggacattgaagaagccctgaatttgcgaagcatggagatccatcgtgatgacgtggttgcaaccggcggtttgcagcatgttggcaacgagcttggcagagatgggcgcgcgactcttgtccttcttgtcttgtcgtgcatagggaaaattcgggacgacggcggtgattcgtcgtgccgaagctgttctgcaggcatggatcatgatgagaagctccatgaggccatcgttgatgtcgccaggggcagtggactgcaagatgaagactgcagcgcgttccaattagtttcgacatatcttcatccggtgagcgcaaagcacatccgtaccatcttcatcccgaacggactctccaatcgtgacactggtttcctgattggagtagttcagactcatagtctttgcgatatctacgccaagcctgcgatgcattcttctagttagctcgcatgctgaaagtgtagcaagtaacttgggccacgatctggggcggaggtgatggtgcaacgaagacagagaaaatgagaaatttgaccatgtggtcgggtacacggtccaatcatcttcaccactcaggtgtaccgggaaaaagaaatgaaggaatcaaggaaggagcagttgttgtacgtaccggtcagcgaccagcttggcgaggattgggtgactattccccgagagcagcttgatctcgttcgccatgtcgcccatagtgacgggagggaagggggagaagactaggaatgaggttgtgagatgtgattatctttatacatccgcggacgcagctaggattggcggcagtgcagcagaaacaggaacgccgctggtcggacgacaacataaaaaaatgatgagtgacatgcgggtaggcccaatcggcgtgcgcctctgctaaatcgcggggtgcctttgatgttg

SEQ ID NO: 20047 - DNA, 471 bp, Muscodor strobelii
  misc_feature: SGI cDNA ID NO. 566754
  misc_feature: Encodes the peptide sequence at SEQ ID NO 20048
atggcgacctctatcaaacttcatccgcggactggcccggcagagagtctgccgcaaaatcctctccctgagctcatacagacgccatctggtctggccatgctagagttacaaggcaccattaatctacctcagaccgccgatggcgatggcgccgaacaaagcgatggtctccaggttggccgtattacgttcccagattatcaccctgaaacacaggaggcgtcgaacaccgcctggatgaagcgagttcacttgtatgttggacgtcatcagagactcacgggcgaagtaaagaagttgcccagagccatagccatcatacggcggagatcaaaatctgaccaagacttggacatggaatcgtcgacagacgctgaaggtaaaggggcagaggagctagagatcgtcgacattgtcaagtataagctggttttttcacaccgtcctgaacccgtcgggaccgcgtga

SEQ ID NO: 20048 - protein, 156 aa, Muscodor strobelii
  misc_feature: SGI Peptide ID NO. 566754
  misc_feature (24)..(153): Pfam Id: PF09696 Pfam Desc: Ctf8
  misc_feature (3)..(156): NCBI GI: 256735378 Blast Desc: NECHADRAFT_75150 [Nectria haematococca mpVI 77-13-4]
  misc_feature (3)..(156): NCBI GI: 46107504 Blast Desc: FG00635.1 [Gibberella zeae PH-1]
  misc_feature (19)..(154): NCBI GI: 154316670 Blast Desc: BC1G_04266 [Botryotinia fuckeliana B05.10] gi|150846066|gb|EDN21259.1| BC1G_04266 [Botryotinia fuckeliana B05.10]
  misc_feature (4)..(156): NCBI GI: 70993832 Blast Desc: sister chromatid cohesion protein Ctf8 [Aspergillus fumigatus Af293] gi|66849397|gb|EAL89725.1| sister chromatid cohesion protein Ctf8, [Aspergillus fumigatus Af293] conserved
  misc_feature (4)..(155): NCBI GI: 261199922 Blast Desc: sister chromatid cohesion protein Ctf8 [Ajellomyces dermatitidis SLH14081] gi|239594570|gb|EEQ77151.1| sister chromatid cohesion protein Ctf8 [Ajellomyces dermatitidis sister
  misc_feature (4)..(154): NCBI GI: 169771547 Blast Desc: [Aspergillus oryzae RIB40] gi|238485878|ref|XP_002374177.1| sister chromatid cohesion protein Ctf8, [Aspergillus flavus NRRL3357] protein product Ctf8,
  misc_feature (4)..(156): NCBI GI: 119500394 Blast Desc: NFIA_105450 [Neosartorya fischeri NRRL 181] gi|119415119|gb|EAW25057.1| conserved [Neosartorya fischeri NRRL 181]
  misc_feature (4)..(154): NCBI GI: 67523041 Blast Desc: AN1977.2 [Aspergillus nidulans FGSC A4] gi|40745986|gb|EAA65142.1| AN1977.2 [Aspergillus nidulans FGSC A4]
  misc_feature (3)..(156): NCBI GI: 39942332 Blast Desc: MGG_03246 [Magnaporthe grisea 70-15] gi|145015758|gb|EDK00248.1| MGG_03246 [Magnaporthe grisea 70-15]
  misc_feature (4)..(154): NCBI GI: 115391355 Blast Desc: conserved [Aspergillus terreus NIH2624] gi|114194106|gb|EAU35806.1| conserved [Aspergillus terreus NIH2624]
MATSIKLHPRTGPAESLPQNPLPELIQTPSGLAMLELQGTINLPQTADGDGAEQSDGLQVGRITFPDYHPETQEASNTAWMKRVHLYVGRHQRLTGEVKKLPRAIAIIRRRSKSDQDLDMESSTDAEGKGAEELEIVDIVKYKLVFSHRPEPVGTA

SEQ ID NO: 20049 - DNA, 4576 bp, Muscodor strobelii
  misc_feature: SGI EST ID NO. CUFF.46889.0
  misc_feature: Variant of the nucleotide sequence at SEQ ID NO 20047
catatatgctgaacactcgtactgaaaagatgtatgtttctcggcaagaatcagctactttatgaacatatctgatactagtaaattgttattcttgatttacgattcacgggaagagaataacatggcgacctctatcaaacttcatccgcggactggcccggcagagagtctgccgcaaaatcctctccctgagctcatacagacgccatctggtctggccatgctagagttacaaggcaccattaatctacctcagaccgccgatggcgatggcgccgaacaaagcgatggtctccaggttggccgtattacgttcccagattatcaccctgaaacacaggaggcgtcgaacaccgcctggatgaagcgagttcacttgtatgttggacgtcatcagagactcacgggcgaagtaaagaagttgcccagagccatagccatcatacggcggagatcaaaatctgaccaagacttggacatggaatcgtcgacagacgctgaaggtaaaggggcagaggagctagagatcgtcgacattgtcaagtataagctggttttttcacaccgtcctgaacccgtcgggaccgcgtgaatgttcgcaattcctcaaagggcctggctagatcgcaaagtcctgtcgtatgaagctatataaccgaagaaacttggttcggccagtctgcgatgcaaaaacctagacatacaaacgcccgcacttcagcactcggctcgaaatttacacacaacggtcaaatatcacgactacgagaacaccagcgagcaggaaaagctgactgtctcgacctgatgccacatcttagcccatgattggatcaccgtgtgcatcttcctccgccagatagagttgcggccggcggctactgtaataaccgtagtcactgatggcgatgaacgcaattacgtctcctctttcacaccaagcgcttgatgagaccaacgaggctatacaggtgtgtgaacgcaacactactcttggcgagcagacaagacattcgtaccagagatgaaccacagagaaaaggaattcctatcgttctgggctagtgtgcaactacatttcaccggcagtatgtacaagtgaagaaatgaacgccagtggcgcttcatagcaacgcacttcgatactgtcttccggggattatgttatgagggcggcttacggcatcgtcagccgaggcataggtctttttgttgtgtcggctggcagcatacgtgggctgcagaccgcatcctgatattgggcatcatcaccatgaagagtatagagccgaatcaggaaagtgggtcttgatagcttggggtttttcgtgtttcatcttctcccgcctcacatcatcaagacggacggcacggacactagggttgcactttggatgtcctcttagtggaaggtttccgtgtcgttcaagtcgtctatccgtttgtttgtgagatgattgccttgtcattcattttgactccggatcttcgtagatcattgcgacgttcacttattttggaattgcttaatcaagctcttccgcatattaggtttgatactcgggagatcgggagagatccataaccctgcttcagcttcagtcgcagactggcaggcatactcctgacaccatttgccaaggactcgatcactacccctccataccgcaacaatccaccatcaattggtattgatgtttttctctattcgtaaacatttactctcactatccataattcatttcctcatcttatgacagatgctggagttaaatcaacgggagacgaccagaatgaggtcgatttctgaactttcagatgggctactgcggagcatgccacggtactccgcatgcctcaagcatctcggcgttcactctgtggactcgacctaatcccccacccctcccttgaacctggtcgtgcatctgatgtagacgctaagttacctgtatcggtctctatttccggaaggattaatgttacccctaggcgaagaacattccgcgccatgagctttgttcttcgttccccttcgtttctgaatagtttgagaaacagggaagtgtttacggtgtcaaatcagatattcagacgaagtactgcacgtgccgcactctgctctctacttcctcaccagtgcgttttcgagcgcgttctcgccgtcgtagaaaccttcgtaggagatagtggtgggatgcaagcacgatgttactatgggtaggggagctgagcttgtttcttacctgcgtctcccacaccgttctcgaggtagtcatcctgggcaactcagccgtacggctatcctctactccggtggaatttagtattagttcatctaatcgctcgacacctgtgggagaagtgaacttgctagctacctttgcaagttctgcttcgaagtcgaaggactatcgcgtggatagtgtcgtccaatctttgggtatttagagcgtcaaaagcaaaaatgacagctccggcataacaatggttcagatggcaagactcaaggctgtgtaccttatgctctgggtaggattacctgcgttatgctctgataccaccctcgactccttcgggcttcctaccaacgaacggtcaaaggatactataagtcgacagcttgacggcctcgatttgaatcagtcagaagatagccaggaacgtgcaagtgaccagttgagccgcgcagcgccgtctcgcaatttacacattttgacagtaacggctccagcttcaacaacagttattgatctccgcgttcgcaatcctcaggcctcaccaccaccacctgatggtggtccttctgcttccgattcaagtagtgtatcgtcgagcgtatcctccagcgtttcgaccagtgtgtccaatgctgtgtccaacagcgtggtcagccgcgaagaatcaatattgacggcttccttgggtgccctttcatcatcgtcttctgctgctgtcagtcttgcgagcaattccggattctcaatcggctcaacccaagccagcaacgccgcagagcttctcgtcgcttctgccaattctcgagccgacaaggcctccagtagtgtgtcgtcgctgttggcagttgtaaccactgcgagcattatctcaagtatccaggccagcgcgaacagcgctatctcggctgcacagcaaagtgctgagagcgcagtcagtgctgctcaagcgagtgcttctgctgctgttggtaattcaaataacaatctaaggcttgatgtgggacaattcgtcggtgttatcattgcgatcattattgcgacttcactgctggctatcttggcgactctgctcattgtgcgttaccggaaacataagatacccatagcgctgaagacgtatgaatctccagctccatcagttgagcagatcgctccacaatccacccaatttcggaatgatttagtgtcgccaacttacgctgttactgtgactgcaggcaggcacaaatcatcgcataaacggaatcagccgccaaatttatctaggcatatcccaacttttacttcccctacttctcaacccgttaatgaccagacatatcccgtgtctccactatcagagactcatcatgaaagtccgaggcggacagtgtcggaagactttggtcgaagactttatgaaaatgtagggcatgtgtccgaaaccaacgtcagcgacgtaccgccgatgaagttctccctcgcgcggaaagcaagtacagatgggcagcaacgaatgcaggtcgttcgagttggaagccacgagactaaccttcatcgacttctctcgaatgcacaggaaagagacgcacaaacgcggggacatggcttcggccacgcgcgtggttacagcacagaagttggctcctcaagtccttatatggacttgccgactagccatcgccgatctgcaagctccagcgctataataccaccgattcccgtacgtttcagcagtttgaatacaaacaggcagaacccattgagccttaaccccgtacagcccctctcagccgccgctcatacaagtttcttatcgacgagtgaagagacattgagtgaggaaaatcaagtccgaccagaggattctcccgaccaaccttcatcgtcaccacgtcatctgccggtgcgaaatctgacgcagccgcaacaacagcctacctccagattctctatttcaccattgccaccttctttctctgactctggatcggatttatcaagacaagaacaacaacagctggagctaccgctgcatcgccaagaagaaccggagatatcacccttgcgcccagcaccgccggacccgtcccaacttcaatcgccggtgccaagacggcccaacattagcgccaacgttgcttctatggagccgagaacacctaagcaggcaacattttctttgtttccacggaccccgccgggataggacctccaagactattctatgtctctgacattatttcactagtcgtgaagaatcagcacagtggagcgtgatcgtatacccgatgaaccaggttgttctcatatacataagatacccaaatatccaagctataaatccacactca

SEQ ID NO: 20050 - DNA, 648 bp, Muscodor strobelii
  misc_feature: SGI cDNA ID NO. 566755
  misc_feature: Encodes the peptide sequence at SEQ ID NO 20051
atgacgttgaatctattccgagtcctggcggacttctcccatctagcctccattttcattctactacacaagatgacagagctcaacggctgcgccggcatatcattcaaatcacaagccttatatctcctcgtctacatcactcgatatctcgacctcttcagcaccacaagttggtacaacgtactcttcaagatagcattcatcggcagccaaagctacatcgtctacctaatgaccacaaaatacaagcccacgcacgaccccaacctcgacaccttccgcgtccaatacctgctcggcggcgccgccgtcctcgccatcgtcataccctacgaatacaccctatgggagatcctctgggccttctccatctggctcgagtccgtcgccatcctgccccagctcttcatgctgcagcgcaccggcgaggcagagaccatcaccacccactacctcttcgctctcggcttgtaccgcgcactctacatccccaattggatgtggcgctacctgttcgagcccaagcacaaggccgactggatcgccatcgtcgctggtatcgttcagaccattctgtattccgacttcttctggatctactacactaaagtcatgaagggcaagaagttcaagctccctgtctag

SEQ ID NO: 20051 - protein, 215 aa, Muscodor strobelii
  misc_feature: SGI Peptide ID NO. 566755
  misc_feature (3)..(205): Pfam Id: PF00810 Pfam Desc: ER lumen protein retaining receptor
  misc_feature (3)..(215): NCBI GI: 145606272 Blast Desc: HDEL sequence binding protein, [Magnaporthe grisea 70-15] gi|145013979|gb|EDJ98620.1| HDEL sequence binding protein, [Magnaporthe grisea 70-15]
  misc_feature (3)..(215): NCBI GI: 261356918 Blast Desc: ER lumen protein retaining receptor [Verticillium albo-atrum VaMs.102]
  misc_feature (3)..(215): NCBI GI: 256730712 Blast Desc: [Nectria haematococca mpVI 77-13-4]
  misc_feature (1)..(215): NCBI GI: 85110748 Blast Desc: ER lumen protein retaining receptor [Neurospora crassa OR74A] gi|18376020|emb|CAB91754.2| HDEL receptor ERD2 [Neurospora crassa] gi|28925298|gb|EAA34376.1| ER lumen protein retaining
  misc_feature (1)..(215): NCBI GI: 46109484 Blast Desc: FG01624.1 [Gibberella zeae PH-1]
  misc_feature (1)..(215): NCBI GI: 116205057 Blast Desc: CHGG_10412 [Chaetomium globosum CBS 148.51] gi|88176540|gb|EAQ84008.1| CHGG_10412 [Chaetomium globosum CBS 148.51]
  misc_feature (3)..(215): NCBI GI: 212537997 Blast Desc: er lumen protein retaining receptor, [Penicillium marneffei ATCC 18224] gi|210068896|gb|EEA22987.1| er lumen protein retaining receptor, [Penicillium marneffei ATCC 18224]
  misc_feature (3)..(215): NCBI GI: 242807773 Blast Desc: er lumen protein retaining receptor, [Talaromyces stipitatus ATCC 10500] gi|218715650|gb|EED15072.1| er lumen protein retaining receptor, [Talaromyces stipitatus ATCC 10500]
  misc_feature (3)..(215): NCBI GI: 156063304 Blast Desc: SS1G_01768 [Sclerotinia sclerotiorum 1980] gi|154697104|gb|EDN96842.1| SS1G_01768 [Sclerotinia sclerotiorum 1980]
  misc_feature (1)..(215): NCBI GI: 171689294 Blast Desc: protein product [Podospora anserina] gi|170944609|emb|CAP70720.1| protein product [Podospora anserina]
MTLNLFRVLADFSHLASIFILLHKMTELNGCAGISFKSQALYLLVYITRYLDLFSTTSWYNVLFKIAFIGSQSYIVYLMTTKYKPTHDPNLDTFRVQYLLGGAAVLAIVIPYEYTLWEILWAFSIWLESVAILPQLFMLQRTGEAETITTHYLFALGLYRALYIPNWMWRYLFEPKHKADWIAIVAGIVQTILYSDFFWIYYTKVMKGKKFKLPV

SEQ ID NO: 20052 - DNA, 3274 bp, Muscodor strobelii
  misc_feature: SGI EST ID NO. CUFF.47101.0
  misc_feature: Variant of the nucleotide sequence at SEQ ID NO 20050
gctatatatatgatcaattagttgaaaatcgattctgctaagttgtcgcattggtatcagaatattattcagtgtactattcggtattgtactcattgtagtattcggcggtgccatttattttgctatctacccatcaggttcctgtgacttggctgcctcaccgctcgattcatcctccggcgatttcttcttctgcagtttctttaggcgtgcttctgtagccatagctataatctctcgtctgctcaatgcacccgagcctgcgcccgttgtcgtgtcatctcccgaaaggctctttccaccaagaacataacttccgccttcccagcctccatggtcgtaagcgacttcttcactgggctggaagtattctccatctcctgttgtttggccgccactcttccagtcacccttggcgacctctttctcaatctgatggcataaatcccagaacttcctatcgtgtggtccatgaacattgtgtgcgagctcatggcaaagtgtgttgcgaatgaccttgtagtccctgtatccatcatatgcgtcggtgcgtagacgtagctcgatgacttcgcctttgttgcggttaagacccaggattctagtggtgccttcgtgatttgactccgtgtatgatacggggtccatctctgttaagagagcaaccgtgaacttgtgcttacgcatggcggtcttgatgcccgggtcagaagcgagacgcttgaggaacgccatagagcgctctggatttggcaggttctctaatggacggattgtcatgaacgcgtactttgcttcttctgcatccggctttttgcgagaccagactttgggggcacgccggctggcgagacttgcaccacgcctagcggcgagctgagaggcttcgttcatagagcgcatctcagcggtcgaggctccaagcagggtgaccttcttgtccaggagatctgtgacgggtttgtcgttaaagggtgccacaagtgttccgactttggctaccatgagcttctgattctcaacggggatatgcatagtaagttggatgtgtttggcaaaatcggcaacagtggcatcctctggaatatcacaggtttctttcttgccatggtagaaaaaggcgacgtggaccaccgattcgggctcctcatcgccggaggataggacatcctccgggttgaaggaatcctctgcatcagacatgacgtggaaaagagaagagacgctaggcgaatttatagattagtgttgctcaaaatgcagtaattgaagctatgtcgatttgtgatcgatgcctgtactgagatgtgagattgagaacgatgatgaattgtgttactgatggcgacagacaacattaagaggcaaaagaacggcgatggcgcagatggtgtttacggaacgttctagttgtatatatgcaagcgcgcctgctttgtttggttgttcgccttactattcaatgggcagctatatacatcctacgttatctttcatgggtttggggaagtcgcattcttattgctcttcatttgtaggcaggcagctttgtaatacgtcaatgccgctgtagagtgagatggaatcgcatccaggattgttcgctatccccgagtatcaccgaacggaggcactccttggcacttcagtcgacgctgaaattacttaatggcagactgcaccgacatagcgaagatatgcaactaaggaagcgcggactaaatctcagcactgccgccggacagtggccggatgggacgaatcaccactgcgcaaagctgcagcatgccagccggggaagatcgcgcgtctgcacgtccagctgcaattgtgtcctttctgccggccgccatcgtgctacgtgttgtgtctgacttcaacatcgccgacttttaacacgaacaccgacacagattcgcaacgtagacgacattgtcgcgcatctctgatcgaccctttcttctaaattctgcagtcgcttcccaattctacttacccattgcgtcagcgcatcgtctgggagcttgagctcctccatcatctttcgccatgacgttgaatctattccgagtcctggcggacttctcccatctagcctccattttcattctactacacaagatgacagagctcaacggctgcgccggcatatcattcaaatcacaagccttatatctcctcgtctacatcactcgatatctcggttcgataccttgcccggccaatcgcacacttcaaacgctgacccccgaaatctagacctcttcagcaccacaagttggtacaacgtactcttcaagatagcattcatcggcagccaaagctacatcgtctacctaatgaccacaaaatacaagcccacgcacgaccccaacctcgacaccttccgcgtccaatacctgctcggcggcgccgccgtcctcgccatcgtcataccctacgaatacaccctatgggagatcctctgggccttctccatctggctcgagtccgtcgccatcctgccccagctcttcatgctgcagcgcaccggcgaggcagagaccatcaccacccactacctcttcgctctcggcttgtaccgcgcactctacatccccaattggatgtggcgctacctgttcgagcccaagcacaaggccgactggatcgccatcgtcgctggtatcgttcagaccattctgtattccgacttcttctggatctactacactaaagtcatgaagggcaagaagttcaagctccctgtctaggagtgtggctctattgggacttgggagtagccgacgtgtcgcagagtggttgaggtaaggcggtgaatatggcggcgcatgggcaaagcgcatgtcaaatgcggctcgtggcaggtgtatgatagcaccaaaaaatatcattactagcgtggaagacctccgatgaaggtggtgcacgcttggcgttccggtggacggcgcgatctggacgcggggaggcagctggaaattttaggtttctatatcccttgtactacaaatgttgaaatggcggctagtagaccgaatagacggcaccgtatctaccatcttgagacagttcataataggtcaaatgataaatcggatacttattcgacaatagtcaaatacacagggtccatgaggctagaatcattggcatacgaccttcggctttaaatatcatattcggttccgaatatagtcagtttcattggagacagcctgacagcaatggtacccatgtcaccccaatagtccttcaacatgagaaccgc

SEQ ID NO: 20053 - DNA, 237 bp, Muscodor strobelii
  misc_feature: SGI cDNA ID NO. 566756
  misc_feature: Encodes the peptide sequence at SEQ ID NO 20054
atgctgcagcgcaccggcgaggcagagaccatcaccacccactacctcttcgctctcggcttgtaccgcgcactctacatccccaattggatgtggcgctacctgttcgagcccaagcacaaggccgactggatcgccatcgtcgctggtatcgttcagaccattctgtattccgacttcttctggatctactacactaaagtcatgaagggcaagaagttcaagctccctgtctag

SEQ ID NO: 20054 - protein, 78 aa, Muscodor strobelii
  misc_feature: SGI Peptide ID NO. 566756
  misc_feature (1)..(68): Pfam Id: PF00810 Pfam Desc: ER lumen protein retaining receptor
  misc_feature (1)..(78): NCBI GI: 261356918 Blast Desc: ER lumen protein retaining receptor [Verticillium albo-atrum VaMs.102]
  misc_feature (1)..(78): NCBI GI: 85110748 Blast Desc: ER lumen protein retaining receptor [Neurospora crassa OR74A] gi|18376020|emb|CAB91754.2| HDEL receptor ERD2 [Neurospora crassa] gi|28925298|gb|EAA34376.1| ER lumen protein retaining
  misc_feature (1)..(78): NCBI GI: 256730712 Blast Desc: [Nectria haematococca mpVI 77-13-4]
  misc_feature (1)..(78): NCBI GI: 145606272 Blast Desc: HDEL sequence binding protein, [Magnaporthe grisea 70-15] gi|145013979|gb|EDJ98620.1| HDEL sequence binding protein, [Magnaporthe grisea 70-15]
  misc_feature (1)..(78): NCBI GI: 46109484 Blast Desc: FG01624.1 [Gibberella zeae PH-1]
  misc_feature (1)..(78): NCBI GI: 116205057 Blast Desc: CHGG_10412 [Chaetomium globosum CBS 148.51] gi|88176540|gb|EAQ84008.1| CHGG_10412 [Chaetomium globosum CBS 148.51]
  misc_feature (1)..(78): NCBI GI: 171689294 Blast Desc: protein product [Podospora anserina] gi|170944609|emb|CAP70720.1| protein product [Podospora anserina]
  misc_feature (1)..(78): NCBI GI: 189195304 Blast Desc: ER lumen protein retaining receptor 2 [Pyrenophora tritici-repentis Pt-1C-BFP] gi|187979869|gb|EDU46495.1| ER lumen protein retaining receptor 2 [Pyrenophora tritici-repentis
  misc_feature (1)..(78): NCBI GI: 119182635 Blast Desc: CIMG_06336 [Coccidioides immitis RS] gi|240109343|gb|EER27512.1| ER lumen protein retaining receptor, [Coccidioides posadasii C735 delta SOWgp]
  misc_feature (1)..(78): NCBI GI: 258571487 Blast Desc: ER lumen protein retaining receptor 2 [Uncinocarpus reesii 1704] gi|237904817|gb|EEP79218.1| ER lumen protein retaining receptor 2 [Uncinocarpus reesii 1704]
MLQRTGEAETITTHYLFALGLYRALYIPNWMWRYLFEPKHKADWIAIVAGIVQTILYSDFFWIYYTKVMKGKKFKLPV

SEQ ID NO: 20055 - DNA, 3274 bp, Muscodor strobelii; identical to SEQ ID NO: 20052
  misc_feature: SGI EST ID NO. CUFF.47101.0
  misc_feature: Variant of the nucleotide sequence at SEQ ID NO 20053

SEQ ID NO: 20056 - DNA, 1077 bp, Muscodor strobelii
  misc_feature: SGI cDNA ID NO. 566757
  misc_feature: Encodes the peptide sequence at SEQ ID NO 20057
atgtctgatgcagaggattccttcaacccggaggatgtcctatcctccggcgatgaggagcccgaatcggtggtccacgtcgcctttttctaccatggcaagaaagaaacctgtgatattccagaggatgccactgttgccgattttgccaaacacatccaacttactatgcatatccccgttgagaatcagaagctcatggtagccaaagtcggaacacttgtggcaccctttaacgacaaacccgtcacagatctcctggacaagaaggtcaccctgcttggagcctcgaccgctgagatgcgctctatgaacgaagcctctcagctcgccgctaggcgtggtgcaagtctcgccagccggcgtgcccccaaagtctggtctcgcaaaaagccggatgcagaagaagcaaagtacgcgttcatgacaatccgtccattagagaacctgccaaatccagagcgctctatggcgttcctcaagcgtctcgcttctgacccgggcatcaagaccgccatgcgtaagcacaagttcacggttgctctcttaacagagatggaccccgtatcatacacggagtcaaatcacgaaggcaccactagaatcctgggtcttaaccgcaacaaaggcgaagtcatcgagctacgtctacgcaccgacgcatatgatggatacagggactacaaggtcattcgcaacacactttgccatgagctcgcacacaatgttcatggaccacacgataggaagttctgggatttatgccatcagattgagaaagaggtcgccaagggtgactggaagagtggcggccaaacaacaggagatggagaatacttccagcccagtgaagaagtcgcttacgaccatggaggctgggaaggcggaagttatgttcttggtggaaagagcctttcgggagatgacacgacaacgggcgcaggctcgggtgcattgagcagacgagagattatagctatggctacagaagcacgcctaaagaaactgcagaagaagaaatcgccggaggatgaatcgagcggtgaggcagccaagtcacaggaacctgatgggtag

SEQ ID NO: 20057 - protein, 358 aa, Muscodor strobelii
  misc_feature: SGI Peptide ID NO. 566757
  misc_feature (136)..(334): Pfam Id: PF08325 Pfam Desc: WLM domain
  misc_feature (14)..(339): NCBI GI: 156063306 Blast Desc: SS1G_01769 [Sclerotinia sclerotiorum 1980] gi|154697105|gb|EDN96843.1| SS1G_01769 [Sclerotinia sclerotiorum 1980]
  misc_feature (1)..(350): NCBI GI: 169597881 Blast Desc: SNOG_01732 [Phaeosphaeria nodorum SN15] gi|160707609|gb|EAT91381.2| SNOG_01732 [Phaeosphaeria nodorum SN15]
  misc_feature (23)..(335): NCBI GI: 256730502 Blast Desc: NECHADRAFT_98512 [Nectria haematococca mpVI 77-13-4]
  misc_feature (23)..(335): NCBI GI: 46109630 Blast Desc: FG01697.1 [Gibberella zeae PH-1]
  misc_feature (18)..(339): NCBI GI: 242775133 Blast Desc: zinc metalloproteinase, [Talaromyces stipitatus ATCC 10500] gi|218722201|gb|EED21619.1| zinc metalloproteinase, [Talaromyces stipitatus ATCC 10500]
  misc_feature (2)..(312): NCBI GI: 189195912 Blast Desc: ubiquitin/metalloprotease fusion protein [Pyrenophora tritici-repentis Pt-1C-BFP] gi|187980173|gb|EDU46799.1| ubiquitin/metalloprotease fusion protein [Pyrenophora Pt-1C-BFP]
  misc_feature (82)..(348): NCBI GI: 85110770 Blast Desc: NCU06782 [Neurospora crassa OR74A] gi|18376008|emb|CAB91742.2| conserved [Neurospora crassa] gi|28925309|gb|EAA34387.1| NCU06782 [Neurospora crassa OR74A]
  misc_feature (18)..(335): NCBI GI: 255937363 Blast Desc: Pc13g12940 [Penicillium chrysogenum Wisconsin 54-1255] gi|211584328|emb|CAP92363.1| Pc13g12940 [Penicillium chrysogenum Wisconsin 54-1255]
  misc_feature (1)..(345): NCBI GI: 226291264 Blast Desc: conserved [Paracoccidioides brasiliensis Pb18]
  misc_feature (1)..(345): NCBI GI: 225679533 Blast Desc: conserved [Paracoccidioides brasiliensis Pb03]
MSDAEDSFNPEDVLSSGDEEPESVVHVAFFYHGKKETCDIPEDATVADFAKHIQLTMHIPVENQKLMVAKVGTLVAPFNDKPVTDLLDKKVTLLGASTAEMRSMNEASQLAARRGASLASRRAPKVWSRKKPDAEEAKYAFMTIRPLENLPNPERSMAFLKRLASDPGIKTAMRKHKFTVALLTEMDPVSYTESNHEGTTRILGLNRNKGEVIELRLRTDAYDGYRDYKVIRNTLCHELAHNVHGPHDRKFWDLCHQIEKEVAKGDWKSGGQTTGDGEYFQPSEEVAYDHGGWEGGSYVLGGKSLSGDDTTTGAGSGALSRREIIAMATEARLKKLQKKKSPEDESSGEAAKSQEPDG

SEQ ID NO: 20058 - DNA, 1014 bp, Muscodor strobelii
  misc_feature: SGI cDNA ID NO. 566758
  misc_feature: Encodes the peptide sequence at SEQ ID NO 20059
atgcacaccctccaacctctcctcatttctctcgccttatccccaataatatctaccgcctcaccagcagaatcaaaatggattcaacccaataacccccaaactcacaaagagcccaagatccacacaaacaccggtagtaaagaaacgaaatacttccacgagccaggcggttctatagaactgggccactacgacgcacgctacttcaaaggcaaagtgtcatacaccgagcaccgaacggccctccaacaactaatccgctcatacctcacaacattcgacggattaggaatctcgacatggttagctcacggctcattactaggctggtggtggaacgggcggatcatgccctgggactacgacctcgatgtgcaagtcagcgtcgcgacgctccattacctcggtttacacttcaaccgaagtacacacgaatatatcttcgacgacactgcatctcccctgacccctacctccctatcctccgataaaaccgaaggcggtaatggaacggtattgaagaaatacctcctagacatcaacccgcaccacggtgatcgcacccgcggaaacggcgcaaatgtcatagacgcgcggtggatcgacacgagtaacgggatgttcatcgacatcacgggacttcgggagcgagatcctgacacgcagccgggagtctggagttgtaagaactcgcatcggtataagacgctagagctctggccgcttcgacggacgcagtttgagggtgtggaggcgtggattccgtatgcgtttgataagattcttacggatgaatatggggctaagagcttggttactactgagtgggctgggcatcgttggcatccggagctcaaggaatggattccgaacaaatcgccatcacaacaaaaaccagcacaagtaacagatgagtttcagggtctacgtactcacaaacagcagaagactgtccagggagagaatccaaatgtggtaattgtttatgaagaagtagtggtagaagtttga

SEQ ID NO: 20059 - protein, 337 aa, Muscodor strobelii
  misc_feature: SGI Peptide ID NO. 566758
  misc_feature (52)..(299): NCBI GI: 145606270 Blast Desc: MGG_11913 [Magnaporthe grisea 70-15] gi|145013977|gb|EDJ98618.1| MGG_11913 [Magnaporthe grisea 70-15]
  misc_feature (48)..(305): NCBI GI: 46109466 Blast Desc: FG01615.1 [Gibberella zeae PH-1]
  misc_feature (48)..(290): NCBI GI: 256730531 Blast Desc: [Nectria haematococca mpVI 77-13-4]
  misc_feature (39)..(291): NCBI GI: 154298265 Blast Desc: BC1G_11977 [Botryotinia fuckeliana B05.10] gi|150858163|gb|EDN33355.1| BC1G_11977 [Botryotinia fuckeliana B05.10]
  misc_feature (7)..(291): NCBI GI: 156050451 Blast Desc: SS1G_07812 [Sclerotinia sclerotiorum 1980] gi|154692213|gb|EDN91951.1| SS1G_07812 [Sclerotinia sclerotiorum 1980]
  misc_feature (48)..(281): NCBI GI: 261356914 Blast Desc: conserved [Verticillium albo-atrum VaMs.102]
  misc_feature (49)..(279): NCBI GI: 171689298 Blast Desc: protein product [Podospora anserina] gi|170944611|emb|CAP70722.1| protein product [Podospora anserina]
  misc_feature (50)..(293): NCBI GI: 189195910 Blast Desc: conserved [Pyrenophora tritici-repentis Pt-1C-BFP] gi|187980172|gb|EDU46798.1| conserved [Pyrenophora tritici-repentis Pt-1C-BFP]
  misc_feature (51)..(298): NCBI GI: 240109756 Blast Desc: CPC735_032610 [Coccidioides posadasii C735 delta SOWgp]
  misc_feature (49)..(317): NCBI GI: 239611780 Blast Desc: mannosylphosphate transferase [Ajellomyces dermatitidis ER-3]
MHTLQPLLISLALSPIISTASPAESKWIQPNNPQTHKEPKIHTNTGSKETKYFHEPGGSIELGHYDARYFKGKVSYTEHRTALQQLIRSYLTTFDGLGISTWLAHGSLLGWWWNGRIMPWDYDLDVQVSVATLHYLGLHFNRSTHEYIFDDTASPLTPTSLSSDKTEGGNGTVLKKYLLDINPHHGDRTRGNGANVIDARWIDTSNGMFIDITGLRERDPDTQPGVWSCKNSHRYKTLELWPLRRTQFEGVEAWIPYAFDKILTDEYGAKSLVTTEWAGHRWHPELKEWIPNKSPSQQKPAQVTDEFQGLRTHKQQKTVQGENPNVVIVYEEVVVEV

SEQ ID NO: 20060 - DNA, 705 bp, Muscodor strobelii
  misc_feature: SGI cDNA ID NO. 566759
  misc_feature: Encodes the peptide sequence at SEQ ID NO 20061
atggacgatgacactgaggatatggaggccaaatgggaaacggtccgaacaaagagagatgagctgtttgccgcgggtcaactcaaaaggggtcaaaggcgtaggtataagccaaagccagatgattgggactctgatctcaatggcgagtgggaacaacagccccaagcactagaagccgccgaggacactgcacagccccaaccggctcgaggccgaggacggaagactcagactgtgattgacgacgaagacgaggtctcggcgatggatgttgattcagaggaagagccagcacctaagaccaagggacgcaaggcagccaccactaccaaagccaaagcagctcccaaagcagcggcaaagaaggcaccagccaagcgaggtcgcgccaagaaggcacaagagaatgaggaagaatcagataatgatgacttcgtggtcgacgatgattatgaccctccagctcctccacccaagcgaactacaacggccagagcaaccacaacgagggcacagcccgctcgatcgcagacatcctctcgtgcctccgcgcctaagactgcaccgaagactactcgtcaaactaaactgaacttctctcagccggcgactcagcagcagcctttagaaatcagtgatgatgagatctctgatgatccttttgagtctgcgccaactccatcccgaacacgaaagcgctag

SEQ ID NO: 20061 - protein, 234 aa, Muscodor strobelii
  misc_feature: SGI Peptide ID NO. 566759
  misc_feature (1)..(234): NCBI GI: 116200261 Blast Desc: CHGG_08286 [Chaetomium globosum CBS 148.51] gi|88179565|gb|EAQ87033.1| CHGG_08286 [Chaetomium globosum CBS 148.51]
  misc_feature (1)..(81): NCBI GI: 171683832 Blast Desc: protein product [Podospora anserina] gi|170941876|emb|CAP67529.1| protein product [Podospora anserina]
  misc_feature (2)..(59): NCBI GI: 164423404 Blast Desc: DNA repair protein rad32 [Neurospora crassa OR74A] gi|157070078|gb|EAA34355.2| DNA repair protein rad32 [Neurospora crassa OR74A]
  misc_feature (4)..(207): NCBI GI: 169623484 Blast Desc: SNOG_14985 [Phaeosphaeria nodorum SN15] gi|111056408|gb|EAT77528.1| SNOG_14985 [Phaeosphaeria nodorum SN15]
  misc_feature (2)..(59): NCBI GI: 16944607 Blast Desc: recombinational repair protein mus-23 [Neurospora crassa]
  misc_feature (2)..(59): NCBI GI: 166204137 Blast Desc: recombinational repair protein mus-23 [Neurospora crassa]
  misc_feature (1)..(70): NCBI GI: 70992351 Blast Desc: meiotic recombination protein Mre11 [Aspergillus fumigatus Af293] gi|66848657|gb|EAL88986.1| meiotic recombination protein Mre11 [Aspergillus fumigatus Af293] meiotic recombination
  misc_feature (16)..(70): NCBI GI: 119472005 Blast Desc: meiotic recombination protein Mre11 [Neosartorya fischeri NRRL 181] gi|119406410|gb|EAW16361.1| meiotic recombination protein Mre11 [Neosartorya fischeri NRRL 181]
  misc_feature (8)..(134): NCBI GI: 238840477 Blast Desc: double-strand break repair protein mus-23 [Microsporum canis CBS 113480]
  misc_feature (16)..(129): NCBI GI: 189189158 Blast Desc: double-strand break repair protein mus-23 [Pyrenophora tritici-repentis Pt-1C-BFP] gi|187972524|gb|EDU40023.1| double-strand break repair protein mus-23 [Pyrenophora Pt-1C-BFP]
MDDDTEDMEAKWETVRTKRDELFAAGQLKRGQRRRYKPKPDDWDSDLNGEWEQQPQALEAAEDTAQPQPARGRGRKTQTVIDDEDEVSAMDVDSEEEPAPKTKGRKAATTTKAKAAPKAAAKKAPAKRGRAKKAQENEEESDNDDFVVDDDYDPPAPPPKRTTTARATTTRAQPARSQTSSRASAPKTAPKTTRQTKLNFSQPATQQQPLEISDDEISDDPFESAPTPSRTRKR

SEQ ID NO: 20062 - DNA, 3034 bp, Muscodor strobelii
  misc_feature: SGI EST ID NO. CUFF.46903.0
  misc_feature: Variant of the nucleotide sequence at SEQ ID NO 20060
gtggggctctactacatgcaatcggtctcacctgcaacctgacctgaagaagagttgcctggagacaatagctgtttctatgcaaccaagatgtgaacgtgtctactaaaagttcatagctgtgtttggaattcccagactcatctctccttcccttcaacatctcattacctaatccaacccaagcctcttgagcataccaccataatgcctacctcagagcaatcaggtgcggatacaatccgtgttctcgtcgccactgataaccatgttggctttgcggaacgtaaccccgttcgcaagcatgatagctggaaagcgtttgatgaagttatgaaccttgcccgaactgaagatgttgacatggtcctgctggctggcgatctctttcacgagaatcaaccgtccagatgggcaatgcatcaagtgatgcgaagtctccgacaaaattgtcttggtgataaaccatgcgagttacagtttatctgtgatgctagtgaagtctttgccagcgccttcccccacgtaaactacgaagaccaagacatcaacgtttcgattccagtgttttccatccatggaaaccacgacgacccaagtggtgagggcaactattgttctctcgacgtgctccagacagcgggtctgctcaactactttggtcggacgcctcaggtggataaaatcgacgtcaagcctgttcttctacagaaaggcaacacgaagctcgctctgtatggccttagtaacgtgcgggatgataagatgcataggaacttccgagaccacaacgtgaaatttttcgggccatcccagcaatcgacagattggttcaatctgctggctgtgcaccaaaatcaccatgcccataccgccacgagctatctacctgaggaaatgttgcctgactggatgaatcttgtcgtttggggccatgagcatgaatgtctcatcgaccctgttcacaatccagtgacaggttttcatgttatgcaacctggatcctcggttgctacatcacttgttcaaggcgaagccgtggccaaacatgttgctgttgtgagcatcactggtcgagactttacggtagagaaacaccgattgagaagcgtcaggccctttagaaccgccgaaatcatacttaggaatgacaagcgcttcaaaggcatcgacaaaaaaaggacaaccgtcaagagctaacgagaaagttgacggaggttgttgaagagatgattgacgaggctaatgcggaatgggactccctacaagatgaggaatttgatgagactgagcgaccattgccgcttattcggttgaaagtcgagcatacagctttggatggtggtcactacgacattgaaaatcctcaacgcttctcttcccgattctcaggtcaagttgccaatgacactgatgttgtccagttctggcgcaagaagaccatgcagaagaaagtcatgatcaatgaaataaccgatcaagagactctggcgaagttagagactttacagttttccaaaattgtccaggagtatttgaaggcccaatctctgaaggtgctccctcaagcgttatttgacgatgccttatctcagtttgtggacaagaatgacaaattcgctatgcagcaatttgtggaagagtctctagacgatcaagtcagaaagatatcattgatggacgatgacactgaggatatggaggccaaatgggaaacggtccgaacaaagagagatgagctgtttgccgcgggtcaactcaaaaggggtcaaaggcgtaggtataagccaaagccagatgattgggactctgatctcaatggcgagtgggaacaacagccccaagcactagaagccgccgaggacactgcacagccccaaccggctcgaggccgaggacggaagactcagactgtgattgacgacgaagacgaggtctcggcgatggatgttgattcagaggaagagccagcacctaagaccaagggacgcaaggcagccaccactaccaaagccaaagcagctcccaaagcagcggcaaagaaggcaccagccaagcgaggtcgcgccaagaaggcacaagagaatgaggaagaatcagataatgatgacttcgtggtcgacgatgattatgaccctccagctcctccacccaagcgaactacaacggccagagcaaccacaacgagggcacagcccgctcgatcgcagacatcctctcgtgcctccgcgcctaagactgcaccgaagactactcgtcaaactaaactgaacttctctcagccggcgactcagcagcagcctttagaaatcagtgatgatgagatctctgatgatccttttgagtctgcgccaactccatcccgaacacgaaagcgctagacgatctatcggtttctgaagggaacatgaagaacactaataagaggggctccacatatggcgatgatgatttttcgaggcccatcacagcctccatttgcttttgagcgtgtttagacggaacttttgcgaactgggacttgacttgatacgggaaggtgggaaggtaactgaataactaaggtagcaatcctttgagaactaataaactagggattatctttatctactgaccgtctattcactgagtgcactttgctcctccaaatagcatgaatacttgccagggagtcctatcccttgagcctaggttgataacttgtgagcattgaaaaatagtcccactcgagttccaaattgcgcatcttggaaacccagctaagcgtggcgcgcacgcggtaggggtcagattatctactaagttcacaaaaattcgtatagcgatcttcctcactacgagtttatgaagatgattacaagctgatagatgatgggcagtcttgggttgtttcaaatgtaccatattgccactttactatctcttggttgaactaggatcgatctaccggtactcaggggttacttgcttacgcgccaccgttcggtggaagaaactctatttcgctgtgatttatccgtgccatcaatatgac

SEQ ID NO: 20063 - DNA, 3099 bp, Muscodor strobelii
  misc_feature: SGI cDNA ID NO. 566760
  misc_feature: Encodes the peptide sequence at SEQ ID NO 20064
atgcgccgcgcatccgccgacctgaccgacccctctcggaacatcgaagaatccgtcggcagccccgaccgcgccttgccagacccggacgctgacttggacatgacgttctccgaggacgagagcaatccacgcatctacaccccgcctccacacatcgcggcgcgcttctatcgtccaacccagggtcgtcgcagagagtctgccgcctcgtcgcgccgcaactccatagcctcttcccgctcgtctcacggcttcagtcaacatggcggcccgcagagcaagtatatcgctcagcagatgcgccgtgcctccatcctcgaggagcgcaaaacccgcctggccgatcgcgcagcccatgccgagaaggttcggctgagggccgccctggccaaggcagctcagcagaagaactccaactctgaggcgcgtgcccaagctgccgcccaggcccgcgagaagaacttggccgaaatcgtcgccgcctgtgcagaagaagtgaagcgtgctaaagctatcgccgagagcatgaaagaaaagagggagcaggagatccagaaactcagggtacagatggaggagcgcttcgctgaagctgagaagaggagagaggagcttcgcacccgtcaggctgcacgacggtcccggggacttagcacagtgacccgcaagtcagccggcgactgctctacatcggaaaatgaggagctcgaatcagaatctgccagcctgagcgaccgccgtccggcgatgagtgaggacatggccgttgctagactgcagtggtggtggagaggcttgcagcgaagaaaagcggtccgagaattctcggaagtcggcctgaatatcgacggcgtccgagagacacctttcgagaaagtcgctgatctccttggccacgagcaagtgcttgtcgtggcggcacgagttctccgcatttgtggtctgaacgagggcggcgttggctctgtggaagagatggcggctgtacggacattcatgagcgcatttctcatcctcggacatcctacccaagttcttagcaacaaggaccacaaaggggaacaggagcaggttgggtcttctcaagggcatccaatccctcgtgatgatctggctaatccgcaattacaggatcttgtggccaaggctcgcgatttgttgatctcgttcgaaaccatcctgtcgcgactaacccttacaaacaactacacactaccgccgggactacaaggcaccctgcctgaagtctacgctactttctacaacgctttcattgcttggaaagcccgagattcgaacgctttggtcgaagtcatgctccttcaattcgtcgagcttgacgccattctccaatcggtccaagataacaccgaagaggcagtcaccgaatcatatcgacaaagtatcaaagagaatcaagtaatgctgcttgtcaggattaaaaggctcgccggcgctcaagaaggaaagcgattgattgcccaagcagtcgcgaaagcgagaaaggccagactggcaaagaagaacaagggagacaccaagcctagggttgcggaacactctctcgagggcgagagtctcgcgaacgcggacgatgctacagcagatcacgtcatctcgtctcagctaagaacactgactcctccgccgaccccaactcctcctagcaagagagagttggaccagagcatcctccaggccagttaccctcccatactaccggataacaggataatcattcatgaattggccattaatcgggagtatcgcgtcgagtttgaattcttccaagagcagcattctttacgcatggaaccgctgttcaaggagctccggtctggacccaaaaacgaggagaaggagttccattatgtgatgactatctcgagtttcatacgagatagactgcagcatttggtcaagcccgggacacctatgcatacgttcatcggcgaaatcctcgatacagaggttgcagagcgcgaattcagggtcggtgccttttcttacgagaaattcttctccgcaatgggctcgctactgcccaagttgtgtgcacccgcaagggatgacgaggtcaaagatctcgtcgaaaataagcttagccaaggacctgttgtagaccgcctcgaagcactaatcgcattcattcatgtgatgctctatgattacgcgaactacatgttgcaggtcgcagcaccaaatcttcttgagcatgctacaccttacgaagccaagaagttttccgaggagtttgacactggtgtcgtcacactaaatcgcgcggtgagcgcctggtacgaagcccgtactaaattatacgcagagacagctcgacgtgatccagagggtgtcaatcttgtccggtcacgaccgactgccgacaagatttactggcagatgcttcttgaccagttcacacagccgtcaccatcagctgaatcagtcccggaaccattggctctcgatgcgaagcgtcgagcgcgtatcggccgtcagacactatacgtcgttaccgcaggtgcaattcttctgcagtgcaagaatatgctcaagcgcgatgtgcgagcgccgtggaagacagaggcggggcgtgtctttacgatccttgaatctatggatgacaaggccaagccacttaacgaatctacagccgtgcatggtatcatggcggctcttgaggctgggcgctcgatgcctcaagcaacgaagacgcatctgcaggctcttgtgaccaagatccttgctgcctgcgccgaggccaagcgtaccaatatggaacccagagagcctgtcctgaaattattgttgacccgcattcggggacatatgctagccaggctacaggctggttcggcgaacgacaaagtcaaggcgacgagtgcagcgagcgagaagcttgcagggttgggtatgcccgaatttattgaaaaagtacgtgagatgatcgaggagcttactcgggttgggcttgttgaccgagaagcccatggattatggtgggaacgcattacgaaagaagttgaggagagggtagctgcctcagaggcacagacgggaactacatcatcggcatcgacatcgacatcgacataa

SEQ ID NO: 20064 - protein, 1032 aa, Muscodor strobelii
  misc_feature: SGI Peptide ID NO. 566760
  misc_feature (681)..(751): Pfam Id: PF05794 Pfam Desc: T-complex protein 11
  misc_feature (1)..(1011): NCBI GI: 39957680 Blast Desc: MGG_09192 [Magnaporthe grisea 70-15] gi|145013374|gb|EDJ98015.1| MGG_09192 [Magnaporthe grisea 70-15]
  misc_feature (1)..(1016): NCBI GI: 171678139 Blast Desc: protein product [Podospora anserina] gi|170937139|emb|CAP61796.1| protein product [Podospora anserina]
  misc_feature (1)..(1011): NCBI GI: 256730538 Blast Desc: NECHADRAFT_29788 [Nectria haematococca mpVI 77-13-4]
  misc_feature (1)..(1010): NCBI GI: 85090589 Blast Desc: NCU09270 [Neurospora crassa OR74A] gi|28919856|gb|EAA29253.1| conserved [Neurospora crassa OR74A]
  misc_feature (1)..(1004): NCBI GI: 116205846 Blast Desc: CHGG_02216 [Chaetomium globosum CBS 148.51] gi|88182813|gb|EAQ90281.1| CHGG_02216 [Chaetomium globosum CBS 148.51]
  misc_feature (1)..(1020): NCBI GI: 154297757 Blast Desc: BC1G_12290 [Botryotinia fuckeliana B05.10] gi|150858419|gb|EDN33611.1| BC1G_12290 [Botryotinia fuckeliana B05.10]
  misc_feature (1)..(1017): NCBI GI: 156043843 Blast Desc: SS1G_10925 [Sclerotinia sclerotiorum 1980] gi|154695312|gb|EDN95050.1| SS1G_10925 [Sclerotinia sclerotiorum 1980]
  misc_feature (34)..(1010): NCBI GI: 189196636 Blast Desc: conserved [Pyrenophora tritici-repentis Pt-1C-BFP] gi|187980535|gb|EDU47161.1| conserved [Pyrenophora tritici-repentis Pt-1C-BFP]
  misc_feature (34)..(1010): NCBI GI: 169604202 Blast Desc: SNOG_05112 [Phaeosphaeria nodorum SN15] gi|111066383|gb|EAT87503.1| SNOG_05112 [Phaeosphaeria nodorum SN15]
  misc_feature (13)..(1008): NCBI GI: 212543137 Blast Desc: IQ calmodulin-binding motif domain protein [Penicillium marneffei ATCC 18224] gi|210066630|gb|EEA20723.1| IQ calmodulin-binding motif domain protein [Penicillium marneffei
MRRASADLTDPSRNIEESVGSPDRALPDPDADLDMTFSEDESNPRIYTPPPHIAARFYRPTQGRRRESAASSRRNSIASSRSSHGFSQHGGPQSKYIAQQMRRASILEERKTRLADRAAHAEKVRLRAALAKAAQQKNSNSEARAQAAAQAREKNLAEIVAACAEEVKRAKAIAESMKEKREQEIQKLRVQMEERFAEAEKRREELRTRQAARRSRGLSTVTRKSAGDCSTSENEELESESASLSDRRPAMSEDMAVARLQWWWRGLQRRKAVREFSEVGLNIDGVRETPFEKVADLLGHEQVLVVAARVLRICGLNEGGVGSVEEMAAVRTFMSAFLILGHPTQVLSNKDHKGEQEQVGSSQGHPIPRDDLANPQLQDLVAKARDLLISFETILSRLTLTNNYTLPPGLQGTLPEVYATFYNAFIAWKARDSNALVEVMLLQFVELDAILQSVQDNTEEAVTESYRQSIKENQVMLLVRIKRLAGAQEGKRLIAQAVAKARKARLAKKNKGDTKPRVAEHSLEGESLANADDATADHVISSQLRTLTPPPTPTPPSKRELDQSILQASYPPILPDNRIIIHELAINREYRVEFEFFQEQHSLRMEPLFKELRSGPKNEEKEFHYVMTISSFIRDRLQHLVKPGTPMHTFIGEILDTEVAEREFRVGAFSYEKFFSAMGSLLPKLCAPARDDEVKDLVENKLSQGPVVDRLEALIAFIHVMLYDYANYMLQVAAPNLLEHATPYEAKKFSEEFDTGVVTLNRAVSAWYEARTKLYAETARRDPEGVNLVRSRPTADKIYWQMLLDQFTQPSPSAESVPEPLALDAKRRARIGRQTLYVVTAGAILLQCKNMLKRDVRAPWKTEAGRVFTILESMDDKAKPLNESTAVHGIMAALEAGRSMPQATKTHLQALVTKILAACAEAKRTNMEPREPVLKLLLTRIRGHMLARLQAGSANDKVKATSAASEKLAGLGMPEFIEKVREMIEELTRVGLVDREAHGLWWERITKEVEERVAASEAQTGTTSSASTSTST

SEQ ID NO: 20065 - DNA, 4309 bp, Muscodor strobelii
  misc_feature: SGI EST ID NO. CUFF.46905.0
  misc_feature: Variant of the nucleotide sequence at SEQ ID NO 20063
ccgggttggcgtcagacacgacatccctccatcatttcacgcttcatgcccaagtcagatagagaagttggaaggttctagggcctctaaccagagtcactaatgacatccacctaacatccacctaacgactaaaacgtcgtcgatagcaagatttctgttcctcagactacagatcttatctgattgaacgatctcagtttttattcttcattgttttccccggtctattcatggagcagggtacctaacaaaccgagaatcgtgagcctagcctttatcagttgtctcacgtccgggtcttacgccagtcatccttgcattctcccgccaggtcgccattcactatctgctcttcccagcacgcaatttgtgcccttccaacagttgtgtcttcgaggctcctttgacagcgtcgcgtgccctccaaacagactgcttcgtacgccattattacaagtagaggagccatcagcccgttgcgtagacccgagtgttgggccatcctgagtcccaacgcgacagacaaagccgacgtctccggcattcccaccataccagatcctgcactaagtgcctgttatcctttgtgtgaattgcttgagcatcgacgcttgcctcgcgtttccgtctcgtaccagcttgaggatgggcagcgccgtttcgcgcgcaccatccccgccaacacgttcacgatgcgccgcgcatccgccgacctgaccgacccctctcggaacatcgaagaatccgtcggcagccccgaccgcgccttgccagacccggacgctgacttggacatgacgttctccgaggacgagagcaatccacgcatctacaccccgcctccacacatcgcggcgcgcttctatcgtccaacccagggtcgtcgcagagagtctgccgcctcgtcgcgccgcaactccatagcctcttcccgctcgtctcacggcttcagtcaacatggcggcccgcagagcaagtatatcgctcagcagatgcgccgtgcctccatcctcgaggagcgcaaaacccgcctggccgatcgcgcagcccatgccgagaaggttcggctgagggccgccctggccaaggcagctcagcagaagaactccaactctgaggcgcgtgcccaagctgccgcccaggcccgcgagaagaacttggccgaaatcgtcgccgcctgtgcagaagaagtgaagcgtgctaaagctatcgccgagagcatgaaagaaaagagggagcaggagatccagaaactcagggtacagatggaggagcgcttcgctgaagctgagaagaggagagaggagcttcgcacccgtcaggctgcacgacggtcccggggacttagcacagtgacccgcaagtcagccggcgactgctctacatcggaaaatgaggagctcgaatcagaatctgccagcctgagcgaccgccgtccggcgatgagtgaggacatggccgttgctagactgcagtggtggtggagaggcttgcagcgaagaaaagcggtccgagaattctcggaagtcggcctgaatatcgacggcgtccgagagacacctttcgagaaagtcgctgatctccttggccacgagcaagtgcttgtcgtggcggcacgagttctccgcatttgtggtctgaacgagggcggcgttggctctgtggaagagatggcggctgtacggacattcatgagcgcatttctcatcctcggacatcctacccaagttcttagcaacaaggaccacaaaggggaacaggagcaggttgggtcttctcaagggcatccaatccctcgtgatgatctggctaatccgcaattacaggatcttgtggccaaggctcgcgatttgttgatctcgttcgaaaccatcctgtcgcgactaacccttacaaacaactacacactaccgccgggactacaaggcaccctgcctgaagtctacgctactttctacaacgctttcattgcttggaaagcccgagattcgaacgctttggtcgaagtcatgctccttcaattcgtcgagcttgacgccattctccaatcggtccaagataacaccgaagaggcagtcaccgaatcatatcgacaaagtatcaaagagaatcaagtaatgctgcttgtcaggattaaaaggctcgccggcgctcaagaaggaaagcgattgattgcccaagcagtcgcgaaagcgagaaaggccagactggcaaagaagaacaagggagacaccaagcctagggttgcggaacactctctcgagggcgagagtctcgcgaacgcggacgatgctacagcagatcacgtcatctcgtctcagctaagaacactgactcctccgccgaccccaactcctcctagcaagagagagttggaccagagcatcctccaggccagttaccctcccatactaccggataacaggataatcattcatgaattggccattaatcgggagtatcgcgtcgagtttgaattcttccaagagcagcattctttacgcatggaaccgctgttcaaggagctccggtctggacccaaaaacgaggagaaggagttccattatgtgatgactatctcgagtttcatacgagatagactgcagcatttggtcaagcccgggacacctatgcatacgttcatcggcgaaatcctcgatacagaggttgcagagcgcgaattcagggtcggtgccttttcttacgagaaattcttctccgcaatgggctcgctactgcccaagttgtgtgcacccgcaagggatgacgaggtcaaagatctcgtcgaaaataagcttagccaaggacctgttgtagaccgcctcgaagcactaatcgcattcattcatgtgatgctctatgattacgcgaactacatgttgcaggtcgcagcaccaaatcttcttgagcatgctacaccttacgaagccaagaagttttccgaggagtttgacactggtgtcgtcacactaaatcgcgcggtgagcgcctggtacgaagcccgtactaaattatacgcagagacagctcgacgtgatccagagggtgtcaatcttgtccggtcacgaccgactgccgacaagatttactggcagatgcttcttgaccagttcacacagccgtcaccatcagctgaatcagtcccggaaccattggctctcgatgcgaagcgtcgagcgcgtatcggccgtcagacactatacgtcgttaccgcaggtgcaattcttctgcagtgcaagaatatgctcaagcgcgatgtgcgagcgccgtggaagacagaggcggggcgtgtctttacgatccttgaatctatggatgacaaggccaagccacttaacgaatctacagccgtgcatggtatcatggcggctcttgaggctgggcgctcgatgcctcaagcaacgaagacgcatctgcaggctcttgtgaccaagatccttgctgcctgcgccgaggccaagcgtaccaatatggaacccagagagcctgtcctgaaattattgttgacccgcattcggggacatatgctagccaggctacaggctggttcggcgaacgacaaagtcaaggcgacgagtgcagcgagcgagaagcttgcagggttgggtatgcccgaatttattgaaaaagtacgtgagatgatcgaggagcttactcgggttgggcttgttgaccgagaagcccatggattatggtgggaacgcattacgaaagaagttgaggagagggtagctgcctcagaggcacagacgggaactacatcatcggcatcgacatcgacatcgacataagactgcatttgcatcacggctgcatcatacttgagcatgtgtaatgggatttccctacttctccttcatgaacctgtatacacacatattgctcttgatttttaactctgggtacctgggatgggatacggcgttttaggctggggcatgatgacagatgggcatggactcggattttcttcccagatctgctgaggttgggacatggacagggagaacatattcatcgagcattgtttcttgtattgagattatatgtacacagcgaggacacacatttgctaggcttgggattcaagatgacttctatagcctcagctgcagagcctagaatgatagcgcaagatatcgatatcatatcattcaagtgctccaatgcttctaccgtgttttgtgacgcttgataccgctgaaaggaactagcgtcacattgggcttttcattttaatttactcatatttgtagcctgcaacatccgggataactctttcaggtctttgacgtgagccatcaag

SEQ ID NO: 20066 - DNA, 1344 bp, Muscodor strobelii
  misc_feature: SGI cDNA ID NO. 566761
  misc_feature: Elevated expression when VOC is produced
  misc_feature: Encodes the peptide sequence at SEQ ID NO 20067
atgcttggtgaacccggaagaatactctcgttcgtcggaaaaggactatgggatcatcatcttccttttcaagaaaacccagacactaagcgttgggaatgtagcacagattatcctcgtgaagaatccatcagaaccgtcaacgtcgataatgataactggagctcggcatcaaaagatctcttcatgatatatcaatggaactttctcgcgccggtcttcgatttcgacggtccaatcttggaacatcaccatctgcacaagaacaatcccctgccgttcatagagtttgcttgtgaggaggagtcaactatcatcaaaggtggatttggcgagttgaaaatagctgaagtcgccgtgaagcgcttgatgtctaataatagggacatgttcaacagagaagtcgagatcctgaagctttctcgtggcgacaataatccgcatcttgtccatctcttggcaacatacttcgatggagagcattataacttgatctttccgtgggcaaatgggaaccttagagatctgtggaaaagcgaccgtctacctgaacatacctacgataaaattttgtgggttgccgaacagtgctctggcattgcagaggcattacgcaaaattcactatgacgattttccaaacggaaatcacgatcgctcaggaatacccccttataaaggcagacatggcgatatcaaacctgaaaatattctctgcttcgatcgactccttgttctctctgatttcggcttgtctcgacgccacaaactcatttcagtcgggcataaatattgtggaatgttcccagtatcaaggacttatcggggaccagaatacgacttaaacggggaaatatcaccattatgggatatctggacccttggctgtgtctatcttgagtttatcatatggtatctgcaagggtgggatgactgtaacgagttctcacagcagcggattcgatgcgatcgtcaaattgacgtcgatgaggacaacttcttccatgtttcgcacgacgaactgacagcgtccagagcttatcgcaaactacctgtgatcaagcgtatcagagatcttcataagcatcccgactgcacacaatttatacatgaatttctggatctcgtttgtaagagaatgattcgcattgatccacacaagcgtgaggactgcgttgccattgcggcacagatgaaagccatgtttgaaaggtgtcggatcgatgaggcatactgcatggaaaagtctcgtaagtcttttgtgatgagattgacgaatgagtcagacaagataacattgttcaaacgattcttgaactttcttaaacggaaacgagcgaagtaa

SEQ ID NO: 20067 - protein, 447 aa, Muscodor strobelii
  misc_feature: SGI Peptide ID NO. 566761
  misc_feature (229)..(302): Pfam Id: PF00069 Pfam Desc: Protein kinase domain
  misc_feature (8)..(428): NCBI GI: 46126729 Blast Desc: FG07742.1 [Gibberella zeae PH-1]
  misc_feature (1)..(422): NCBI GI: 116200846 Blast Desc: CHGG_10968 [Chaetomium globosum CBS 148.51] gi|88175682|gb|EAQ83150.1| CHGG_10968 [Chaetomium globosum CBS 148.51]
  misc_feature (52)..(416): NCBI GI: 154300072 Blast Desc: BC1G_11225 [Botryotinia fuckeliana B05.10] gi|150856838|gb|EDN32030.1| BC1G_11225 [Botryotinia fuckeliana B05.10]
  misc_feature (11)..(417): NCBI GI: 261359076 Blast Desc: protein kinase domain-containing protein [Verticillium albo-atrum VaMs.102]
  misc_feature (1)..(419): NCBI GI: 169600195 Blast Desc: SNOG_02927 [Phaeosphaeria nodorum SN15] gi|111068538|gb|EAT89658.1| SNOG_02927 [Phaeosphaeria nodorum SN15]
  misc_feature (8)..(429): NCBI GI: 238493153 Blast Desc: protein kinase domain-containing protein [Aspergillus flavus NRRL3357] gi|220696307|gb|EED52649.1| protein kinase domain-containing protein [Aspergillus flavus NRRL3357]
  misc_feature (8)..(414): NCBI GI: 67541591 Blast Desc: AN6959.2 [Aspergillus nidulans FGSC A4] gi|40738411|gb|EAA57601.1| AN6959.2 [Aspergillus nidulans FGSC A4]
  misc_feature (8)..(414): NCBI GI: 259480575 Blast Desc: TPA: protein kinase domain-containing protein (AFU_orthologue; AFUA_2G14650) [Aspergillus nidulans FGSC A4]
  misc_feature (8)..(417): NCBI GI: 170940330 Blast Desc: protein product [Podospora anserina]
  misc_feature (8)..(384): NCBI GI: 67522665 Blast Desc: AN1789.2 [Aspergillus nidulans FGSC A4] gi|40744809|gb|EAA63965.1| AN1789.2 [Aspergillus nidulans FGSC A4] gi|259487135|tpe|CBF85566.1| TPA: conserved [Aspergillus FGSC
  misc_feature: Useful for introducing or modulating the production of volatile compounds
MLGEPGRILSFVGKGLWDHHLPFQENPDTKRWECSTDYPREESIRTVNVDNDNWSSASKDLFMIYQWNFLAPVFDFDGPILEHHHLHKNNPLPFIEFACEEESTIIKGGFGELKIAEVAVKRLMSNNRDMFNREVEILKLSRGDNNPHLVHLLATYFDGEHYNLIFPWANGNLRDLWKSDRLPEHTYDKILWVAEQCSGIAEALRKIHYDDFPNGNHDRSGIPPYKGRHGDIKPENILCFDRLLVLSDFGLSRRHKLISVGHKYCGMFPVSRTYRGPEYDLNGEISPLWDIWTLGCVYLEFIIWYLQGWDDCNEFSQQRIRCDRQIDVDEDNFFHVSHDELTASRAYRKLPVIKRIRDLHKHPDCTQFIHEFLDLVCKRMIRIDPHKREDCVAIAAQMKAMFERCRIDEAYCMEKSRKSFVMRLTNESDKITLFKRFLNFLKRKRAK

SEQ ID NO: 20068 - DNA, 2534 bp, Muscodor strobelii
  misc_feature: SGI EST ID NO. CUFF.46914.0
  misc_feature: Variant of the nucleotide sequence at SEQ ID NO 20066
tagacatgatgccttgtcgaggcaagcctcaaggcatcttgcgatcgctgaacttaggaccctcacagccttgtctcctcttgaatttacattgaactgaagactccgatcgagtcggggcgcggatcttggcacatgggcgttatacctacgtttgctcaagtaaatgtatatatacttccttacaattggccatatcacgcagcatacttctccttagtttttgcagtaacagccagctagtcttgcttttaagctactgctactagagtcatgtctttcagttggtctgagggctcggaaatcgagcgcctagaacctctccaggatgtccaatcttctgcaatttcatggtgtagcaccgcgcaaggcgagtcggaagatgagtccgcatccaatacaagacctggccacttactacgacaagagacccttgggctggagttggcaactgtaacgattaaggatattaagcccagactaagagtaattccatctattgagccacaccctatccaggagctagaggcaaagcttcgtgaagctcatcttaaagacccgagagactacaacaagaattatattacaatcgataaactgaatgaacttatatcgaagtcaattgtggcagaaatcatgagttgtatcgttagtagcgaagaattgcctggcgttgtagatcagattttgccgggatcatcaacatcgcccaacacggacactgaacccgaaacaaagtgtcggcggaagttattcgcaattcttatcatgcttggtgaacccggaagaatactctcgttcgtcggaaaaggactatgggatcatcatcttccttttcaagaaaacccagacactaagcgttgggaatgtagcacagattatcctcgtgaagaatccatcagaaccgtcaacgtcgataatgataactggagctcggcatcaaaagatctcttcatgatatatcaatggaactttctcgcgccggtcttcgatttcgacggtccaatcttggaacatcaccatctgcacaagaacaatcccctgccgttcatagagtttgcttgtgaggaggagtcaactatcatcaaaggtggatttggcgaggtaaggagggcaaggatacatttagcgcatcagaaacaaacgttgaaaatagctgaagtcgccgtgaagcgcttgatgtctaataatagggacatgttcaacagagaagtcgagatcctgaagctttctcgtggcgacaataatccgcatcttgtccatctcttggcaacatacttcgatggagagcattataacttgatctttccgtgggcaaatgggaaccttagagatctgtggaaaagcgaccgtctacctgaacatacctacgataaaattttgtgggttgccgaacagtgctctggcattgcagaggcattacgcaaaattcactatgacgattttccaaacggaaatcacgatcgctcaggaatacccccttataaaggcagacatggcgatatcaaacctgaaaatattctctgcttcgatcgactccttgttctctctgatttcggcttgtctcgacgccacaaactcatttcagtcgggcataaatattgtggaatgttcccagtatcaaggacttatcggggaccagaatacgacttaaacggggaaatatcaccattatgggatatctggacccttggctgtgtctatcttgagtttatcatatggtatctgcaagggtgggatgactgtaacgagttctcacagcagcggattcgatgcgatcgtcaaattgacgtcgatgaggacaacttcttccatgtttcgcacgacgaactgacagcgtccagagcttatcgcaaactacctgtgatcaagcgtatcagagatcttcataagcatcccgactgcacacaatttatacatgaatttctggatctcgtttgtaagagaatgattcgcattgatccacacaagcgtgaggactgcgttgccattgcggcacagatgaaagccatgtttgaaaggtgtcggatcgatgaggcatactgcatggaaaagtctcgtaagtcttttgtgatgagattgacgaatgagtcagacaagataacattgttcaaacgattcttgaactttcttaaacggaaacgagcgaagtaatagctacgtgaatagaaggcgggcatagcggaaggagtaattttcacaatttcgtcaatatttcttgaatctagccagaaagcgggggaatttttatcaactaccaaagcaagaaataatactttcgtatggctttcaagatctccttatctgccgcctcacccactgcgatgctcgagatccccgttgcggtcctgtcgtctggtgcattgaagccgggagattgttcagtagttgttgtatttgcgacgacacatgctccgactttagtctttgtatacgtgcgatataagtcatatgacgtatcaattcgctgcagtatcgaaaataagatcctttgttggaagcccttttcaaccatgtctcgaacgagtgccttc

SEQ ID NO: 20069 - DNA, 549 bp, Muscodor strobelii
  misc_feature: SGI cDNA ID NO. 566762
  misc_feature: Encodes the peptide sequence at SEQ ID NO 20070
atggactctctcgtgagcgagatttcggcattaatgcaagaaaccgcaacagatggccctattctccctattggtgatctagaaagattctgggctgatcacaacaggctcgaaaacacgcttcgacttgggcccactcgtactcagattgtccaacggaactttatcagaactgtttctcttcttgcttacgctggtcttgggccagatgatttggcgtacgaaatggacaagttaatcgagtcccgagagatctcagatgaaactttgcatgaagccaaccctactacactttccggtattcttggaaaagagtatcgcccgtaccttacacacgtcatcaactttttcacggcgcctgttctgatagaaggcaaagatgtattcttgaaactatctcagaagaaacccctgattggaaatgattatgtggatagcggaatgaatggtgatatcactggtcatcttatcgcagatgggcattatttaagccgaacagaggtcagttcatccgattactctatcaaagccaggcactttggcatctaa

SEQ ID NO: 20070 - protein, 182 aa, Muscodor strobelii
  misc_feature: SGI Peptide ID NO. 566762
MDSLVSEISALMQETATDGPILPIGDLERFWADHNRLENTLRLGPTRTQIVQRNFIRTVSLLAYAGLGPDDLAYEMDKLIESREISDETLHEANPTTLSGILGKEYRPYLTHVINFFTAPVLIEGKDVFLKLSQKKPLIGNDYVDSGMNGDITGHLIADGHYLSRTEVSSSDYSIKARHFGI

SEQ ID NO: 20071 - DNA, 1650 bp, Muscodor strobelii
  misc_feature: SGI cDNA ID NO. 566763
  misc_feature: Elevated expression when VOC is produced
  misc_feature: Encodes the peptide sequence at SEQ ID NO 20072
atgacggacagtccagtggcgcccctgccaaccctgtggcatctggtctaccgagttctaccttatcacaattcgcagaccgccctcgtttttgcatctaccgctaccgtctcccaacccatcccgtcacggtcagatgtatgcctcatgttcagccaacctcgccagcccgaaaatgccgcatcctgtgcacgggtgagcgatcctctgcctggccacggctcgctgcctgacgcccgccccgagccacgtccagagtccctgccactgcccatcgctcaccccagcgccaccacctctcgcactccctctgccaccactctcgccagtcctggtgacaatgccagtcccggcaacaatgccagcatctcagaccatggcaccgctgccgcgacagacgctgcacccgctcctttccggtcccatgctggcccctcttctgttcccttaccctcctccgtgactgaagacgtacctctcgctgctctctctgctgctgccgccatctcgcccgctgtttcaggaacccctgtcttctcttctccctcttctttaccctctgtcctcccctctacactcccaactgtagtccccccttcggttattgccgctagcaatgggtctgtcgatcatgataataaaagaccgaggcctcctcttcctctgtcaagatcaaatggcccttcattgctgacccaggctcttgcctctgcacgtggcaagcccccgactaccacgttgcagactgaccagcgccgcctcgacaacaagacctcgacgccgcccaatgatcaattaagatccctccagcttgccaatgatcccgacaatcctgaagaactgccaatcctcaacacgcaacatgcctcctcggcttctggccatggcggctcactgacgccaactgctctgccaagacggatcgatcctcaccgcatggccaccgccccgactgtgcccaggtcgatctacactggcgaggcccgcgacgttgccatgtctgttgccatgcctgccatgacagagcttgccgcaccctctgctcgtggctactatccaaaccccttcacaacccccctcaccggcagggcaagaggaaggtccttggggcgcaccgagaaagaggccggcgtgttcatgttcaaccagagcggcttgcattctgataatatcggcgacacggcttttcggcgtgccaacagctcgatctctatccatgacgaatccgacatagatgcccacccacgcgctcagtaccgtgcatggagagccgacgaaaatatgtccatggggccagagaaggtatggtcaattggcactaacgatgtcgctggacaccaggatggccaagtcgagaagtccattgccgaggttctgtccggtatggagccgacccgcagtcgtaaggcaagtcacagccttcgattcttcaaagaaggtcttccggtggataagggcaaacggaaagactctaagtccacccaacagcgtgaaaagcagccagtgccaaagcctgtgcgggaagatgggcagcaaaaaactcccacagttgaagaggaggctgttcatgagacgcagtcgcctggacacccggcccagacctcgaaacagctgctgcgagacacggctacgccagcaagcacgagcgtt

SEQ ID NO: 20072 - protein, 550 aa, Muscodor strobelii
  misc_feature: SGI Peptide ID NO. 566763
  misc_feature (214)..(501): NCBI GI: 116200143 Blast Desc: CHGG_08227 [Chaetomium globosum CBS 148.51] gi|88179506|gb|EAQ86974.1| CHGG_08227 [Chaetomium globosum CBS 148.51]
  misc_feature (214)..(499): NCBI GI: 171690064 Blast Desc: protein product [Podospora anserina] gi|170944987|emb|CAP71098.1| protein product [Podospora anserina]
  misc_feature (423)..(492): NCBI GI: 85081967 Blast Desc: NCU03546 [Neurospora crassa OR74A] gi|18376053|emb|CAD21059.1| related to transcription factor KCS1 [Neurospora crassa] gi|28917903|gb|EAA27589.1| [Neurospora crassa
  misc_feature (416)..(491): NCBI GI: 145606308 Blast Desc: MGG_11917 [Magnaporthe grisea 70-15] gi|145014006|gb|EDJ98647.1| MGG_11917 [Magnaporthe grisea 70-15]
  misc_feature (354)..(493): NCBI GI: 154314074 Blast Desc: BC1G_04980 [Botryotinia fuckeliana B05.10] gi|150849126|gb|EDN24319.1| BC1G_04980 [Botryotinia fuckeliana B05.10]
  misc_feature (363)..(493): NCBI GI: 156060653 Blast Desc: SS1G_02469 [Sclerotinia sclerotiorum 1980] gi|154699873|gb|EDN99611.1| SS1G_02469 [Sclerotinia sclerotiorum 1980]
  misc_feature (407)..(492): NCBI GI: 261357216 Blast Desc: inositol hexakisphosphate kinase [Verticillium albo-atrum VaMs.102]
  misc_feature (428)..(494): NCBI GI: 256730516 Blast Desc: NECHADRAFT_29709 [Nectria haematococca mpVI 77-13-4]
  misc_feature (422)..(497): NCBI GI: 46109530 Blast Desc: FG01647.1 [Gibberella zeae PH-1]
  misc_feature: Useful for introducing or modulating the production of volatile compounds
MTDSPVAPLPTLWHLVYRVLPYHNSQTALVFASTATVSQPIPSRSDVCLMFSQPRQPENAASCARVSDPLPGHGSLPDARPEPRPESLPLPIAHPSATTSRTPSATTLASPGDNASPGNNASISDHGTAAATDAAPAPFRSHAGPSSVPLPSSVTEDVPLAALSAAAAISPAVSGTPVFSSPSSLPSVLPSTLPTVVPPSVIAASNGSVDHDNKRPRPPLPLSRSNGPSLLTQALASARGKPPTTTLQTDQRRLDNKTSTPPNDQLRSLQLANDPDNPEELPILNTQHASSASGHGGSLTPTALPRRIDPHRMATAPTVPRSIYTGEARDVAMSVAMPAMTELAAPSARGYYPNPFTTPLTGRARGRSLGRTEKEAGVFMFNQSGLHSDNIGDTAFRRANSSISIHDESDIDAHPRAQYRAWRADENMSMGPEKVWSIGTNDVAGHQDGQVEKSIAEVLSGMEPTRSRKASHSLRFFKEGLPVDKGKRKDSKSTQQREKQPVPKPVREDGQQKTPTVEEEAVHETQSPGHPAQTSKQLLRDTATPASTSV

SEQ ID NO: 20073 - DNA, 1569 bp, Muscodor strobelii
  misc_feature: SGI EST ID NO. CUFF.46930.0
  misc_feature: Variant of the nucleotide sequence at SEQ ID NO 20071
ccgccctcgtttttgcatctaccgctaccgtctcccaacccatcccgtcacggtcagatgtatgcctcatgttcagccaacctcgccagcccgaaaatgccgcatcctgtgcacgggtgagcgatcctctgcctggccacggctcgctgcctgacgcccgccccgagccacgtccagagtccctgccactgcccatcgctcaccccagcgccaccacctctcgcactccctctgccaccactctcgccagtcctggtgacaatgccagtcccggcaacaatgccagcatctcagaccatggcaccgctgccgcgacagacgctgcacccgctcctttccggtcccatgctggcccctcttctgttcccttaccctcctccgtgactgaagacgtacctctcgctgctctctctgctgctgccgccatctcgcccgctgtttcaggaacccctgtcttctcttctccctcttctttaccctctgtcctcccctctacactcccaactgtagtccccccttcggttattgccgctagcaatgggtctgtcgatcatgataataaaagaccgaggcctcctcttcctctgtcaagatcaaatggcccttcattgctgacccaggctcttgcctctgcacgtggcaagcccccgactaccacgttgcagactgaccagcgccgcctcgacaacaagacctcgacgccgcccaatgatcaattaagatccctccagcttgccaatgatcccgacaatcctgaagaactgccaatcctcaacacgcaacatgcctcctcggcttctggccatggcggctcactgacgccaactgctctgccaagacggatcgatcctcaccgcatggccaccgccccgactgtgcccaggtcgatctacactggcgaggcccgcgacgttgccatgtctgttgccatgcctgccatgacagagcttgccgcaccctctgctcgtggctactatccaaaccccttcacaacccccctcaccggcagggcaagaggaaggtccttggggcgcaccgagaaagaggccggcgtgttcatgttcaaccagagcggcttgcattctgataatatcggcgacacggcttttcggcgtgccaacagctcgatctctatccatgacgaatccgacatagatgcccacccacgcgctcagtaccgtgcatggagagccgacgaaaatatgtccatggggccagagaaggtatggtcaattggcactaacgatgtcgctggacaccaggatggccaagtcgagaagtccattgccgaggttctgtccggtatggagccgacccgcagtcgtaaggcaagtcacagccttcgattcttcaaagaaggtcttccggtggataagggcaaacggaaagactctaagtccacccaacagcgtgaaaagcagccagtgccaaagcctgtgcgggaagatgggcagcaaaaaactcccacagttgaagaggaggctgttcatgagacgcagtcgcctggacacccggcccagacctcgaaacagctgctgcgagacacggctacgccagcaagcacgagcg

SEQ ID NO: 20074 - DNA, 2850 bp, Muscodor strobelii
  misc_feature: SGI cDNA ID NO. 566764
  misc_feature: Encodes the peptide sequence at SEQ ID NO 20075
atgccaccaaactcaaagcctccatctgaggcaccctcgaggtcatcatctacaaagcccaaatcgtcaaacaagagaaaagaccaaagtgaggacaacggatcgtcacaagaccaccgcagagcaaagaggatgaaacccatgcacgaggtccgcgctattgcgacccaagatccggccgtgaataatggcgagctcaacgtccaatcgttcgtcaattcgatggcctttgagattaatgctatggatgagagtatgcgccgtacgcgaaactttcacacaagtcgagcttttcagggtgttcccttcaccatgaggcgcaggactgcagcccacaactacaagaggattccaaagcggctccacagacgagcgcagagggaaatggcccaggacaacacacccacagtgacctcgaggacaaggaagccgaggaccgcgaaatctaggttacgggcagaaacagcacggaagcttggcatactagtgaaaaaggagcgacgggcggcacagaagaaagcacagggaacgtccgcagaaggcaagacgaagagagagggcccaaaaatacgtcaaaatatgttgaacgacccgccagtcacctcgatcaaacatcgcaagaggcagcgtagcaagatctggcttcctacccatctatggcatgccaagagagctagaatgtcaataccttctgaacccttatgggggttctctctgccactcactaccacacagaagaattaccggccgactcatcgcgtacagtggcaaaagggcgcaatggcctgggatatgagctatatgagtaccattggcctgtttggaaaagagagcaatgtccaaggcgtgctcaaaggcgtaggtctgacgcaagactcgctgtggagtgacagaggaaagcgttggagatctggagctgtacactggactggtattctcagtcgaaagatcaagaatgacacacatttcatcggtcctgccacagtaatatggaatcctgaagcagaacgtgctgaaggggacgataggccctcgagtagacaggtcttcatacgcatccacccgtccgcgttcttggagacattcaacgaactgctcaatttgaccaaagcctacaagccccacccttatctacaagacctgagacatgagatcgggagtatcgacctcactggacctggcgccaccgaggcactgcttggagttctgcaagcctccgaatctgactcccaagcagcccacgtattgaggctcaaatctctcttgggacttaaagatccatcatcactccctctcggagccttactcgccttctcagtcgtcgatccgcgcctcgcgtatcctccgcgaaaggtcgaattatcaccaggtagcgcaaatgatattcagaagacactcatagacgctgtctcttccttccgccaagacggacaactgaagccttaccgattgttcgacagagacgcccgctacaatgcctccaagctcccatcacagaaatccatcaatcgacgacgtgcaaagacggctccaggcgccgccctagagccaagcgctgtagacccaccaatcccgatcatgcttctcgccacccgcaactcgcaagatacgccgacgccagggagttggaccatcatgctcccatggaaatgtgtaagtacgatctggctcagcctgttacacttcccactgtctactggtggcaatccggcattcggcgggatcgacgaaatacgacagctcgaattcgagcgcagacagctctggttcccgggcgattatcttggcacagatgcaggcaatgcctgggagcaggctgagagactcaagagcgaaaagaagtggatgaggagaccgaaaggcaagcggatcgtatgggataacgttgatctcggagctggacggagaggagagatcggatgtggtactggctgcgattttgcggcgttgttcgagatacaacgggcaagtcccttagacactagagacgaaagcagcaacgaaagagaagccgaacagaggaaaaaaaacgagaatgcagaagacacagagatgctcgacagcgagcctccacaaaaacaagcagaaccaaagcccattcactcaaaagtcgtcgaaccaacatacatcccgaaagctatcttcacgaaatatctcacagacaccaaatccggaccgttaccgccacactcagtacttacagtgaaaataagaatgcaaggccgcggtatcgtgtcgaactgtgctcggatataccgtctgccgtcttcgactccgggcagcacaaccacaccatcacttacagccgccaaagccaatgaacatcccatggaaaccccaacaaaccgggaattttcggaaacggtccctctaccctcgccaacaaagcccaattccgtgggaatactcccgtcaggtctccgctcccaatggctcgcacagcgacagatcaaaccgcaaaagaagggttttcacaactccaactccaaacgcaatgccaaggacaacagcaagccaacgccccacgaacgacaacacgccctggccctatccctactctccacacctcctgataccaacatacccacctccacgcaaacaaacaaagagtctatgaacggacacccactttgtcccagcgagaacgacctcataggctttgtgacaacgggatctttcagcctgcgtgaaggcatcggggagggaatcggttctatcagtgccgttatggcgaaggaagagctggagagatataatggcaagggcatgaagaagagtgaagaaaggctgtgcgttgtgaggaatgctggtcaggctattgggtggcttgcgcgttgggaacttgtgtga

SEQ ID NO: 20075 - protein, 949 aa, Muscodor strobelii
  misc_feature: SGI Peptide ID NO. 566764
  misc_feature (71)..(276): Pfam Id: PF06978 Pfam Desc: Ribonucleases P/MRP protein subunit POP1
  misc_feature (542)..(647): Pfam Id: PF08170 Pfam Desc: POPLD (NUC188) domain
  misc_feature (208)..(276): Pfam Id: PF06978 Pfam Desc: Ribonucleases P/MRP protein subunit POP1
  misc_feature (71)..(129): Pfam Id: PF06978 Pfam Desc: Ribonucleases P/MRP protein subunit POP1
  misc_feature (542)..(624): Pfam Id: PF08170 Pfam Desc: POPLD (NUC188) domain
  misc_feature (40)..(949): NCBI GI: 116193301 Blast Desc: CHGG_06368 [Chaetomium globosum CBS 148.51] gi|88182281|gb|EAQ89749.1| CHGG_06368 [Chaetomium globosum CBS 148.51]
  misc_feature (14)..(949): NCBI GI: 85074925 Blast Desc: NCU00690 [Neurospora crassa OR74A] gi|28927643|gb|EAA36594.1| conserved [Neurospora crassa OR74A]
  misc_feature (25)..(949): NCBI GI: 171684823 Blast Desc: protein product [Podospora anserina] gi|170942372|emb|CAP68024.1| protein product [Podospora anserina]
  misc_feature (13)..(908): NCBI GI: 256733648 Blast Desc: NECHADRAFT_92057 [Nectria haematococca mpVI 77-13-4]
  misc_feature (13)..(917): NCBI GI: 46128529 Blast Desc: FG08642.1 [Gibberella zeae PH-1]
  misc_feature (17)..(949): NCBI GI: 156055826 Blast Desc: SS1G_05265 [Sclerotinia sclerotiorum 1980] gi|154703049|gb|EDO02788.1| SS1G_05265 [Sclerotinia sclerotiorum 1980]
  misc_feature (105)..(947): NCBI GI: 154289767 Blast Desc: BC1G_15955 [Botryotinia fuckeliana B05.10] gi|150848774|gb|EDN23967.1| BC1G_15955 [Botryotinia fuckeliana B05.10]
  misc_feature (43)..(949): NCBI GI: 242781367 Blast Desc: ribonuclease P complex subunit Pop1, [Talaromyces stipitatus ATCC 10500] gi|218719933|gb|EED19352.1| ribonuclease P complex subunit Pop1, [Talaromyces stipitatus ATCC 10500]
  misc_feature (34)..(949): NCBI GI: 119467216 Blast Desc: ribonuclease P complex subunit Pop1, [Neosartorya fischeri NRRL 181] gi|119405566|gb|EAW15517.1| ribonuclease P complex subunit Pop1, [Neosartorya fischeri NRRL 181]
  misc_feature (20)..(949): NCBI GI: 169778811 Blast Desc: [Aspergillus oryzae RIB40] gi|83772609|dbj|BAE62737.1| protein product [Aspergillus oryzae]
  misc_feature (42)..(664): SWISSPROT Homolog: EC 3.1.26.5 Ribonuclease P
MPPNSKPPSEAPSRSSSTKPKSSNKRKDQSEDNGSSQDHRRAKRMKPMHEVRAIATQDPAVNNGELNVQSFVNSMAFEINAMDESMRRTRNFHTSRAFQGVPFTMRRRTAAHNYKRIPKRLHRRAQREMAQDNTPTVTSRTRKPRTAKSRLRAETARKLGILVKKERRAAQKKAQGTSAEGKTKREGPKIRQNMLNDPPVTSIKHRKRQRSKIWLPTHLWHAKRARMSIPSEPLWGFSLPLTTTQKNYRPTHRVQWQKGAMAWDMSYMSTIGLFGKESNVQGVLKGVGLTQDSLWSDRGKRWRSGAVHWTGILSRKIKNDTHFIGPATVIWNPEAERAEGDDRPSSRQVFIRIHPSAFLETFNELLNLTKAYKPHPYLQDLRHEIGSIDLTGPGATEALLGVLQASESDSQAAHVLRLKSLLGLKDPSSLPLGALLAFSVVDPRLAYPPRKVELSPGSANDIQKTLIDAVSSFRQDGQLKPYRLFDRDARYNASKLPSQKSINRRRAKTAPGAALEPSAVDPPIPIMLLATRNSQDTPTPGSWTIMLPWKCVSTIWLSLLHFPLSTGGNPAFGGIDEIRQLEFERRQLWFPGDYLGTDAGNAWEQAERLKSEKKWMRRPKGKRIVWDNVDLGAGRRGEIGCGTGCDFAALFEIQRASPLDTRDESSNEREAEQRKKNENAEDTEMLDSEPPQKQAEPKPIHSKVVEPTYIPKAIFTKYLTDTKSGPLPPHSVLTVKIRMQGRGIVSNCARIYRLPSSTPGSTTTPSLTAAKANEHPMETPTNREFSETVPLPSPTKPNSVGILPSGLRSQWLAQRQIKPQKKGFHNSNSKRNAKDNSKPTPHERQHALALSLLSTPPDTNIPTSTQTNKESMNGHPLCPSENDLIGFVTTGSFSLREGIGEGIGSISAVMAKEELERYNGKGMKKSEERLCVVRNAGQAIGWLARWELV

SEQ ID NO: 20076 - DNA, 3670 bp, Muscodor strobelii
  misc_feature: SGI EST ID NO. CUFF.46933.0
  misc_feature: Variant of the nucleotide sequence at SEQ ID NO 20074
attacttgcagccgatcactagatttctggttaaggtttggtttcgagtcctgcagaaaacctgagcgaccgcccgcgaacctctgtggggggcagataagacattttacgattgggtgaaatgagacctcgaattcgaaccttgaatgaagacattcgccttgtgtggtatggacaatgctgacaagaagcctctgtttagcaacccatgtgcgcacatgatttatgacaatgaatttgtcgcatattgattgattctgcttgaaacacgcgcctaatcgcgcgaaaattaacaatttcgcaggtctgatcaattggattatcttaggaacgtggatggaaattcaagtacctatgcacttgtggcttgggccacctttttttcacctcaccagccacattcgcaatcaccccaaaacacgacatgtacctaaatgaacttggaagggatgttatcacgtgaaaactttgcggactggttgcaaacacagttcactagatgatcgtctggaagtcacgtcggccatactagggagggagtcccaggggacgcatcgccacagtgagaggtcctaccatgccaccaaactcaaagcctccatctgaggcaccctcgaggtcatcatctacaaagcccaaatcgtcaaacaagagaaaagaccaaagtgaggacaacggatcgtcacaagaccaccgcagagcaaagaggatgaaacccatgcacgaggtccgcgctattgcgacccaagatccggccgtgaataatggcgagctcaacgtccaatcgttcgtcaattcgatggcctttgagattaatgctatggatgagagtatgcgccgtacgcgaaactttcacacaagtcgagcttttcagggtgttcccttcaccatgaggcgcaggactgcagcccacaactacaagaggattccaaagcggctccacagacgagcgcagagggaaatggcccaggacaacacacccacagtgacctcgaggacaaggaagccgaggaccgcgaaatctaggttacgggcagaaacagcacggaagcttggcatactagtgaaaaaggagcgacgggcggcacagaagaaagcacagggaacgtccgcagaaggcaagacgaagagagagggcccaaaaatacgtcaaaatatgttgaacgacccgccagtcacctcgatcaaacatcgcaagaggcagcgtagcaagatctggcttcctacccatctatggcatgccaagagagctagaatgtcaataccttctgaacccttatgggggttctctctgccactcactaccacacagaagaattaccggccgactcatcgcgtacagtggcaaaagggcgcaatggcctgggatatgagctatatgagtaccattggcctgtttggaaaagagagcaatgtccaaggcgtgctcaaaggcgtaggtctgacgcaagactcgctgtggagtgacagaggaaagcgttggagatctggagctgtacactggactggtattctcagtcgaaagatcaagaatgacacacatttcatcggtcctgccacagtaatatggaatcctgaagcagaacgtgctgaaggggacgataggccctcgagtagacaggtcttcatacgcatccacccgtccgcgttcttggagacattcaacgaactgctcaatttgaccaaagcctacaagccccacccttatctacaagacctgagacatgagatcgggagtatcgacctcactggacctggcgccaccgaggcactgcttggagttctgcaagcctccgaatctgactcccaagcagcccacgtattgaggctcaaatctctcttgggacttaaagatccatcatcactccctctcggagccttactcgccttctcagtcgtcgatccgcgcctcgcgtatcctccgcgaaaggtcgaattatcaccaggtagcgcaaatgatattcagaagacactcatagacgctgtctcttccttccgccaagacggacaactgaagccttaccgattgttcgacagagacgcccgctacaatgcctccaagctcccatcacagaaatccatcaatcgacgacgtgcaaagacggctccaggcgccgccctagagccaagcgctgtagacccaccaatcccgatcatgcttctcgccacccgcaactcgcaagatacgccgacgccagggagttggaccatcatgctcccatggaaatgtgtaagtacgatctggctcagcctgttacacttcccactgtctactggtggcaatccggcattcggcgggatcgacgaaatacgacagctcgaattcgagcgcagacagctctggttcccgggcgattatcttggcacagatgcaggcaatgcctgggagcaggctgagagactcaagagcgaaaagaagtggatgaggagaccgaaaggcaagcggatcgtatgggataacgttgatctcggagctggacggagaggagagatcggatgtggtactggctgcgattttgcggcgttgttcgagatacaacgggcaagtcccttagacactagagacgaaagcagcaacgaaagagaagccgaacagaggaaaaaaaacgagaatgcagaagacacagagatgctcgacagcgagcctccacaaaaacaagcagaaccaaagcccattcactcaaaagtcgtcgaaccaacatacatcccgaaagctatcttcacgaaatatctcacagacaccaaatccggaccgttaccgccacactcagtacttacagtgaaaataagaatgcaaggccgcggtatcgtgtcgaactgtgctcggatataccgtctgccgtcttcgactccgggcagcacaaccacaccatcacttacagccgccaaagccaatgaacatcccatggaaaccccaacaaaccgggaattttcggaaacggtccctctaccctcgccaacaaagcccaattccgtgggaatactcccgtcaggtctccgctcccaatggctcgcacagcgacagatcaaaccgcaaaagaagggttttcacaactccaactccaaacgcaatgccaaggacaacagcaagccaacgccccacgaacgacaacacgccctggccctatccctactctccacacctcctgataccaacatacccacctccacgcaaacaaacaaagagtctatgaacggacacccactttgtcccagcgagaacgacctcataggctttgtgacaacgggatctttcagcctgcgtgaaggcatcggggagggaatcggttctatcagtgccgttatggcgaaggaagagctggagagatataatggcaagggcatgaagaagagtgaagaaaggctgtgcgttgtgaggaatgctggtcaggctattgggtggcttgcgcgttgggaacttgtgtgaatatgcctaatggaagaaagatggcgcgaggggctagtattggctgtgctcctgtgattggagaagaactgagattgagagacgatgaaagtagagaattgtcgaggtgatggatgttgaatgaagtgggttcttccgtgtcctcgtacaacctcacgccgctacatcaacagctccgaacttagtcaattatcaagacccttgtagcgaataaacaataagattataatatttcaacttggc

SEQ ID NO: 20077 - DNA, 2112 bp, Muscodor strobelii
  misc_feature: SGI cDNA ID NO. 566765
  misc_feature: Encodes the peptide sequence at SEQ ID NO 20078
atggcccaaccccagagcactctcaggaccacaggtcaaaagtataaagctccccgtcctgatgctggtgattccggccgcaacatcaagcgcaggaagacgacaaccaacgatgagccagcacagccaagtgagcctgagaagccgcctccgtcgagtcttcctcctgtctctgcccggaaccatagtgcaatggcagacgcagtgtatacatggtgggacaagcatgagggtgggctttataacaaggacggtgttgccaaaggcatgctcctctgcggacgaacttctcgaagagaccggattctgtcccaggtagtcatcaccacagttggcggcgatctaaagaaggctactgatggcagcatggttcgtgatgcagaccaagatgaacaagcttcgtctttcatggttctcaaagcggcgcaggacgcagaacggccgatcggtcttgttgctggctcaaaaaaagtaggagacagcttgatcaatgatctcttggccgtcgccccgacgtacccatacaatgctatggactggttccagatcacctatatgtggcctgagtatgaatgccgagcgaatggcgagctcggcttcaagcagtggatgatgcggctcgagagaatcgatcttgaaagtcctgcatggtggataccttctgacaacactgccgacagtcaatcatctggaaaactcgtctgctcgagcgagagatgcattacgtgcaagaatacgagcaagcacatatatacggctggttggtgctgtttggagagatcatgctccaaattccagcactttgctgatcccaatgtcaatcttctcactctcgagtacaatgcagagttcctaggtgaacgtacaccttgggctggtgacaaacctgggcctcttgtcccggaactgccgcctcaagttccaccagctggaaagtatggctctgagaaactgtgcagaaaagccattgtctgcccaagctgccacgttgccagccgtcgtgtcagctggaatggttaccaatgtgagggttcgtgcgactttgaactccctctcactgttctcccagttcctatggacaagatcaatcgagagaacaagttgttcgatacccgcaataaaggcttacctggccaaatcaagagcggcgacatcgagtctttcacctcagacaagatccctggctacactctcgacgtctactatctcccccagaaagcagtgacaaccacaaaacgccagaagcgcaatgcaacgcacaaggtgcaggcagcgtccaaacaaaaggacggtaagcccgaaggaagcaaagcatttttaggctatgtagttcacttgcgcccgcatgagtcgaccaagacgcgtcaaggtggaattgatgagcattatcaagccatcgataagcaggttggcaacggcgttatcaaggtcaatcgctatcccgcgcgctgtgcaggttcacacaaggaaggactcactagccagttttccaccaacattggtgcaccatacaagtttggtgttgtggtcgacaactccacctcattggaggacgcgcaagacacgattctggagggcatgtctcgcctgacctggttgtctaaggctgtcatcgacgttgtggaagaggatatcgtgacgaaggcccgcgatgtcgatcgtgagtctatcgctgaccaacacgagcaattcaatgaagcactcttccttgcctatatggagaaaacacagatcggataccacgatgatggcgagacgcaacttgggcccatcgttaccacagcttcctatggatcgccctccatcatgcatttcaaagcgaaggaagacaaatcaccttgcttgaccttgaacctacagcatggcgacattgtggtcatgaatggaacagacattcatgcattttacctacatagtgtcgttgttgagaaattctacaagaagactgaagaacaggacagatcagtacgccgatatgcattaacgtgccgctggattcgtcctgagctgcttgacaacgatgagcagcgcagatggggcgttaccaaagagggttcgccagctttcaaggcgatcaatagttaccacggcgaaccaacaggccagatttaa

SEQ ID NO: 20078 - protein, 703 aa, Muscodor strobelii
  misc_feature: SGI Peptide ID NO. 566765
  misc_feature (48)..(698): NCBI GI: 154305295 Blast Desc: BC1G_08942 [Botryotinia fuckeliana B05.10] gi|150853684|gb|EDN28876.1| BC1G_08942 [Botryotinia fuckeliana B05.10]
  misc_feature (49)..(689): NCBI GI: 116193337 Blast Desc: CHGG_06386 [Chaetomium globosum CBS 148.51] gi|88182299|gb|EAQ89767.1| CHGG_06386 [Chaetomium globosum CBS 148.51]
  misc_feature (57)..(697): NCBI GI: 171684467 Blast Desc: protein product [Podospora anserina] gi|170942194|emb|CAP67846.1| protein product [Podospora anserina]
  misc_feature (51)..(645): NCBI GI: 261353191 Blast Desc: conserved [Verticillium albo-atrum VaMs.102]
  misc_feature (44)..(608): NCBI GI: 67526987 Blast Desc: AN3951.2 [Aspergillus nidulans FGSC A4] gi|40740070|gb|EAA59260.1| [Aspergillus nidulans FGSC A4] gi|259481473|tpe|CBF75024.1| TPA: conserved [Aspergillus nidulans
  misc_feature (29)..(676): NCBI GI: 119182137 Blast Desc: CIMG_06114 [Coccidioides immitis RS]
  misc_feature (29)..(672): NCBI GI: 240109170 Blast Desc: CPC735_026750 [Coccidioides posadasii C735 delta SOWgp]
  misc_feature (18)..(675): NCBI GI: 145242116 Blast Desc: An09g03880 [Aspergillus niger] gi|134078249|emb|CAK96830.1| protein product [Aspergillus niger]
  misc_feature (55)..(678): NCBI GI: 115433188 Blast Desc: conserved [Aspergillus terreus NIH2624] gi|114189583|gb|EAU31283.1| conserved [Aspergillus terreus NIH2624]
  misc_feature (50)..(608): NCBI GI: 255949290 Blast Desc: Pc22g14940 [Penicillium chrysogenum Wisconsin 54-1255] gi|211592429|emb|CAP98782.1| Pc22g14940 [Penicillium chrysogenum Wisconsin 54-1255]
MAQPQSTLRTTGQKYKAPRPDAGDSGRNIKRRKTTTNDEPAQPSEPEKPPPSSLPPVSARNHSAMADAVYTWWDKHEGGLYNKDGVAKGMLLCGRTSRRDRILSQVVITTVGGDLKKATDGSMVRDADQDEQASSFMVLKAAQDAERPIGLVAGSKKVGDSLINDLLAVAPTYPYNAMDWFQITYMWPEYECRANGELGFKQWMMRLERIDLESPAWWIPSDNTADSQSSGKLVCSSERCITCKNTSKHIYTAGWCCLERSCSKFQHFADPNVNLLTLEYNAEFLGERTPWAGDKPGPLVPELPPQVPPAGKYGSEKLCRKAIVCPSCHVASRRVSWNGYQCEGSCDFELPLTVLPVPMDKINRENKLFDTRNKGLPGQIKSGDIESFTSDKIPGYTLDVYYLPQKAVTTTKRQKRNATHKVQAASKQKDGKPEGSKAFLGYVVHLRPHESTKTRQGGIDEHYQAIDKQVGNGVIKVNRYPARCAGSHKEGLTSQFSTNIGAPYKFGVVVDNSTSLEDAQDTILEGMSRLTWLSKAVIDVVEEDIVTKARDVDRESIADQHEQFNEALFLAYMEKTQIGYHDDGETQLGPIVTTASYGSPSIMHFKAKEDKSPCLTLNLQHGDIVVMNGTDIHAFYLHSVVVEKFYKKTEEQDRSVRRYALTCRWIRPELLDNDEQRRWGVTKEGSPAFKAINSYHGEPTGQI

SEQ ID NO: 20079 - DNA, 1491 bp, Muscodor strobelii
  misc_feature: SGI cDNA ID NO. 566766
  misc_feature: Elevated expression when VOC is produced
  misc_feature: Encodes the peptide sequence at SEQ ID NO 20080
atgtatttttcattttcgcaattggctcttttcgcatccacttgcgtccccttgtacctaatcgcgcaatacctatatggcttgtactttgatccccttgcgaaatatccagggccgagaacagcagcattaacagatgcttggtacgctttcgcctgggccaggggcaggtaccctctggtcatgtatgccctgcataagaaatatggtgatgtggttcgcatcggcccaaacaaactgtcttttgctacggtccaagcccatcacgatatctatggatataagcctctctttcagaagagtgactggtattctggagggcgtgcaggcggtataatcttcgaacgggacccagtagtgcacggtcatataagaagggccttgatcccaggttttagcactcgacaactcagggagaagttcgaaggacccgcaatagagttattggagatggttcctaggttgatcgaacaaggtgaaaaggagggcatgaatgtctgtcggcttttcacgatgatcagcttcgacatcattgggctggtcacactaggaaactcttttcagtgtcttgaaacgaacacagtacacccacttgcaggcctcatgcacacgggtgcatttgccgcttccctagtgccactccgtcggcatctacgggtattcaaccaggcgatgaactataagttcaaaggtaaagatccggacatgctgcgagctcgacatgtggggatcctcaaggctgagattgacaatcgaattgcgcggggttctatcgatcaaggagacggcattatctccaaagtgttgcgagaagaaagtcttgaaaataagtatattctgtccaacgctattaacctgctgattgcaggcagcgaaaccatcgcaactggcctcagcacagctgtcttcctgttgttgcagaaccaaagatgccttgaagctcttcagtccgagattcgaggggcgttcgaaaccgaaaaggatatcaccggggactcgacggcgaagctaccatatctaaaagccgttatcgacgaaacacttcggttaataccgccctctccttttggtcaaagtaggaccagccctggtgcttcagtcgatggtcattatatccctgccggagttgatgtctccgtggatgtctggtgcctccatcatgatcgtcgatattggacggaagttgagaaatttgctccggaaaggtggctttcggagaatgatgggttcgttgacaacgagctcgcgaatatcgattttggagataacaaagaggcatttcagccgttctctgaaggtcctcgggcatgtttcggtatgggacttgcgtactttgaaatgagattgatcctggcgaggcttgtttggcgttacaactggaaaccggaccctcgcagccgcagttggttagcagggcttaggttggaattcttctggcgtaaacctgaactttttgtacacttcacccctcggcaagatgcggcccactga

SEQ ID NO: 20080 - protein, 496 aa, Muscodor strobelii
  misc_feature: SGI Peptide ID NO. 566766
  misc_feature (37)..(488): Pfam Id: PF00067 Pfam Desc: Cytochrome P450
  misc_feature (270)..(488): Pfam Id: PF00067 Pfam Desc: Cytochrome P450
  misc_feature (26)..(461): NCBI GI: 46138361 Blast Desc: FG10695.1 [Gibberella zeae PH-1]
  misc_feature (42)..(490): NCBI GI: 154296440 Blast Desc: BC1G_13046 [Botryotinia fuckeliana B05.10] gi|150843407|gb|EDN18600.1| BC1G_13046 [Botryotinia fuckeliana B05.10]
  misc_feature (25)..(489): NCBI GI: 154289577 Blast Desc: BC1G_16084 [Botryotinia fuckeliana B05.10] gi|150849019|gb|EDN24212.1| BC1G_16084 [Botryotinia fuckeliana B05.10] gi|169635728|emb|CAP58782.1| cytochrome P40 monooxygenase
  misc_feature (18)..(491): NCBI GI: 256725278 Blast Desc: NECHADRAFT_45567 [Nectria haematococca mpVI 77-13-4]
  misc_feature (18)..(488): NCBI GI: 259485752 Blast Desc: TPA: cytochrome P450, (Eurofung) [Aspergillus nidulans FGSC A4]
  misc_feature (18)..(495): NCBI GI: 67522561 Blast Desc: AN1737.2 [Aspergillus nidulans FGSC A4] gi|40744867|gb|EAA64023.1| AN1737.2 [Aspergillus nidulans FGSC A4] gi|259487082|tpe|CBF85469.1| TPA: cytochrome P450, (Eurofung)
  misc_feature (56)..(488): NCBI GI: 156054726 Blast Desc: SS1G_06211 [Sclerotinia sclerotiorum 1980] gi|154703991|gb|EDO03730.1| SS1G_06211 [Sclerotinia sclerotiorum 1980]
  misc_feature (7)..(486): NCBI GI: 156032451 Blast Desc: SS1G_13923 [Sclerotinia sclerotiorum 1980] gi|154699325|gb|EDN99063.1| SS1G_13923 [Sclerotinia sclerotiorum 1980]
  misc_feature (18)..(488): NCBI GI: 121712479 Blast Desc: benzoate 4-monooxygenase cytochrome P450 [Aspergillus clavatus NRRL 1] gi|119402003|gb|EAW12425.1| benzoate 4-monooxygenase cytochrome P450 [Aspergillus clavatus NRRL 1]
  misc_feature (32)..(489): NCBI GI: 255931851 Blast Desc: Pc12g06400 [Penicillium chrysogenum Wisconsin 54-1255] gi|211582101|emb|CAP80267.1| Pc12g06400 [Penicillium chrysogenum Wisconsin 54-1255]
  misc_feature (33)..(457): SWISSPROT Homolog: EC 1.14.13.12 Benzoate 4-monooxygenase
  misc_feature: Useful for introducing or modulating the production of volatile compounds
MYFSFSQLALFASTCVPLYLIAQYLYGLYFDPLAKYPGPRTAALTDAWYAFAWARGRYPLVMYALHKKYGDVVRIGPNKLSFATVQAHHDIYGYKPLFQKSDWYSGGRAGGIIFERDPVVHGHIRRALIPGFSTRQLREKFEGPAIELLEMVPRLIEQGEKEGMNVCRLFTMISFDIIGLVTLGNSFQCLETNTVHPLAGLMHTGAFAASLVPLRRHLRVFNQAMNYKFKGKDPDMLRARHVGILKAEIDNRIARGSIDQGDGIISKVLREESLENKYILSNAINLLIAGSETIATGLSTAVFLLLQNQRCLEALQSEIRGAFETEKDITGDSTAKLPYLKAVIDETLRLIPPSPFGQSRTSPGASVDGHYIPAGVDVSVDVWCLHHDRRYWTEVEKFAPERWLSENDGFVDNELANIDFGDNKEAFQPFSEGPRACFGMGLAYFEMRLILARLVWRYNWKPDPRSRSWLAGLRLEFFWRKPELFVHFTPRQDAAH

SEQ ID NO: 20081 - DNA, 2149 bp, Muscodor strobelii
  misc_feature: SGI EST ID NO. CUFF.46989.0
  misc_feature: Variant of the nucleotide sequence at SEQ ID NO 20079
tgaggagaagttttcgatctcactcaacttagagcgtgcatttttcttttctgcgactcgtctttgggtcggggacgtgcacaagtatttcgaacagacaagacggaagcaatgtatttttcattttcgcaattggctcttttcgcatccacttgcgtccccttgtacctaatcgcgcaatacctatatggcttgtactttgatccccttgcgaaatatccagggccgagaacagcagcattaacagatgcttggtacgctttcgcctgggccaggggcaggtaccctctggtcatgtatgccctgcataagaaatatggtgatgtggttcgcatcggcccaaacaaactgtcttttgctacggtccaagcccatcacgatatctatggatataagcctctctttcagaagagtgactggtattctggagggcgtgcaggcggtataatcttcgaacgggacccagtagtgcacggtcatataagaagggccttgatcccaggttttagcactcgacaactcagggagaagttcgaaggacccgcaatagagttattggagatggttcctaggttgatcgaacaaggtgaaaaggagggcatgaatgtctgtcggcttttcacgatgatcagcttcgacatcattgggctggtcacactaggaaactcttttcagtgtcttgaaacgaacacagtacacccacttgcaggcctcatgcacacgggtgcatttgccgcttccctagtgccactccgtcggcatctacgggtattcaaccaggcgatgaactataagttcaaaggtaaagatccggacatgctgcgagctcgacatgtggggatcctcaaggctgagattgacaatcgaattgcgcggggttctatcgatcaaggagacggcattatctccaaagtgttgcgagaagaaagtcttgaaaataagtatattctgtccaacgctattaacctgctgattgcaggcagcgaaaccatcgcaactggcctcagcacagctgtcttcctgttgttgcagaaccaaagatgccttgaagctcttcagtccgagattcgaggggcgttcgaaaccgaaaaggatatcaccggggactcgacggcgaagctaccatatctaaaagccgttatcgacgaaacacttcggttaataccgccctctccttttggtcaaagtaggaccagccctggtgcttcagtcgatggtcattatatccctgccggagttgatgtctccgtggatgtctggtgcctccatcatgatcgtcgatattggacggaagttgagaaatttgctccggaaaggtggctttcggagaatgatgggttcgttgacaacgagctcgcgaatatcgattttggagataacaaagaggcatttcagccgttctctgaaggtcctcgggcatgtttcggtatgggacttgcgtactttgaaatgagattgatcctggcgaggcttgtttggcgttacaactggaaaccggaccctcgcagccgcagttggttagcagggcttaggttggaattcttctggcgtaaacctgaactttttgtacacttcacccctcggcaagatgcggcccactgagatatagaggtatactaaggaatagtcctccatcattgcttcaatacttcggtgcgacttagccgcgacagttgagaaactcggcacgggtaagctgagaattctttatgcgctgctcggtatccctcgcttctggcactttattccacgccaaggggtcacttattgaagtattgtcaacaccatagatgacctagattcttcttacgtacgatgttaaatactcggtacagaagggtatgctaactctcgaggtctatataaaagtcatacgttgtatagcagaaggataagcgtcctttctcatcacaataagttcgtagatgtcaggcgatgatatcttcttcgtttcgctacaaagctgtatttgcgagctcactcgcctgcctgtaagactaaattgttgtcacaggaatgcggataaactgtcaaacgcgtgatatcccttcataagcaacaaggccaagaaggaaatatacgatcgatgtgacgtaagtctggatacggtgcaaattagtgttcacgacgttctgggctcaaccgtctg

SEQ ID NO: 20082 - DNA, 1398 bp, Muscodor strobelii
  misc_feature: SGI cDNA ID NO. 566767
  misc_feature: Encodes the peptide sequence at SEQ ID NO 20083
atgagcaatcgccgtaccgctcctgacgtttcttccaatggagccggggacgaacgtgtgaccaagcaaaggcgtactgagacttcccagcccgtgagtgtcgcaatgccgaacccgaatcagaatctattccctcccgccgctacacccgttgcgaaggggagcggcgagaagatttcgcaacccattgactactcagctcctgccacaagcaccacaagtgtctttgcccctttcatccccgccagcgccacgtcaactccgagcccaacgcttggaactccctctgccacatccaccctcccgagacccagtacgaacggcgcaactccgacctattcgcactccggttccaacactctcataagtggcccgaccgcaagtggcgcagtgtcaacgctgcagacgagtctgttcccccttgccgctgcacccgctcagcaggggagcatagagaatatctcagtctttaacccttttcgagttgatattattgcaagactcgagcaactcttcccccccagcgccccatccactgtgcatccaaactccagaaatcccaccactgccgccactaccccgagacctagctcgagtatcgaagtcccgacgttcccaggtcctggttccagcattttcaccaatggcccggcttctagcgccagcgacacaaattcattccagaatcagtctgccgacgcttcggtcaaaccctctagtaatgatgctagcgacgctgagtgtcgtgttaatgatgagccgatggattatttctgcggcaaggttgggacgtacttcgaagacgactgtctgactgatgctgtgcttcgctgtgagggcaaagaaatgaaagtccactcgctggccagcgaaaagagtaaagagatctctctcgagcatgtggacattactattctgcaagccatgatccatttcatgtacaagttcgagtacccagtcctcggagatgactcagatttgctcctccacgcaataatgtacagcatcgcccacgaatattcagttcctaagttgaaagactactctttgcaagaatttgagacgaagatcactggattttggggcatctttggctccgaaaaacctatcctctcttcggccctagcagaggtctacactggtacccccgacacagaccacggcttgcgcgacattatctgcaagcactgccacgacaactgcgctacgttacaggcccaaaacttttttgacactgctgtattgacagctcctagatttggtgttgatttgattcacttccagcacaaatcgaaatgcactacgcccagcaccaacactagtatggccgattccaagagtaccatgccagacacctctgagactcaaggacccttcggcaagggctctggcatttga

SEQ ID NO: 20083 - protein, 465 aa, Muscodor strobelii
  misc_feature: SGI Peptide ID NO. 566767
  misc_feature (250)..(430): NCBI GI: 46115274 Blast Desc: FG03479.1 [Gibberella zeae PH-1]
  misc_feature (250)..(427): NCBI GI: 46139111 Blast Desc: FG11070.1 [Gibberella zeae PH-1]
  misc_feature (271)..(437): NCBI GI: 240108794 Blast Desc: BTB/POZ domain containing protein [Coccidioides posadasii C735 delta SOWgp]
  misc_feature (309)..(431): NCBI GI: 238841822 Blast Desc: BTB/POZ domain-containing protein [Microsporum canis CBS 113480]
  misc_feature (264)..(446): NCBI GI: 121698245 Blast Desc: BTB/POZ domain protein [Aspergillus clavatus NRRL 1] gi|119395901|gb|EAW06333.1| BTB/POZ domain protein [Aspergillus clavatus NRRL 1]
  misc_feature (271)..(424): NCBI GI: 119176043 Blast Desc: CIMG_09774 [Coccidioides immitis RS]
  misc_feature (271)..(424): NCBI GI: 258565623 Blast Desc: [Uncinocarpus reesii 1704] gi|237907257|gb|EEP81658.1| [Uncinocarpus reesii 1704]
  misc_feature (265)..(392): NCBI GI: 256725432 Blast Desc: NECHADRAFT_101136 [Nectria haematococca mpVI 77-13-4]
  misc_feature (272)..(396): NCBI GI: 116193259 Blast Desc: CHGG_06347 [Chaetomium globosum CBS 148.51] gi|88182260|gb|EAQ89728.1| CHGG_06347 [Chaetomium globosum CBS 148.51]
  misc_feature (327)..(442): NCBI GI: 154285104 Blast Desc: [Ajellomyces capsulatus NAm1] gi|150406988|gb|EDN02529.1| [Ajellomyces capsulatus NAm1]
MSNRRTAPDVSSNGAGDERVTKQRRTETSQPVSVAMPNPNQNLFPPAATPVAKGSGEKISQPIDYSAPATSTTSVFAPFIPASATSTPSPTLGTPSATSTLPRPSTNGATPTYSHSGSNTLISGPTASGAVSTLQTSLFPLAAAPAQQGSIENISVFNPFRVDIIARLEQLFPPSAPSTVHPNSRNPTTAATTPRPSSSIEVPTFPGPGSSIFTNGPASSASDTNSFQNQSADASVKPSSNDASDAECRVNDEPMDYFCGKVGTYFEDDCLTDAVLRCEGKEMKVHSLASEKSKEISLEHVDITILQAMIHFMYKFEYPVLGDDSDLLLHAIMYSIAHEYSVPKLKDYSLQEFETKITGFWGIFGSEKPILSSALAEVYTGTPDTDHGLRDIICKHCHDNCATLQAQNFFDTAVLTAPRFGVDLIHFQHKSKCTTPSTNTSMADSKSTMPDTSETQGPFGKGSGI

SEQ ID NO: 20084 - DNA, 852 bp, Muscodor strobelii
  misc_feature: SGI cDNA ID NO. 566768
  misc_feature: Encodes the peptide sequence at SEQ ID NO 20085
atgaacgaccgccgtgaggacgccggacgtgcgccgaaacgacgcgcgcgtggaggcatgttctctttttcgcccgcatctccatcttctaccagcacttcaatcttcagtgctcctcagattgataagccacatacccaagctgcgggatttacgcctggttcagctccaacgaacatggattggaacttgacgttgggtttcaaggcgcgcctacaacgcttccacgagagtgaagacctggcagatgctgttgtcatctctgagggtcacgagttcaaggtccacgcgttcgtgctctctctgcattcggaggtttttcgcagggcattttgtggcccatggaaagaaagcatagaacgcaagtatgatctcgatgatgatgtcagtatcgatgtcgtgagaggaatgatacattggatgtatcattttgactacaacagcccggacaatgtctccacaacgctcttcgacgccaaaatgtacagtgttgccgagcgatacctgatctcagacttgaaggaatacgcgaagaagaagtttgtggctgcaatgaacactatttgggattccgaaggcttctccagcgatctgtgtgccgttatggaagaggtgtacacgagaacccccgaccatgatcgtggactacgagacgctctcgtcaaatcttgccacgacaaccgttcaaagttgttcgataaagaggactttcgtgctgccctccgcgaagtccccggattcgctgccgacttattctttctcgggccgacgcctcaacctaccaatccctcgacggccggtagcttgtttggaaggaacgcttctgcgagctctaaaggtatcttgggctaa

SEQ ID NO: 20085 - protein, 283 aa, Muscodor strobelii
  misc_feature: SGI Peptide ID NO. 566768
  misc_feature (72)..(173): Pfam Id: PF00651 Pfam Desc: BTB/POZ domain
  misc_feature (72)..(142): Pfam Id: PF00651 Pfam Desc: BTB/POZ domain
  misc_feature (63)..(264): NCBI GI: 121698245 Blast Desc: BTB/POZ domain protein [Aspergillus clavatus NRRL 1] gi|119395901|gb|EAW06333.1| BTB/POZ domain protein [Aspergillus clavatus NRRL 1]
  misc_feature (68)..(252): NCBI GI: 46115274 Blast Desc: FG03479.1 [Gibberella zeae PH-1]
  misc_feature (60)..(251): NCBI GI: 258565623 Blast Desc: [Uncinocarpus reesii 1704] gi|237907257|gb|EEP81658.1| [Uncinocarpus reesii 1704]
  misc_feature (27)..(251): NCBI GI: 240108794 Blast Desc: BTB/POZ domain containing protein [Coccidioides posadasii C735 delta SOWgp]
  misc_feature (68)..(280): NCBI GI: 238837775 Blast Desc: BTB/POZ domain-containing protein [Microsporum canis CBS 113480]
  misc_feature (82)..(251): NCBI GI: 119176043 Blast Desc: CIMG_09774 [Coccidioides immitis RS]
  misc_feature (50)..(257): NCBI GI: 46139111 Blast Desc: FG11070.1 [Gibberella zeae PH-1]
  misc_feature (71)..(218): NCBI GI: 256725432 Blast Desc: NECHADRAFT_101136 [Nectria haematococca mpVI 77-13-4]
  misc_feature (65)..(251): NCBI GI: 240273973 Blast Desc: BTB/POZ domain-containing protein [Ajellomyces capsulatus H143]
  misc_feature (65)..(251): NCBI GI: 225557917 Blast Desc: BTB/POZ domain-containing protein [Ajellomyces capsulatus G186AR]
MNDRREDAGRAPKRRARGGMFSFSPASPSSTSTSIFSAPQIDKPHTQAAGFTPGSAPTNMDWNLTLGFKARLQRFHESEDLADAVVISEGHEFKVHAFVLSLHSEVFRRAFCGPWKESIERKYDLDDDVSIDVVRGMIHWMYHFDYNSPDNVSTTLFDAKMYSVAERYLISDLKEYAKKKFVAAMNTIWDSEGFSSDLCAVMEEVYTRTPDHDRGLRDALVKSCHDNRSKLFDKEDFRAALREVPGFAADLFFLGPTPQPTNPSTAGSLFGRNASASSKGILG

SEQ ID NO: 20086 - DNA, 864 bp, Muscodor strobelii
  misc_feature: SGI cDNA ID NO. 566769
  misc_feature: Encodes the peptide sequence at SEQ ID NO 20087
atggcgacaccggtgcagactctgctggatcacctgggcctcgacaatatcaaaaaactacagaagatgtccccagccgacaggcagcgagaggtccagaaggataaggacattcttgacacactcgccaagtcggccaagcccatccctccgcagatacagccactggaatacttaacagctctcgctaccgtcgacctcacaaagcccgagaaccttgactacttcttgaaccgcacccagtccctgccttcacccaatctcccaaaactaattcccctgggcacgcacggcgggacccaatatttcctcaggagccgtttcgaaccattgccagaaacatctaccgccgccgctgcagctgccccggcgccggacgtctaccctggcgtatctgcttttgaagccaaaaatatacccagcggcactaacgcaaccacggggctgaagtacggctttgggcttggccggctcttttatcaagtgcccaaagctccctctgccgcggatgctggtttctacctgatctgcaacgccgtcgacaaaagcatctgggcatccttcgactttgacccctattccgacacgggtgacatcctccccatccaagccgaagatggcgaagaatacgggaagctgcccgtcggggactcatctaatgtaaccgagtccccgatgatcgggctacagaaggtattcgccaaggagtggacggcaaagaagccgctcagtctcgagggtggggatccattccagaatggggctgggagtccgctgcaggtgaggttgctggcgagacctgctaccaagaccgaagtgctcaatgcgatcaaagctggtgaccgtcctgtgcaagcagcctaa

SEQ ID NO: 20087 - protein, 287 aa, Muscodor strobelii
  misc_feature: SGI Peptide ID NO. 566769
MATPVQTLLDHLGLDNIKKLQKMSPADRQREVQKDKDILDTLAKSAKPIPPQIQPLEYLTALATVDLTKPENLDYFLNRTQSLPSPNLPKLIPLGTHGGTQYFLRSRFEPLPETSTAAAAAAPAPDVYPGVSAFEAKNIPSGTNATTGLKYGFGLGRLFYQVPKAPSAADAGFYLICNAVDKSIWASFDFDPYSDTGDILPIQAEDGEEYGKLPVGDSSNVTESPMIGLQKVFAKEWTAKKPLSLEGGDPFQNGAGSPLQVRLLARPATKTEVLNAIKAGDRPVQAA

SEQ ID NO: 20088 - DNA, 501 bp, Muscodor strobelii
  misc_feature: SGI cDNA ID NO. 566770
  misc_feature: Encodes the peptide sequence at SEQ ID NO 20089
atggctaatacatcgggaagattagaagcaaccgggaacgcgccaagctttgattcttgggactttcataacaatactccaggtttggcggagttgaattctcgcataccagcgctccagagactcgttaccaacatcacattgatgctccaagcaatacaaaacctagatcggaatcaaggaaattccaccctccacaacaacgcaggccctctcacgggtgctaatcaagatctggctgctcgtttgacctggcttgcattatactttcaccaagccggatgtcagtatgcgcagtggatatacgacctgaacatgcctggcacatatgcgacagataacaaccaggtttggacggattacctgacgattcttaagcagctcggaaatataatatcggacttgccattcgcttggagcacagcttggataaaccagatcactaataatgcagcggccaaccagcgtatcccggctggtaagtcaaatgatctatcataa

SEQ ID NO: 20089 - protein, 166 aa, Muscodor strobelii
  misc_feature: SGI Peptide ID NO. 566770
MANTSGRLEATGNAPSFDSWDFHNNTPGLAELNSRIPALQRLVTNITLMLQAIQNLDRNQGNSTLHNNAGPLTGANQDLAARLTWLALYFHQAGCQYAQWIYDLNMPGTYATDNNQVWTDYLTILKQLGNIISDLPFAWSTAWINQITNNAAANQRIPAGKSNDLS

SEQ ID NO: 20090 - DNA, 747 bp, Muscodor strobelii
  misc_feature: SGI cDNA ID NO. 566771
  misc_feature: Elevated expression when VOC is produced
  misc_feature: Encodes the peptide sequence at SEQ ID NO 20091
atgtcggatcagcttgtcgttttgataactggtgttggtcgagggattggttatgctctggcccgcgcgtaccttgagcgtcctcgctgcaccgtcatcggcagcatccggggctcgccagcttcgacagaggatttgcgcaaggctccgaaaggcgaaggatcacggcttatcctcgttcagatcgaaagcgcatcggacgacgatgtggcaaatgcagtcaagacgattgaagccaagggaattgatcatatcgatgtcttgatccccaatgctggcattagcccctctatggaacccatcgaaacagttgatcttggcgctctgtccaacgcctatcgaatcaacgctctaggccccctagccctgtaccaggcctgctataagcttctgcagaagtcaagcaatcccaaatttgcacccatcagcagcgctgccgggagtcttggggtcatggaacgtggacgtacatatgtcgcaccatcatattctatgtcaaaggtagccctgaattggatcactctagcagcgcactgcggtaatacttggctcacggctgtcgcaataaatcccggacttgtcgcaactgacatgggaaacaagaccgctgcgtacctcggcgtgaaaccacagttgactgccgagcaaagcgcagagaaaatcataaactttattgatcaagcaactcgcgagaactcgtcaggcaagttcgtcaatgtagtggacggcaaagaattcccttggtag

SEQ ID NO: 20091 - protein, 248 aa, Muscodor strobelii
  misc_feature: SGI Peptide ID NO. 566771
  misc_feature (5)..(184): Pfam Id: PF00106 Pfam Desc: short chain dehydrogenase
  misc_feature (5)..(150): Pfam Id: PF00106 Pfam Desc: short chain dehydrogenase
  misc_feature (1)..(248): NCBI GI: 145602528 Blast Desc: MGG_10910 [Magnaporthe grisea 70-15] gi|145010939|gb|EDJ95595.1| MGG_10910 [Magnaporthe grisea 70-15]
  misc_feature (1)..(248): NCBI GI: 85119258 Blast Desc: NCU02923 [Neurospora crassa OR74A] gi|28927416|gb|EAA36369.1| [Neurospora crassa OR74A]
  misc_feature (6)..(248): NCBI GI: 255934834 Blast Desc: Pc12g16460 [Penicillium chrysogenum Wisconsin 54-1255] gi|211583063|emb|CAP81273.1| Pc12g16460 [Penicillium chrysogenum Wisconsin 54-1255]
  misc_feature (1)..(228): NCBI GI: 255950190 Blast Desc: Pc22g19590 [Penicillium chrysogenum Wisconsin 54-1255] gi|211592879|emb|CAP99247.1| Pc22g19590 [Penicillium chrysogenum Wisconsin 54-1255]
  misc_feature (1)..(248): NCBI GI: 169781262 Blast Desc: [Aspergillus oryzae RIB40] gi|83773836|dbj|BAE63961.1| protein product [Aspergillus oryzae]
  misc_feature (1)..(248): NCBI GI: 261357797 Blast Desc: aflatoxin biosynthesis ketoreductase nor-1 [Verticillium albo-atrum VaMs.102]
  misc_feature (6)..(248): NCBI GI: 169773811 Blast Desc: [Aspergillus oryzae RIB40] gi|83769235|dbj|BAE59372.1| protein product [Aspergillus oryzae]
  misc_feature (6)..(248): NCBI GI: 238491828 Blast Desc: toxin biosynthesis ketoreductase, [Aspergillus flavus NRRL3357] gi|220697564|gb|EED53905.1| toxin biosynthesis ketoreductase, [Aspergillus flavus NRRL3357]
  misc_feature (6)..(248): NCBI GI: 119477328 Blast Desc: NADP(+)-dependent dehydrogenase, [Neosartorya fischeri NRRL 181] gi|119407421|gb|EAW17370.1| NADP(+)-dependent dehydrogenase, [Neosartorya fischeri NRRL 181]
  misc_feature (6)..(248): NCBI GI: 146324219 Blast Desc: toxin biosynthesis ketoreductase [Aspergillus fumigatus Af293] gi|129558009|gb|EAL91207.2| toxin biosynthesis ketoreductase, [Aspergillus fumigatus Af293]
  misc_feature (1)..(198): SWISSPROT Homolog: EC 1.1.1.5 Acetoin dehydrogenase
  misc_feature: Useful for introducing or modulating the production of volatile compounds
MSDQLVVLITGVGRGIGYALARAYLERPRCTVIGSIRGSPASTEDLRKAPKGEGSRLILVQIESASDDDVANAVKTIEAKGIDHIDVLIPNAGISPSMEPIETVDLGALSNAYRINALGPLALYQACYKLLQKSSNPKFAPISSAAGSLGVMERGRTYVAPSYSMSKVALNWITLAAHCGNTWLTAVAINPGLVATDMGNKTAAYLGVKPQLTAEQSAEKIINFIDQATRENSSGKFVNVVDGKEFPW

SEQ ID NO: 20092 - DNA, 1934 bp, Muscodor strobelii
  misc_feature: SGI EST ID NO. CUFF.47112.1
  misc_feature: Variant of the nucleotide sequence at SEQ ID NO 20090
ggtgaactcagatggttattactgcttgcgctatgaaagaaggactcaagaagccgacacaatcttcaagttgagtcagtcaatttcccgcggacgtggagcgattttagttgttgagtctgaatgattggatcttgtctctagattgacagaattccctatacctctcattcatctgtggacgtcttcgactgtataatgacacttatcaagcatagctccatcgcacatgcatgtgcatgttgcgtaacctatcatgagtaggcttgtgtgatagaggcgttgaggctttcggcgaggcatatcactatcatcgcaaggtgtcttggcggttcgcgcctccttcctgtcagccagagggcgagctctaagccgacagcctataggcggcatgctttgagtagatcctttgccggtggcatacgacaactgaggcaacaccttcttccatttaccaagcttgcacttagctgttggctccagattccgttcttcatcctagaagttgtcgcactaattccagataaatcaacccaaacgtcccaagaactccgaaagagcagtcaggcgaactccgctcgatgcagatcgacgtatctgatgcagcacagtcggtagaatttccccaatgtcggcagatgcataaaatagatgattatggggtaagagcaaaagaaaattgttcgaagtccttatatccgtgatacataagcgatcacataacatcgtagcagacgaattttagcgtgacaacacaaaactctttaggcttggctcctatgtgctgccatgtcggatcagcttgtcgttttgataactggtgttggtcgagggattggttatgctctggcccgcgcgtaccttgagcgtcctcgctgcaccgtcatcggcagcatccggggctcgccagcttcgacagaggatttgcgcaaggctccgaaaggcgaaggatcacggcttatcctcgttcagatcgaaagcgcatcggacgacgatgtggcaaatgcagtcaagacgattgaagccaagggaattgatcatatcgatgtcttgatccccaatgctggcattagcccctctatggaacccatcgaaacagttgatcttggcgctctgtccaacgcctatcgaatcaacgctctaggccccctagccctgtaccaggcctgctataagcttctgcagaagtcaagcaatcccaaatttgcacccatcagcagcgctgccgggagtcttggggtcatggaacgtggacgtacatatgtcgcaccatcatattctatgtcaaaggtagccctgaattggatcactctagcagcgcactgcggtaatacttggctcacggctgtcgcaataaatcccggacttgtcgcaactgacatgggaaacaagaccgctgcgtacctcggcgtgaaaccacagttgactgccgagcaaagcgcagagaaaatcataaactttattgatcaagcaactcgcgagaactcgtcaggcaagttcgtcaatgtagtggacggcaaagaattcccttggtagcgtttgttgtcttattctacattattgtcacattagtctgcgttgaacgcatgatttatagttcgccgaatacataaagtgggcatgtttcagacgaacactcttcgatgcagcactgggaggtagcactggtcaattaagctatgtgatttgcctggagtcgctacgcacttttctccaacatgacctgtacctcaagtttttctacagaatatgtcgatcgtggggtatgataggcttcattggcgatgtccaattcatctctgattgcaccctctaacttgagatcgcacttatccctgccaatgaccattgtcttcaaccaatatccaggccttttcacgcacgaccaccatcctactcctctgaagcaacccaaccgcggatttctgcacgaa

SEQ ID NO: 20093 - DNA, 798 bp, Muscodor strobelii
  misc_feature: SGI cDNA ID NO. 566772
  misc_feature: Encodes the peptide sequence at SEQ ID NO 20094
atgtcggatcagcttgtcgttttgataactggtgttggtcgagggattggttatgctctggcccgcgcgtaccttgagcgtcctcgctgcaccgtcatcggcagcatccggggctcgccagcttcgacagaggatttgcgcaaggctccgaaaggcgaaggatcacggcttatcctcgttcagatcgaaagcgcatcggacgacgatgtggcaaatgcagtcaagacgattgaagccaagggaattgatcatatcgatgtcttgatccccaatgctggcattagcccctctatggaacccatcgaaacagttgatcttggcgctctgtccaacgcctatcgaatcaacgctctaggccccctagccctgtaccaggcctgctataagcttctgcagaagtcaagcaatcccaaatttgcacccatcagcagcgctgccgggagtcttggggtcatggaacgtggacgtacatatgtcgcaccatcatattctatgtcaaaggtagccctgaattggatcactctagcagcgcactgcggtaatacttggctcacggctgtcgcaataaatcccggacttgtcgcaactgacatgggaaacaagaccgctgcgtacctcggcgtgaaaccacagttgactgccgagcaaagcgcagagaaaatcataaactttgtaagtctgcctagggtaccttattgggcggacgcagctaacagcagacagattgatcaagcaactcgcgagaactcgtcaggcaagttcgtcaatgtagtggacggcaaagaattcccttggtag

SEQ ID NO: 20094 - protein, 265 aa, Muscodor strobelii
  misc_feature: SGI Peptide ID NO. 566772
  misc_feature (5)..(184): Pfam Id: PF00106 Pfam Desc: short chain dehydrogenase
  misc_feature (5)..(150): Pfam Id: PF00106 Pfam Desc: short chain dehydrogenase
  misc_feature (1)..(265): NCBI GI: 145602528 Blast Desc: MGG_10910 [Magnaporthe grisea 70-15] gi|145010939|gb|EDJ95595.1| MGG_10910 [Magnaporthe grisea 70-15]
  misc_feature (1)..(265): NCBI GI: 85119258 Blast Desc: NCU02923 [Neurospora crassa OR74A] gi|28927416|gb|EAA36369.1| [Neurospora crassa OR74A]
  misc_feature (1)..(225): NCBI GI: 255950190 Blast Desc: Pc22g19590 [Penicillium chrysogenum Wisconsin 54-1255] gi|211592879|emb|CAP99247.1| Pc22g19590 [Penicillium chrysogenum Wisconsin 54-1255]
  misc_feature (6)..(265): NCBI GI: 255934834 Blast Desc: Pc12g16460 [Penicillium chrysogenum Wisconsin 54-1255] gi|211583063|emb|CAP81273.1| Pc12g16460 [Penicillium chrysogenum Wisconsin 54-1255]
  misc_feature (1)..(265): NCBI GI: 261357797 Blast Desc: aflatoxin biosynthesis ketoreductase nor-1 [Verticillium albo-atrum VaMs.102]
  misc_feature (1)..(265): NCBI GI: 169781262 Blast Desc: [Aspergillus oryzae RIB40] gi|83773836|dbj|BAE63961.1| protein product [Aspergillus oryzae]
  misc_feature (6)..(265): NCBI GI: 169773811 Blast Desc: [Aspergillus oryzae RIB40] gi|83769235|dbj|BAE59372.1| protein product [Aspergillus oryzae]
  misc_feature (6)..(265): NCBI GI: 119477328 Blast Desc: NADP(+)-dependent dehydrogenase, [Neosartorya fischeri NRRL 181] gi|119407421|gb|EAW17370.1| NADP(+)-dependent dehydrogenase, [Neosartorya fischeri NRRL 181]
  misc_feature (6)..(265): NCBI GI: 238491828 Blast Desc: toxin biosynthesis ketoreductase, [Aspergillus flavus NRRL3357] gi|220697564|gb|EED53905.1| toxin biosynthesis ketoreductase, [Aspergillus flavus NRRL3357]
  misc_feature (6)..(265): NCBI GI: 146324219 Blast Desc: toxin biosynthesis ketoreductase [Aspergillus fumigatus Af293] gi|129558009|gb|EAL91207.2| toxin biosynthesis ketoreductase, [Aspergillus fumigatus Af293]
  misc_feature (1)..(238): SWISSPROT Homolog: EC 1.1.1.5 Acetoin dehydrogenase
MSDQLVVLITGVGRGIGYALARAYLERPRCTVIGSIRGSPASTEDLRKAPKGEGSRLILVQIESASDDDVANAVKTIEAKGIDHIDVLIPNAGISPSMEPIETVDLGALSNAYRINALGPLALYQACYKLLQKSSNPKFAPISSAAGSLGVMERGRTYVAPSYSMSKVALNWITLAAHCGNTWLTAVAINPGLVATDMGNKTAAYLGVKPQLTAEQSAEKIINFVSLPRVPYWADAANSRQIDQATRENSSGKFVNVVDGKEFPW

SEQ ID NO: 20095 - DNA, 1934 bp, Muscodor strobelii; identical to SEQ ID NO: 20092
  misc_feature: SGI EST ID NO. CUFF.47112.1
  misc_feature: Variant of the nucleotide sequence at SEQ ID NO 20093

SEQ ID NO: 20096 - DNA, 873 bp, Muscodor strobelii
  misc_feature: SGI cDNA ID NO. 566773
  misc_feature: Encodes the peptide sequence at SEQ ID NO 20097
atgtgcgcttccacagagggaagttcgcccacgcagtgcgcccggtgtaaaaagcagaagccggccgccaacatgcgccattgttgcgacaatatatcctactgtagcagaaagtgcgagcgcgcgaattattctaaacacaaaatcgcatgcacaaagctcaaggctaccgacaggaacaagaaggtagctacgccagcattacaacaactggataaccagaagcacgagaaggaggaggacaagaacgaggttgctcccgcaatggaccaattcatgacgagtgccttacaagaacaagaagagaaatataaatcggctactgttgaggatggttctgacgagtccattccgtcatcgaccatgattctgacacctcgatcggagtctccagtctcggtccaaagatatgacgatactgagccagcccttctcaagcgcatttccgacccatttttgcgcctagagagaggctcttacctgcatggccgtccggatgtcgacgtctacaagctacttatcgactcataccgactcgagcttagccatcagtgcatccccagcgatttgaagagcgcggatgaaaccgattcacctacactcggcggattcagagcctttctgacaaaggcaaagtcgattcccaagctcctaccatcgtggtggagcgagaagaagcaagccgagtgcgaggccttgagccaacagcgaggatggtgtgaactcacgagaaacccttctgaccaggaggttaatcagcattacaaacaggccgatatgtctaggcagctctgtcaactggctcgcgatatgcattcgtcgcgactgatcattcgtgcagaaatccgcggttgggttgcttcagaggagtag

SEQ ID NO: 20097 - protein, 290 aa, Muscodor strobelii
  misc_feature: SGI Peptide ID NO. 566773
  misc_feature (13)..(51): Pfam Id: PF01753 Pfam Desc: MYND finger
  misc_feature (124)..(268): NCBI GI: 169621921 Blast Desc: SNOG_14173 [Phaeosphaeria nodorum SN15] gi|111057290|gb|EAT78410.1| SNOG_14173 [Phaeosphaeria nodorum SN15]
  misc_feature (148)..(273): NCBI GI: 189197375 Blast Desc: conserved [Pyrenophora tritici-repentis Pt-1C-BFP] gi|187980973|gb|EDU47599.1| conserved [Pyrenophora tritici-repentis Pt-1C-BFP]
  misc_feature (142)..(264): NCBI GI: 212537777 Blast Desc: MYND domain protein, [Penicillium marneffei ATCC 18224] gi|210068786|gb|EEA22877.1| MYND domain protein, [Penicillium marneffei ATCC 18224]
  misc_feature (148)..(273): NCBI GI: 256730323 Blast Desc: NECHADRAFT_82692 [Nectria haematococca mpVI 77-13-4]
  misc_feature (143)..(264): NCBI GI: 121699383 Blast Desc: MYND domain protein, [Aspergillus clavatus NRRL 1] gi|119396145|gb|EAW06577.1| MYND domain protein, [Aspergillus clavatus NRRL 1]
  misc_feature (151)..(264): NCBI GI: 119474305 Blast Desc: MYND domain protein, [Neosartorya fischeri NRRL 181] gi|119407181|gb|EAW17131.1| MYND domain protein, [Neosartorya fischeri NRRL 181]
  misc_feature (149)..(234): NCBI GI: 256733711 Blast Desc: NECHADRAFT_78094 [Nectria haematococca mpVI 77-13-4]
  misc_feature (151)..(264): NCBI GI: 159128226 Blast Desc: MYND domain protein, [Aspergillus fumigatus A1163]
  misc_feature (151)..(264): NCBI GI: 70986270 Blast Desc: MYND domain protein [Aspergillus fumigatus Af293] gi|66846258|gb|EAL86591.1| MYND domain protein, [Aspergillus fumigatus Af293]
  misc_feature (148)..(273): NCBI GI: 238492439 Blast Desc: MYND domain protein, [Aspergillus flavus NRRL3357] gi|220695950|gb|EED52292.1| MYND domain protein, [Aspergillus flavus NRRL3357]
MCASTEGSSPTQCARCKKQKPAANMRHCCDNISYCSRKCERANYSKHKIACTKLKATDRNKKVATPALQQLDNQKHEKEEDKNEVAPAMDQFMTSALQEQEEKYKSATVEDGSDESIPSSTMILTPRSESPVSVQRYDDTEPALLKRISDPFLRLERGSYLHGRPDVDVYKLLIDSYRLELSHQCIPSDLKSADETDSPTLGGFRAFLTKAKSIPKLLPSWWSEKKQAECEALSQQRGWCELTRNPSDQEVNQHYKQADMSRQLCQLARDMHSSRLIIRAEIRGWVASEE

SEQ ID NO: 20098 - DNA, 972 bp, Muscodor strobelii
  misc_feature: SGI cDNA ID NO. 566774
  misc_feature: Encodes the peptide sequence at SEQ ID NO 20099
atgacttcacggtccaatctcggcccgttaaccactccgttcacctatccatctagttgcggtgtggctgtcgctcaatgtagcacatgtacttcattctggcaagctcagtcctgcggtagcaccaatgttcaagatgatccttcttgctggcccgaggtcactgatccgaacgcgcccgtggacatcggtcctgcgttgaatggttggggcttctattcgccggctgtgtcatgtccagttggctacacgtccgcctgtgccgctactggcacccgtagtgacgggttcgaattccagtttccgattcttgtgagcgaaaccgccataggctgctgccctccgggcttcgtctgtagatacgacccgcgtgtcgacggcgccgcccagacgtgcatgagccgcgccaccacttcctcatttgcgacagtgcaatgctctgatggcaacagcgatggtttctcttacttccacgtgccgactgtcattctgaccacacagacgtcgaccgaaattactgcggcgtatataagccaagctactgtagttgcgccgatgttccagctcgtacacagagcgactgacctgcccaccagcgcgacccctacttcttctagtcaaacaactattccttccacaaacgagagcaattcaagccccaatacgagagagcgtggtctctctacaagcgcatacgcaggtataggtgtaggcgccggagtggtcatcttcgccctgctaggtggtgctatcttcttctaccagagaaaacagaaaatcaccgcggcctatgccgctaattctgtcgactcgacgaagccctcgatacaggagcacagcaatggatcttcttcgggacacgcagttccactagccgaagcatgcacgggttattttgccaacgaaatgcccggttctacacatatagctagcgagctgcctgttgaataccgtcggaatgagcttgcatag

SEQ ID NO: 20099 - protein, 323 aa, Muscodor strobelii
  misc_feature: SGI Peptide ID NO. 566774
  misc_feature (3)..(307): NCBI GI: 46138965 Blast Desc: FG10997.1 [Gibberella zeae PH-1]
  misc_feature (4)..(262): NCBI GI: 256720671 Blast Desc: NECHADRAFT_85611 [Nectria haematococca mpVI 77-13-4]
  misc_feature (3)..(259): NCBI GI: 116194962 Blast Desc: CHGG_04079 [Chaetomium globosum CBS 148.51] gi|88179992|gb|EAQ87460.1| CHGG_04079 [Chaetomium globosum CBS 148.51]
  misc_feature (7)..(267): NCBI GI: 116198575 Blast Desc: CHGG_07443 [Chaetomium globosum CBS 148.51] gi|88178722|gb|EAQ86190.1| CHGG_07443 [Chaetomium globosum CBS 148.51]
  misc_feature (1)..(264): NCBI GI: 116198577 Blast Desc: CHGG_07444 [Chaetomium globosum CBS 148.51] gi|88178723|gb|EAQ86191.1| CHGG_07444 [Chaetomium globosum CBS 148.51]
  misc_feature (4)..(257): NCBI GI: 39957505 Blast Desc: MGG_09178 [Magnaporthe grisea 70-15] gi|145013387|gb|EDJ98028.1| MGG_09178 [Magnaporthe grisea 70-15]
  misc_feature (3)..(213): NCBI GI: 171691548 Blast Desc: protein product [Podospora anserina] gi|170945722|emb|CAP71835.1| protein product [Podospora anserina]
  misc_feature (3)..(291): NCBI GI: 256725541 Blast Desc: NECHADRAFT_88912 [Nectria haematococca mpVI 77-13-4]
  misc_feature (3)..(212): NCBI GI: 171677033 Blast Desc: protein product [Podospora anserina] gi|170936584|emb|CAP61243.1| protein product [Podospora anserina]
  misc_feature (36)..(323): NCBI GI: 116182860 Blast Desc: CHGG_02058 [Chaetomium globosum CBS 148.51] gi|88186355|gb|EAQ93823.1| CHGG_02058 [Chaetomium globosum CBS 148.51]
MTSRSNLGPLTTPFTYPSSCGVAVAQCSTCTSFWQAQSCGSTNVQDDPSCWPEVTDPNAPVDIGPALNGWGFYSPAVSCPVGYTSACAATGTRSDGFEFQFPILVSETAIGCCPPGFVCRYDPRVDGAAQTCMSRATTSSFATVQCSDGNSDGFSYFHVPTVILTTQTSTEITAAYISQATVVAPMFQLVHRATDLPTSATPTSSSQTTIPSTNESNSSPNTRERGLSTSAYAGIGVGAGVVIFALLGGAIFFYQRKQKITAAYAANSVDSTKPSIQEHSNGSSSGHAVPLAEACTGYFANEMPGSTHIASELPVEYRRNELA

SEQ ID NO: 20100 - DNA, 1020 bp, Muscodor strobelii
  misc_feature: SGI cDNA ID NO. 566775
  misc_feature: Elevated expression when VOC is produced
  misc_feature: Encodes the peptide sequence at SEQ ID NO 20101
atggtctccctaagcgtcgtccgcgcctccaatgcagccatcaagaccgagttgccacaaggcctcgtcgccgttttcgtcggcgccacgagcgggataggcagggtgtcgctggagcgcttcgtcgagcatgccgcggcaccgcgtgtctactttaccggccgaaggcagcagatcggtctcgaaatccaagctgcccttcggaagctaaatccagaaggcgagtacatcttccttgagagcgacggcagtcttctccgcgccgttgatgcgctatgccaagacatcaaggaaaaggagaaatcgatcaatctgctgtgcatcaccatgggcactctgctcagcggcacgaccacggaggagggcctgcactacgccatggccgtctcgtattactgtcgcatgcgcttcattgtcaatcttctgccgttgattcaaaaggccggcaaactccgtcgtgtcgtgaccgtgctcgcgggcacaaaggaaggaaagatctacccttccgatttcccaggcctcacgctccccttctccaaggttaagggtcacactgcggcaatgatcactttggccctcgagcacctgagcagacagagccccgacgtgtcttttgtacataattacccgggctttgtgaagacggcgttgtcacgtgagctcaagccatcgctaatggctactgtcatgaagggtgttttcggcgtcgttgctcttttccggaatacaccgattgaggaggtgggagatcgtcagtgcttcctagctacgagcgcaatattcccgccgcggacgggcgggcaggcggatggcgtcgcgctgtctagcggtctctccatcgctgccggcaccgatggtacgaagggcggaggtgcgtacacagtcgacgataatagcgagccgggcggacagaatgtcctagacattcttgccgggttgagagaagagggtgtagatgaccaggcttggaaacatttgcaggacgagtttctccgcgtcacagggagtgattcgatttag

SEQ ID NO: 20101 - protein, 339 aa, Muscodor strobelii
  misc_feature: SGI Peptide ID NO. 566775
  misc_feature (1)..(336): NCBI GI: 121719480 Blast Desc: conserved [Aspergillus clavatus NRRL 1] gi|119404637|gb|EAW15013.1| conserved [Aspergillus clavatus NRRL 1]
  misc_feature (1)..(339): NCBI GI: 119487451 Blast Desc: NFIA_030540 [Neosartorya fischeri NRRL 181] gi|119410675|gb|EAW20621.1| conserved [Neosartorya fischeri NRRL 181]
  misc_feature (1)..(339): NCBI GI: 116198989 Blast Desc: CHGG_07650 [Chaetomium globosum CBS 148.51] gi|88178929|gb|EAQ86397.1| CHGG_07650 [Chaetomium globosum CBS 148.51]
  misc_feature (1)..(334): NCBI GI: 255932335 Blast Desc: Pc12g08960 [Penicillium chrysogenum Wisconsin 54-1255] gi|211582343|emb|CAP80523.1| Pc12g08960 [Penicillium chrysogenum Wisconsin 54-1255]
  misc_feature (1)..(339): NCBI GI: 46134165 Blast Desc: FG09222.1 [Gibberella zeae PH-1]
  misc_feature (1)..(339): NCBI GI: 256732276 Blast Desc: NECHADRAFT_80716 [Nectria haematococca mpVI 77-13-4]
  misc_feature (1)..(339): NCBI GI: 145248247 Blast Desc: An13g02340 [Aspergillus niger] gi|134081123|emb|CAK41633.1| protein product [Aspergillus niger]
  misc_feature (1)..(336): NCBI GI: 171688050 Blast Desc: protein product [Podospora anserina] gi|170943987|emb|CAP70097.1| protein product [Podospora anserina]
  misc_feature (1)..(339): NCBI GI: 116197096 Blast Desc: CHGG_05146 [Chaetomium globosum CBS 148.51] gi|88181059|gb|EAQ88527.1| CHGG_05146 [Chaetomium globosum CBS 148.51]
  misc_feature (1)..(337): NCBI GI: 212526408 Blast Desc: short-chain dehydrogenases/reductase, [Penicillium marneffei ATCC 18224] gi|210072759|gb|EEA26846.1| short-chain dehydrogenases/reductase, [Penicillium marneffei ATCC 18224]
  misc_feature: Useful for introducing or modulating the production of volatile compounds
MVSLSVVRASNAAIKTELPQGLVAVFVGATSGIGRVSLERFVEHAAAPRVYFTGRRQQIGLEIQAALRKLNPEGEYIFLESDGSLLRAVDALCQDIKEKEKSINLLCITMGTLLSGTTTEEGLHYAMAVSYYCRMRFIVNLLPLIQKAGKLRRVVTVLAGTKEGKIYPSDFPGLTLPFSKVKGHTAAMITLALEHLSRQSPDVSFVHNYPGFVKTALSRELKPSLMATVMKGVFGVVALFRNTPIEEVGDRQCFLATSAIFPPRTGGQADGVALSSGLSIAAGTDGTKGGGAYTVDDNSEPGGQNVLDILAGLREEGVDDQAWKHLQDEFLRVTGSDSI

SEQ ID NO: 20102 - DNA, 2190 bp, Muscodor strobelii
  misc_feature: SGI EST ID NO. CUFF.47025.0
  misc_feature: Variant of the nucleotide sequence at SEQ ID NO 20100
ctttcactgtgcaggtaagggatattcagtgatgtccagtaatttcccagcttcacacacggctatgcatacccgttccattattactcggcaaagatagtgtcttaaaggttagacgcttacaaaagagacataaattttactacgattgctatcaatgtttggacatgatcttcggactcagacttgtgatatttaagggacaacaatgagaggattattttacgctgagatgatagctatccgcacaacacctatctatagggtgaccctcccttttgagcagagtgctacagcacatgcaccacctaacatggttacatcattcgaaccctctgctagcagtggtataccactattttcaccacctatcgtggcaggcccggaggtctatattacctagtacaacttcaactgtcaagcaggacttcgtatccagttaagcagtggtgatgaatgtgaccttgacagtttgcatgcaggacgagacttgtcggcttgtaggattaagcaagaattgcaagagaagcgacttcaaagacttaagacgacgcgtaatatggcaaacggtcccgatcgtgacgaggatctctccggggacctgggacgtgtcgtattggacttcaaggcttgtcaagcaatgggcttatgctgggaagtctaggtctcaataggttgcattggaagcgagccaatcgcgatggcgtcaggaagtctatgatgcaagggaacgacaggtcgcaacctaggcgtcttggaaccatcatcctcatcatcagcaaagccgtgtcgcattggagctcacatcttggacggtgtgtgggcagtacagcgaagatggtctccctaagcgtcgtccgcgcctccaatgcagccatcaagaccgagttgccacaaggcctcgtcgccgttttcgtcggcgccacgagcgggataggcagggtgtcgctggagcgcttcgtcgagcatgccgcggcaccgcgtgtctactttaccggccgaaggcagcagatcggtctcgaaatccaagctgcccttcggaagctaaatccagaaggcgagtacatcttccttgagagcgacggcagtcttctccgcgccgttgatgcgctatgccaagacatcaaggaaaaggagaaatcgatcaatctgctgtgcatcaccatgggcactctgctcagcggcacgaccacggaggagggcctgcactacgccatggccgtctcgtattactgtcgcatgcgcttcattgtcaatcttctgccgttgattcaaaaggccggcaaactccgtcgtgtcgtgaccgtgctcgcgggcacaaaggaaggaaagatctacccttccgatttcccaggcctcacgctccccttctccaaggttaagggtcacactgcggcaatgatcactttggccctcgagcacctgagcagacagagccccgacgtgtcttttgtacataattacccgggctttgtgaagacggcgttgtcacgtgagctcaagccatcgctaatggctactgtcatgaagggtgttttcggcgtcgttgctcttttccggaatacaccgattgaggaggtgggagatcgtcagtgcttcctagctacgagcgcaatattcccgccgcggacgggcgggcaggcggatggcgtcgcgctgtctagcggtctctccatcgctgccggcaccgatggtacgaagggcggaggtgcgtacacagtcgacgataatagcgagccgggcggacagaatgtcctagacattcttgccgggttgagagaagagggtgtagatgaccaggcttggaaacatttgcaggacgagtttctccgcgtcacagggagtgattcgatttagtttggcatggtgaacttggaagttcatgacgacacgatcaggcgttggtactcgtgattcaaggcgtaaacacgccgtgcagccgcaccagcccaagagtatacagccagtgtttgacacgagtctgtatgctgtgcacagtttccatacgtaccttactcagacgcgaacgaacttcagtatttcgtcagagcatttagcagcccaatccatgatgtagtttcagatcatgtgatacaggtgtcagcgacatcgaaactcgcttgagtaccgatgtcgtgatcttttatgctcgagtaagaaatcactgtttcaaatacacgattgctcctc

SEQ ID NO: 20103 - DNA, 1842 bp, Muscodor strobelii
  misc_feature: SGI cDNA ID NO. 566776
  misc_feature: Encodes the peptide sequence at SEQ ID NO 20104
atgtcttttggattctccgccggcgacttcatcgctgccctgcagctcgtccggcaagtaatctcagcactccgcgactccggcggctctggcgcggagtatagggagctcattggtgagctatacggacttgagaaggcgttgttggttgtcaagcagctcaatggtgctgatcaggagcagcatgtggaatacatggctcttcgccatgtcgcggctcagtgccagcagaccatcgatgctttctgcaccaagatcgacaaataccatacaccgtttcagagagggcgccaacaaagtagtgcaaagatgagattggggactgtcatcttaaagattcagtggagtttatgtaggaaggatgatctaacgaacttcaagactgatatagctgcccatgcacagtcgcttcagatcttgctctctgctgcgcaggtccgccaggcgagatttcaggcacagaaagcgaatctgcaatataggtcgataaccgaatccattcagtcaggaacgggacaaatcctcgagaagatcgggaccttcacagaagctgttactgaaggagcctttcagagcaagttcttcgtgcaaagaacggcagagatcattcggttcaatctctttgtgtttcaaatgctctatcttatatacacaactgtgctcagattaccacaacaagttgatcgagagcgacctgttattctttttgatgccttaggccgaatagcaccctttcacctggagtttgtgagatcatttgacgcgttcaaagcagtcctcgtcgcaaattttcgagacgttccctccggcatccgcaagattgagaatggtgaatttattgtccaggatgccgcgacaaagcgagaaatcaatcttcgtgggaactgggacaggtgtctctcgcctggtcaaagagtcgaaatgagcattgtcttccgctggaaatcgcgaagggcatttcagtgccccaattgctctgcacccacaggcgctatatataacaaggatgtcgaatgtgctgcttgtggtgtcatctttgggtcattcatcgaagtcgggtcgttacgacagaaagtgtcggtcgatcaacacgtcgcattcactcatgccttagggtcagatgtgaatgagaatgaagcaaagagcgttgcgcagaaaaaggagaagaaaatattgccaaagtcggcttacgacgagacagaggactacatccattatcgtcgagttaagatgattagacgcataactaagaagacatggaatactctactccagggcagccaacagcagacacacaacgagctaccgatgagaacaccaccttgctacccacaagaccaaatgaacgacagaagcaatagaggtcaggcagtggaagaaggagagataatcgatgcggacttggtagaccctgctactttcgagcaaattcttgaaatggatgaagatgacgatatcggccgcgaattctccaaatctatagtcgcaggtctgttttcgcaaggaagagactacatcgagattttcaagtcggccatccccgaaggagatctaggcaagatcgagagctacgcgcacgcgtggaagggtcactgttacaccgtcggggtccggcacttgggattgctgtgcgaacaaatgcagttttatgcgcgatatgctcgagcaaatcatatctcgtcatatgaagcagagtattgcaacacaaatgatccgattacgaacgacatcccggcttggttgcatagacagcttggtctcatggacttggagtatcagaaatctgaagcgggatttaagtccttctatcgcatcaagagttgggaccaagaggaggattga

SEQ ID NO: 20104 - protein, 613 aa, Muscodor strobelii
  misc_feature: SGI Peptide ID NO. 566776
  misc_feature (1)..(337): NCBI GI: 116201235 Blast Desc: CHGG_08502 [Chaetomium globosum CBS 148.51] gi|88177020|gb|EAQ84488.1| CHGG_08502 [Chaetomium globosum CBS 148.51]
  misc_feature (1)..(367): NCBI GI: 240107045 Blast Desc: CPC735_018360 [Coccidioides posadasii C735 delta SOWgp]
  misc_feature (3)..(351): NCBI GI: 238844501 Blast Desc: conserved [Microsporum canis CBS 113480]
  misc_feature (1)..(224): NCBI GI: 119175134 Blast Desc: CIMG_09468 [Coccidioides immitis RS]
  misc_feature (3)..(346): NCBI GI: 119172594 Blast Desc: [Coccidioides immitis RS]
  misc_feature (33)..(346): NCBI GI: 240111656 Blast Desc: CPC735_011190 [Coccidioides posadasii C735 delta SOWgp]
  misc_feature (1)..(349): NCBI GI: 169621809 Blast Desc: SNOG_14117 [Phaeosphaeria nodorum SN15] gi|111057234|gb|EAT78354.1| SNOG_14117 [Phaeosphaeria nodorum SN15]
  misc_feature (1)..(146): NCBI GI: 156044975 Blast Desc: [Sclerotinia sclerotiorum 1980] gi|154694071|gb|EDN93809.1| [Sclerotinia sclerotiorum 1980]
  misc_feature (1)..(286): NCBI GI: 169595362 Blast Desc: SNOG_00419 [Phaeosphaeria nodorum SN15] gi|111070794|gb|EAT91914.1| SNOG_00419 [Phaeosphaeria nodorum SN15]
  misc_feature (1)..(350): NCBI GI: 171684115 Blast Desc: protein product [Podospora anserina] gi|170942018|emb|CAP67670.1| protein product [Podospora anserina]
MSFGFSAGDFIAALQLVRQVISALRDSGGSGAEYRELIGELYGLEKALLVVKQLNGADQEQHVEYMALRHVAAQCQQTIDAFCTKIDKYHTPFQRGRQQSSAKMRLGTVILKIQWSLCRKDDLTNFKTDIAAHAQSLQILLSAAQVRQARFQAQKANLQYRSITESIQSGTGQILEKIGTFTEAVTEGAFQSKFFVQRTAEIIRFNLFVFQMLYLIYTTVLRLPQQVDRERPVILFDALGRIAPFHLEFVRSFDAFKAVLVANFRDVPSGIRKIENGEFIVQDAATKREINLRGNWDRCLSPGQRVEMSIVFRWKSRRAFQCPNCSAPTGAIYNKDVECAACGVIFGSFIEVGSLRQKVSVDQHVAFTHALGSDVNENEAKSVAQKKEKKILPKSAYDETEDYIHYRRVKMIRRITKKTWNTLLQGSQQQTHNELPMRTPPCYPQDQMNDRSNRGQAVEEGEIIDADLVDPATFEQILEMDEDDDIGREFSKSIVAGLFSQGRDYIEIFKSAIPEGDLGKIESYAHAWKGHCYTVGVRHLGLLCEQMQFYARYARANHISSYEAEYCNTNDPITNDIPAWLHRQLGLMDLEYQKSEAGFKSFYRIKSWDQEED

SEQ ID NO: 20105 - DNA, 2209 bp, Muscodor strobelii
  misc_feature: SGI EST ID NO. CUFF.47033.0
  misc_feature: Variant of the nucleotide sequence at SEQ ID NO 20103
ggtgctgatcaggagcagcatgtggaatacatggctcttcgccatgtcgcggctcagtgccagcagaccatcgatgctttctgcaccaagatcgacaaataccatacaccgtttcagagagggcgccaacaaagtagtgcaaagatgagattggggactgtcatcttaaagattcagtggagtttatgtaggaaggatgatctaacgaacttcaagactgatatagctgcccatgcacagtcgcttcagatcttgctctctgctgcgcaggtccgccaggcgagatttcaggcacagaaagcgaatctgcaatataggtcgataaccgaatccattcagtcaggaacgggacaaatcctcgagaagatcgggaccttcacagaagctgttactgaaggagcctttcagagcaagttcttcgtgcaaagaacggcagagatcattcggttcaatctctttgtgtttcaaatgctctatcttatatacacaactgtgctcagattaccacaacaagttgatcgagagcgacctgttattctttttgatgccttaggccgaatagcaccctttcacctggagtttgtgagatcatttgacgcgttcaaagcagtcctcgtcgcaaattttcgagacgttccctccggcatccgcaagattgagaatggtgaatttattgtccaggatgccgcgacaaagcgagaaatcaatcttcgtgggaactgggacaggtgtctctcgcctggtcaaagagtcgaaatgagcattgtcttccgctggaaatcgcgaagggcatttcagtgccccaattgctctgcacccacaggcgctatatataacaaggatgtcgaatgtgctgcttgtggtgtcatctttgggtcattcatcgaagtcgggtcgttacgacagaaagtgtcggtcgatcaacacgtcgcattcactcatgccttagggtcagatgtgaatgagaatgaagcaaagagcgttgcgcagaaaaaggagaagaaaatattgccaaagtcggcttacgacgagacagaggactacatccattatcgtcgagttaagatgattagacgcataactaagaagacatggaatactctactccagggcagccaacagcagacacacaacgagctaccgatgagaacaccaccttgctacccacaagaccaaatgaacgacagaagcaatagaggtcaggcagtggaagaaggagagataatcgatgcggacttggtagaccctgctactttcgagcaaattcttgaaatggatgaagatgacgatatcggccgcgaattctccaaatctatagtcgcaggtctgttttcgcaaggaagagactacatcgagattttcaagtcggccatccccgaaggagatctaggcaagatcgagagctacgcgcacgcgtggaagggtcactgttacaccgtcggggtccggcacttgggattgctgtgcgaacaaatgcagttttatgcgcgatatgctcgagcaaatcatatctcgtcatatgaagcagagtattgcaacacaaatgatccgattacgaacgacatcccggcttggttgcatagacagcttggtctcatggacttggagtatcagaaatctgaagcgggatttaagtccttctatcgcatcaagagttgggaccaagaggaggattgataagtgactacggcggctgagacccaacctccgagggacagcatgcgattgaggtgatatgttaaaaggttgcatatacgcagacccccatggtttacctcggtactatgaccacgaacaccaacgtgatgtaggaagctggcagactgcaagcgatcaagctcagttaagtctgcgactagaagtacttctgagatatctttatagaacttcaaacgtaggtacagtgtaatataagtaacgtagtcgtactatttatcacattgtgtttcatagcctacctactactcacttactgcctgccttgttacaatacgaggcatcgtataccatgaaatacgctgcgtattctcccctcccgccgaacatcgagtcgtcttgaatgacgcaatcaatctccttgaaacctaatcgggcatatagcccccggcccgctttgaaggccaatgtgaatattgggagacccatattttgcgctgcagtgatcccgctctgaacgagtgcggtagcgacccctttgcctttattgtcg

SEQ ID NO: 20106 - DNA, 741 bp, Muscodor strobelii
  misc_feature: SGI cDNA ID NO. 566777
  misc_feature: Elevated expression when VOC is produced
  misc_feature: Encodes the peptide sequence at SEQ ID NO 20107
atgcctcagggcgatggcagtacagattggagcattgcggcatgtacccttaatgatgcagccgcccttgcccgcaataacatggctgctttttgggaggacccaacatggattttgttatggtctaaagacatcacccttgactttctgattcaagaatcaactaagcgacagccgcggaatcttttacgcaatcgggattccacacggcaccaaaaggcaacagatccccgcaccggtgctgtagttggctatgcccgttggcttctcccatccagccacggcgccgagaatgccgatcaagatctaaaatgggccgaggcgcagataccagaagctactcgtgaagagaaaataaaatctgactcgttgtatcggtccgcctggtggagtccatcgagtgatatggacgggcttgatgagatgaacctggcggtcagatcacggattcttaccgaaagaccgtatctagagctcgattacctagcagtgcaccccgacaataaaggcaaaggggtcgctaccgcactcgttcagagcgggatcactgcagcgcaaaatatgggtctcccaatattcacattggccttcaaagcgggccgggggctatatgcccgattaggtttcaaggagattgattgcgtcattcaagacgactcgatgttcggcgggaggggagaatacgcagcgtatttcatggtatacgatgcctcgtattgtaacaaggcaggcagtaagtga

SEQ ID NO: 20107 - protein, 246 aa, Muscodor strobelii
  misc_feature: SGI Peptide ID NO. 566777
  misc_feature (74)..(210): Pfam Id: PF00583 Pfam Desc: Acetyltransferase (GNAT) family
  misc_feature (146)..(210): Pfam Id: PF00583 Pfam Desc: Acetyltransferase (GNAT) family
  misc_feature (8)..(238): NCBI GI: 238498744 Blast Desc: conserved [Aspergillus flavus NRRL3357] gi|220693881|gb|EED50226.1| conserved [Aspergillus flavus NRRL3357]
  misc_feature (8)..(235): NCBI GI: 169781916 Blast Desc: [Aspergillus oryzae RIB40] gi|83774163|dbj|BAE64288.1| protein product [Aspergillus oryzae]
  misc_feature (10)..(235): NCBI GI: 67902772 Blast Desc: AN8373.2 [Aspergillus nidulans FGSC A4] gi|40747737|gb|EAA66893.1| AN8373.2 [Aspergillus nidulans FGSC A4] gi|259484303|tpe|CBF80408.1| TPA: conserved [Aspergillus FGSC
  misc_feature (8)..(234): NCBI GI: 169780704 Blast Desc: [Aspergillus oryzae RIB40] gi|83773556|dbj|BAE63683.1| protein product [Aspergillus oryzae]
  misc_feature (28)..(237): NCBI GI: 115402665 Blast Desc: conserved [Aspergillus terreus NIH2624] gi|114189255|gb|EAU30955.1| conserved [Aspergillus terreus NIH2624]
  misc_feature (8)..(234): NCBI GI: 238505100 Blast Desc: conserved [Aspergillus flavus NRRL3357] gi|220689893|gb|EED46243.1| conserved [Aspergillus flavus NRRL3357]
  misc_feature (13)..(234): NCBI GI: 46116478 Blast Desc: FG04081.1 [Gibberella zeae PH-1]
  misc_feature (12)..(238): NCBI GI: 212546885 Blast Desc: conserved [Penicillium marneffei ATCC 18224] gi|210065116|gb|EEA19211.1| conserved [Penicillium marneffei ATCC 18224]
  misc_feature (10)..(234): NCBI GI: 189206285 Blast Desc: conserved [Pyrenophora tritici-repentis Pt-1C-BFP] gi|187975570|gb|EDU42196.1| conserved [Pyrenophora tritici-repentis Pt-1C-BFP]
  misc_feature (10)..(241): NCBI GI: 145235737 Blast Desc: An03g06420 [Aspergillus niger] gi|134058206|emb|CAK38398.1| protein product [Aspergillus niger]
  misc_feature: Useful for introducing or modulating the production of volatile compounds
MPQGDGSTDWSIAACTLNDAAALARNNMAAFWEDPTWILLWSKDITLDFLIQESTKRQPRNLLRNRDSTRHQKATDPRTGAVVGYARWLLPSSHGAENADQDLKWAEAQIPEATREEKIKSDSLYRSAWWSPSSDMDGLDEMNLAVRSRILTERPYLELDYLAVHPDNKGKGVATALVQSGITAAQNMGLPIFTLAFKAGRGLYARLGFKEIDCVIQDDSMFGGRGEYAAYFMVYDASYCNKAGSK

SEQ ID NO: 20108 - DNA, 258 bp, Muscodor strobelii
  misc_feature: SGI cDNA ID NO. 566778
  misc_feature: Encodes the peptide sequence at SEQ ID NO 20109
atgcatctgatcaaggtctcaatcgctgttctttcagctttggccaccacttcttttgctctcccgctagagcatgacgagacacttgtagtccgcgatcccagcaaggtcaaatacgacgcgtatggcgtcgagaagcgtgatcctgaccctagtaaagtgaagtacgatgcttacggtgttgggaagcgcgaccctgaccctagcaaggtcaagtacgacgcctatggggtcaataagcgcgagcccgatcattag

SEQ ID NO: 20109 - protein, 85 aa, Muscodor strobelii
  misc_feature: SGI Peptide ID NO. 566778
MHLIKVSIAVLSALATTSFALPLEHDETLVVRDPSKVKYDAYGVEKRDPDPSKVKYDAYGVGKRDPDPSKVKYDAYGVNKREPDH

SEQ ID NO: 20110 - DNA, 879 bp, Muscodor strobelii
  misc_feature: SGI cDNA ID NO. 566779
  misc_feature: Encodes the peptide sequence at SEQ ID NO 20111
atgtacttccagtcaaaagagagattaaacaaaactctacattctgacgaggcaaggagatcaagaagcacagaagacacgggttatagggatgaggatgcgctgttgcccaaacgtttcagaaggaaatactctcacacggcgtatagcttttcatttggtaacggatatcttgccatcgtcaacgcagtactgttagtgctcgtcgtctcagttctggtgatgtcacggcaaggagtcgttctttcagagtctcagtgcgctgccgaaacttcgtattactgtgagtaccaggaaggaaacgagaagtcgagcatcgtcgagttcgaatatgtcagatttcaaggggcgttcgaacatcagaatatatacaagggtccaccgaacaaagccctcgacgaagcatgggatattctcgttcacaacaacaactcgggggtaggtggcgatgtcatagaccgaattcaaaagtcgcgtgatgccgtcaagtattccgaagcgcagggtgggcaatatgttgtcgggatcgaggtgtttcaccacctgcactgtcttaacattgtccggcagtacacttataaagactactatatgcgtgaagaaaaccgcccgatgagttttactgacactgagggcgtccttcggcaacatatcgaccattgcattgacatgttgcgccagacattaatgtgcacagcagacgtaggtatcgtgacgtacagctgggttaagccctggggactctacccagatttcagcactcaccacaaatgtcggaaattagacaagattgttgcttgggcggatgaacatagcgctcttgtagaggacccagagcctgacgatgacaccgtctggctccagggaccaccacaatga

SEQ ID NO: 20111 - protein, 292 aa, Muscodor strobelii
  misc_feature: SGI Peptide ID NO. 566779
  misc_feature (81)..(292): NCBI GI: 238505104 Blast Desc: conserved [Aspergillus flavus NRRL3357] gi|220689895|gb|EED46245.1| conserved [Aspergillus flavus NRRL3357]
  misc_feature (102)..(292): NCBI GI: 169780700 Blast Desc: [Aspergillus oryzae RIB40] gi|83773554|dbj|BAE63681.1| protein product [Aspergillus oryzae]
  misc_feature (31)..(271): NCBI GI: 67902778 Blast Desc: AN8376.2 [Aspergillus nidulans FGSC A4] gi|40747740|gb|EAA66896.1| AN8376.2 [Aspergillus nidulans FGSC A4] gi|259484308|tpe|CBF80416.1| TPA: [Aspergillus nidulans FGSC
  misc_feature (25)..(291): NCBI GI: 212534390 Blast Desc: conserved [Penicillium marneffei ATCC 18224] gi|210069750|gb|EEA23840.1| conserved [Penicillium marneffei ATCC 18224]
  misc_feature (69)..(286): NCBI GI: 242215559 Blast Desc: POSPLDRAFT_130143 [Postia placenta Mad-698-R] gi|220727314|gb|EED81237.1| POSPLDRAFT_130143 [Postia placenta Mad-698-R]
  misc_feature (21)..(280): NCBI GI: 240277353 Blast Desc: conserved [Ajellomyces capsulatus H143]
  misc_feature (107)..(271): NCBI GI: 242222427 Blast Desc: [Postia placenta Mad-698-R] gi|220723760|gb|EED77873.1| [Postia placenta Mad-698-R]
  misc_feature (17)..(244): NCBI GI: 115402673 Blast Desc: conserved [Aspergillus terreus NIH2624] gi|114189259|gb|EAU30959.1| conserved [Aspergillus terreus NIH2624]
  misc_feature (113)..(279): NCBI GI: 145244821 Blast Desc: An11g07050 [Aspergillus niger] gi|134079372|emb|CAK97001.1| protein product [Aspergillus niger]
  misc_feature (107)..(270): NCBI GI: 226288946 Blast Desc: conserved [Paracoccidioides brasiliensis Pb18]
MYFQSKERLNKTLHSDEARRSRSTEDTGYRDEDALLPKRFRRKYSHTAYSFSFGNGYLAIVNAVLLVLVVSVLVMSRQGVVLSESQCAAETSYYCEYQEGNEKSSIVEFEYVRFQGAFEHQNIYKGPPNKALDEAWDILVHNNNSGVGGDVIDRIQKSRDAVKYSEAQGGQYVVGIEVFHHLHCLNIVRQYTYKDYYMREENRPMSFTDTEGVLRQHIDHCIDMLRQTLMCTADVGIVTYSWVKPWGLYPDFSTHHKCRKLDKIVAWADEHSALVEDPEPDDDTVWLQGPPQ

SEQ ID NO: 20112 - DNA, 960 bp, Muscodor strobelii
  misc_feature: SGI cDNA ID NO. 566780
  misc_feature: Elevated expression when VOC is produced
  misc_feature: Encodes the peptide sequence at SEQ ID NO 20113
atgtcacctatccctaagatcgatgtccatcatcatgtcatacctccccaactcagtggtgtcaagaacggtatgaagttcgtcaaggaatgggagtggtctgttgctatcgacgagtcattctgcaagagcatcggcgtccgaactaggattctatctgttagtactccgggcgtcacacacatcgaggacccggaagagagcgcagttttagcccgttctatgaatgagtattgtgcttccctccgagacagtgaccctaagtcgtacggcttcttcgccaccgtgccgtctctcgagcacactgagcttgccctccgcgagctacgatatgctcttgatgagctgcatgccgatggtgttacattgtttacgagctatgcttcaccacaaggttacctaggtcacccagagtttgtgccgatatgggaagagctcaacacgcgcaagaccatcgctttcgttcacccgattactgccaaaggcgcaaccacttttgatgagcgccttcccatgccggcattcgactggcctcatgagacgggacgcactgccatcgacttgatcttgaacagacgtattcagcagtttcccgatgttaaaatcatactatcacatggaggtggtacacttgccgcgctggtccgtcgttctacggtcatcgcattaccgcaatttggctctcacatgagtgaagaggacatcattggccaggcgaaatgcctttactttgatctcgctctttccggaagtagtgagatgttgccattgattcttggtttcgccgccaaggatcacctcctattcggtagcgactttccccatgccaccgcaccctttagccaggccatgacgaaatttatcgacgagttccccctcgacgaggaaaagagaaaggagatatatcacggagcagcagagaaattatttccgagactccatggtatctctgactcttga

SEQ ID NO: 20113 - protein, 319 aa, Muscodor strobelii
  misc_feature: SGI Peptide ID NO. 566780
  misc_feature (7)..(312): Pfam Id: PF04909 Pfam Desc: Amidohydrolase
  misc_feature (6)..(312): NCBI GI: 145230461 Blast Desc: An01g11270 [Aspergillus niger] gi|134055657|emb|CAK44031.1| protein product [Aspergillus niger]
  misc_feature (3)..(313): NCBI GI: 169777657 Blast Desc: [Aspergillus oryzae RIB40] gi|238494842|ref|XP_002378657.1| 2-amino-3-carboxymuconate-6-semialdehyde decarboxylase, flavus
  misc_feature (4)..(317): NCBI GI: 121710946 Blast Desc: amidohydrolase family protein [Aspergillus clavatus NRRL 1] gi|119401239|gb|EAW11663.1| amidohydrolase family protein [Aspergillus clavatus NRRL 1]
  misc_feature (3)..(313): NCBI GI: 145248824 Blast Desc: An14g01235 [Aspergillus niger] gi|134081422|emb|CAK41904.1| protein product [Aspergillus niger]
  misc_feature (6)..(318): NCBI GI: 145256042 Blast Desc: An10g00120 [Aspergillus niger CBS 513.88] gi|134078575|emb|CAK49103.1| protein product [Aspergillus niger]
  misc_feature (3)..(313): NCBI GI: 115437270 Blast Desc: [Aspergillus terreus NIH2624] gi|114188583|gb|EAU30283.1| [Aspergillus terreus NIH2624]
  misc_feature (6)..(313): NCBI GI: 189202840 Blast Desc: amidohydrolase family protein [Pyrenophora tritici-repentis Pt-1C-BFP] gi|187984855|gb|EDU50343.1| amidohydrolase family protein [Pyrenophora tritici-repentis
  misc_feature (6)..(313): NCBI GI: 256724908 Blast Desc: NECHADRAFT_91485 [Nectria haematococca mpVI 77-13-4]
  misc_feature (6)..(313): NCBI GI: 255939386 Blast Desc: Pc16g00390 [Penicillium chrysogenum Wisconsin 54-1255] gi|211585085|emb|CAP92709.1| Pc16g00390 [Penicillium chrysogenum Wisconsin 54-1255]
  misc_feature (6)..(313): NCBI GI: 259481874 Blast Desc: TPA: conserved [Aspergillus nidulans FGSC A4]
  misc_feature (6)..(274): SWISSPROT Homolog: EC 4.1.1.45 Aminocarboxymuconate-semialdehyde decarboxylase
  misc_feature: Useful for introducing or modulating the production of volatile compounds
MSPIPKIDVHHHVIPPQLSGVKNGMKFVKEWEWSVAIDESFCKSIGVRTRILSVSTPGVTHIEDPEESAVLARSMNEYCASLRDSDPKSYGFFATVPSLEHTELALRELRYALDELHADGVTLFTSYASPQGYLGHPEFVPIWEELNTRKTIAFVHPITAKGATTFDERLPMPAFDWPHETGRTAIDLILNRRIQQFPDVKIILSHGGGTLAALVRRSTVIALPQFGSHMSEEDIIGQAKCLYFDLALSGSSEMLPLILGFAAKDHLLFGSDFPHATAPFSQAMTKFIDEFPLDEEKRKEIYHGAAEKLFPRLHGISDS

SEQ ID NO: 20114 - DNA, 1531 bp, Muscodor strobelii
  misc_feature: SGI EST ID NO. CUFF.47048.0
  misc_feature: Variant of the nucleotide sequence at SEQ ID NO 20112
gaattccatattcaactgcttcgcactatgtctctatttgaaatgctgtaagcgtgcagcacagattggacacgacctgtcaagggcatctcggatgctcccgcggaggatttcgtggattcctcgcgatctagccgactcaccatggaatcatcggcacgacggggcagcgtcgtccattcgcagggccgaaagtgcgatatatcgcaagaagcaatatatataaagaagcagtgcatctgcaattggccaccatcgcctaatgtacacattgcctacatctccatcagacgataacatcaccgccagacctcaagcccagtcacagacatgtcacctatccctaagatcgatgtccatcatcatgtcatacctccccaactcagtggtgtcaagaacggtatgaagttcgtcaaggaatgggagtggtctgttgctatcgacgagtcattctgcaagagcatcggcgtccgaactaggattctatctgttagtactccgggcgtcacacacatcgaggacccggaagagagcgcagttttagcccgttctatgaatgagtattgtgcttccctccgagacagtgaccctaagtcgtacggcttcttcgccaccgtgccgtctctcgagcacactgagcttgccctccgcgagctacgatatgctcttgatgagctgcatgccgatggtgttacattgtttacgagctatgcttcaccacaaggttacctaggtcacccagagtttgtgccgatatgggaagagctcaacacgcgcaagaccatcgctttcgttcacccgattactgccaaaggcgcaaccacttttgatgagcgccttcccatgccggcattcgactggcctcatgagacgggacgcactgccatcgacttgatcttgaacagacgtattcagcagtttcccgatgttaaaatcatactatcacatggaggtggtacacttgccgcgctggtccgtcgttctacggtcatcgcattaccgcaatttggctctcacatgagtgaagaggacatcattggccaggcgaaatgcctttactttgatctcgctctttccggaagtagtgagatgttgccattgattcttggtttcgccgccaaggatcacctcctattcggtagcgactttccccatgccaccgcaccctttagccaggccatgacgaaatttatcgacgagttccccctcgacgaggaaaagagaaaggagatatatcacggagcagcagagaaattatttccgagactccatggtatctctgactcttgatgtgacaatatgatcatcttcacgtgcttcgcatagcaagattggacatattagactaaggctatgtcagatttgcacgccgtaccaaatccgttttgaaggcttgttgcgcagttcatgtattgcgataccaaagactccgagtatatacaactcatgacacatttattatcactatagcaatattgttcctcgctgcgaccgcgcataatcaatgacgtgaaatcctctacaatgatac

SEQ ID NO: 20115 - DNA, 1440 bp, Muscodor strobelii
  misc_feature: SGI cDNA ID NO. 566781
  misc_feature: Encodes the peptide sequence at SEQ ID NO 20116
atgttcgaggtttttgcatactttgctgttcaaagcatatatcgtttgttcttccatcctcttgcgaactatccagggcctaagctggcagcaatatcaccattatacaaggtgtatatggacactagcggccggctgcatctcatcatgaaagatctacacgcgacatatggcgatgtgattcgtgttggacctaatgagttaatattcgcaacatctcaagcgcaccaggatatacatggccacatgacgaagggcaaagcgcggttcctgaagacagaattctacgataatggcgatccgagcccacgtattacgggtgctcgagatcccggggaccatgctcgcttgcgcaaggcgctttctcatgccttcagtgcgcaagcccttcgagaccaagaggatatcgttcagaagtacatcaacattttcatccagcagatctctgatctcggtaatcatgggaacaagcgtttgaatatgtctgaactgttcaactggatcactttcgacattgtaggcgacctgtcgttcggcgtcccctttggcgcttgtgagaacgggaagacgcctgaatggatcacgatactcattaacttcatattcagcacatcgctgacaacagtgcggaagaagtatccaatcctggagctctatctgccgttcgtgctgccgcgcggatcgacagagaaggtcgcaatgcacaggaagctgacattggagcatacacaaaagcgtgtggcaatgggaaacacggggcgaatggacttcttcgctcacatgctaaagaagaacacaatgtcagaggccgagatgatgagccagtcagcatcactcatcattgccggatctgaaacaacagcaacgtcgatgacgggtacaacatggtacttgctgcataatccagaatgcctcgccaagttacagcacgaagtgcgcagtactttcacaagtgcatcagatataacgggcgacgcgacagctaagctaccttatctccgtgccgtgattgaagaaagtctgcgcatgttccctcctgttgtgattgcgcttccacggcactcaccaggtgccattattgatggacactgggtcccagagggtgtgtcagtcggcgtctcgcctcttcttacgaacaagagtcctaggtatttccgtgatcctgaaaagttccgtccggagcgctggatgtctgttagtgacgggggcgaagaaggcgacgacaggaaggccagccagcctttcctgacaggcccacgggcttgcctcggtatcaatctggcaatgcttgaaatgcggatcgtcctagcgaagcttatttggactttcgattgggagcttgcaagacctctcgatcagtggacagagaactgcaaggtacagattttctggctgaaaccagagctctggatcaagtaccacccgcgcacgatgatttga

SEQ ID NO: 20116 - protein, 479 aa, Muscodor strobelii
  misc_feature: SGI Peptide ID NO. 566781
  misc_feature (25)..(473): Pfam Id: PF00067 Pfam Desc: Cytochrome P450
  misc_feature (254)..(473): Pfam Id: PF00067 Pfam Desc: Cytochrome P450
  misc_feature (10)..(449): NCBI GI: 46138361 Blast Desc: FG10695.1 [Gibberella zeae PH-1]
  misc_feature (42)..(475): NCBI GI: 154296440 Blast Desc: BC1G_13046 [Botryotinia fuckeliana B05.10] gi|150843407|gb|EDN18600.1| BC1G_13046 [Botryotinia fuckeliana B05.10]
  misc_feature (41)..(473): NCBI GI: 156054726 Blast Desc: SS1G_06211 [Sclerotinia sclerotiorum 1980] gi|154703991|gb|EDO03730.1| SS1G_06211 [Sclerotinia sclerotiorum 1980]
  misc_feature (7)..(478): NCBI GI: 256725278 Blast Desc: NECHADRAFT_45567 [Nectria haematococca mpVI 77-13-4]
  misc_feature (4)..(473): NCBI GI: 154289577 Blast Desc: BC1G_16084 [Botryotinia fuckeliana B05.10] gi|150849019|gb|EDN24212.1| BC1G_16084 [Botryotinia fuckeliana B05.10] gi|169635728|emb|CAP58782.1| cytochrome P40 monooxygenase
  misc_feature (7)..(475): NCBI GI: 67522561 Blast Desc: AN1737.2 [Aspergillus nidulans FGSC A4] gi|40744867|gb|EAA64023.1| AN1737.2 [Aspergillus nidulans FGSC A4] gi|259487082|tpe|CBF85469.1| TPA: cytochrome P450, (Eurofung)
  misc_feature (11)..(475): NCBI GI: 121716300 Blast Desc: benzoate 4-monooxygenase cytochrome P450 [Aspergillus clavatus NRRL 1] gi|119403916|gb|EAW14333.1| benzoate 4-monooxygenase cytochrome P450 [Aspergillus clavatus NRRL 1]
  misc_feature (13)..(478): NCBI GI: 169775077 Blast Desc: [Aspergillus oryzae RIB40] gi|83769869|dbj|BAE60004.1| protein product [Aspergillus oryzae]
  misc_feature (11)..(472): NCBI GI: 119481647 Blast Desc: benzoate 4-monooxygenase cytochrome P450 [Neosartorya fischeri NRRL 181] gi|119409006|gb|EAW18955.1| benzoate 4-monooxygenase cytochrome P450 [Neosartorya fischeri NRRL 181]
  misc_feature (7)..(472): NCBI GI: 255948778 Blast Desc: Pc22g12100 [Penicillium chrysogenum Wisconsin 54-1255] gi|211592173|emb|CAP98498.1| Pc22g12100 [Penicillium chrysogenum Wisconsin 54-1255]
  misc_feature (21)..(447): SWISSPROT Homolog: EC 1.14.13.12 Benzoate 4-monooxygenase
MFEVFAYFAVQSIYRLFFHPLANYPGPKLAAISPLYKVYMDTSGRLHLIMKDLHATYGDVIRVGPNELIFATSQAHQDIHGHMTKGKARFLKTEFYDNGDPSPRITGARDPGDHARLRKALSHAFSAQALRDQEDIVQKYINIFIQQISDLGNHGNKRLNMSELFNWITFDIVGDLSFGVPFGACENGKTPEWITILINFIFSTSLTTVRKKYPILELYLPFVLPRGSTEKVAMHRKLTLEHTQKRVAMGNTGRMDFFAHMLKKNTMSEAEMMSQSASLIIAGSETTATSMTGTTWYLLHNPECLAKLQHEVRSTFTSASDITGDATAKLPYLRAVIEESLRMFPPVVIALPRHSPGAIIDGHWVPEGVSVGVSPLLTNKSPRYFRDPEKFRPERWMSVSDGGEEGDDRKASQPFLTGPRACLGINLAMLEMRIVLAKLIWTFDWELARPLDQWTENCKVQIFWLKPELWIKYHPRTMI

SEQ ID NO: 20117 - DNA, 1134 bp, Muscodor strobelii
  misc_feature: SGI cDNA ID NO. 566782
  misc_feature: Encodes the peptide sequence at SEQ ID NO 20118
atggccattggagttgcgaaaaccataggtctacacaatgatgttgaggcgaactcgaacagtcagcttcaacgggagatggcgaggcgagcttggcacatgtgcttgacattggaacgcctcacgtgtttcacactgggacaatcggtactaacgacggcaactttcaaagtgccgttccccgctcaaatcgatgatgagtatctcctcgacgatggggtcggcagccagcccgccgggaggccatctattcaggacgcttttattgcaacgatcaagacattcgaagttatcgagcagatgaggaagctgacttacacttcatggacgcagcctctccaactacacgagctcaccgaagtcattcgacttaacgagtctctcgaccaaatcgagaggggcttgccggatcatttgacatataacagagacaccatccactctgtcaaaaggtcttctgtcttcaagctccaggcagagggagtatacacccgaattctctgcactcgtctgatactccttcgtccaaatatactagccgcggcgcgtaagtcgctgctcgcgcctgattccgagtcggagccacagatgcaaggtcaccagacttccgtccaggcggtattgcggactgagttgtcgctgatttgcgtccgcgccgccctatcgaccattcttacactgcacgctaatctcatctcggatcgccgcatcattagcgccatagcggttaacgcaacactaaaagctgcaacgatcattatcgcagcatctctggtcactgaactcggtgttgacttagatgacagcacttgctacggggatgcagtcgccaaagcgtatcaagtcttggacggtcacgtatggcaaaccgacggggcacgatccaataaggatcaactcagagagtttcaagaaacggcgaatagagagaaccaacgccgtcgagaaagaaaccaagtgccagaatcttctgcttcgttagaattggacccaaacatacaattgtctgagatagcgagtgacaatgttaactttgacttcaataatccggtatggaacttccaatggagtggcttcgcaagcccattggacgtcgggggctctttaccggactttgcccttgtgaatagatag

SEQ ID NO: 20118 - protein, 377 aa, Muscodor strobelii
  misc_feature: SGI Peptide ID NO. 566782
  misc_feature (1)..(67): Pfam Id: PF04082 Pfam Desc: Fungal specific transcription factor domain
  misc_feature (1)..(258): NCBI GI: 150864701 Blast Desc: Fungal specific transcription factor [Pichia stipitis CBS 6054] gi|149385957|gb|ABN65610.2| Fungal specific transcription factor [Pichia stipitis CBS 6054]
  misc_feature (1)..(258): NCBI GI: 150864329 Blast Desc: transcriptional regulatory protein [Pichia stipitis CBS 6054] gi|149385585|gb|ABN65072.2| transcriptional regulatory protein [Pichia stipitis CBS 6054]
  misc_feature (1)..(139): NCBI GI: 256735579 Blast Desc: NECHADRAFT_75561 [Nectria haematococca mpVI 77-13-4]
  misc_feature (1)..(260): NCBI GI: 212541140 Blast Desc: C6 transcription factor, [Penicillium marneffei ATCC 18224] gi|210068024|gb|EEA22116.1| C6 transcription factor, [Penicillium marneffei ATCC 18224]
  misc_feature (1)..(267): NCBI GI: 50417716 Blast Desc: DEHA0C01023g [Debaryomyces hansenii CBS767]
  misc_feature (1)..(267): NCBI GI: 199430429 Blast Desc: DEHA2C00946p [Debaryomyces hansenii]
  misc_feature (1)..(327): NCBI GI: 121700575 Blast Desc: fungal specific transcription factor domain protein [Aspergillus clavatus NRRL 1] gi|119396695|gb|EAW07126.1| fungal specific transcription factor domain protein [Aspergillus NRRL 1]
  misc_feature (1)..(234): NCBI GI: 70996674 Blast Desc: C6 transcription factor [Aspergillus fumigatus Af293] gi|66850727|gb|EAL91054.1| C6 transcription factor, [Aspergillus fumigatus Af293] gi|159131828|gb|EDP56941.1| C6 transcription
  misc_feature (1)..(234): NCBI GI: 119494275 Blast Desc: fungal specific transcription factor, [Neosartorya fischeri NRRL 181] gi|119412195|gb|EAW22136.1| fungal specific transcription factor, [Neosartorya fischeri NRRL 181]
  misc_feature (1)..(262): NCBI GI: 115449691 Blast Desc: conserved [Aspergillus terreus NIH2624] gi|114187620|gb|EAU29320.1| conserved [Aspergillus terreus NIH2624]
MAIGVAKTIGLHNDVEANSNSQLQREMARRAWHMCLTLERLTCFTLGQSVLTTATFKVPFPAQIDDEYLLDDGVGSQPAGRPSIQDAFIATIKTFEVIEQMRKLTYTSWTQPLQLHELTEVIRLNESLDQIERGLPDHLTYNRDTIHSVKRSSVFKLQAEGVYTRILCTRLILLRPNILAAARKSLLAPDSESEPQMQGHQTSVQAVLRTELSLICVRAALSTILTLHANLISDRRIISAIAVNATLKAATIIIAASLVTELGVDLDDSTCYGDAVAKAYQVLDGHVWQTDGARSNKDQLREFQETANRENQRRRERNQVPESSASLELDPNIQLSEIASDNVNFDFNNPVWNFQWSGFASPLDVGGSLPDFALVNR

SEQ ID NO: 20119 - DNA, 720 bp, Muscodor strobelii
  misc_feature: SGI EST ID NO. CUFF.47060.0
  misc_feature: Variant of the nucleotide sequence at SEQ ID NO 20117
ggagtatacacccgaattctctgcactcgtctgatactccttcgtccaaatatactagccgcggcgcgtaagtcgctgctcgcgcctgattccgagtcggagccacagatgcaaggtcaccagacttccgtccaggcggtattgcggactgagttgtcgctgatttgcgtccgcgccgccctatcgaccattcttacactgcacgctaatctcatctcggatcgccgcatcattagcgccatagcggttaacgcaacactaaaagctgcaacgatcattatcgcagcatctctggtcactgaactcggtgttgacttagatgacagcacttgctacggggatgcagtcgccaaagcgtatcaagtcttggacggtcacgtatggcaaaccgacggggcacgatccaataaggatcaactcagagagtttcaagaaacggcgaatagagagaaccaacgccgtcgagaaagaaaccaagtgccagaatcttctgcttcgttagaattggacccaaacatacaattgtctgagatagcgagtgacaatgttaactttgacttcaataatccggtatggaacttccaatggagtggcttcgcaagcccattggacgtcgggggctctttaccggactttgcccttgtgaatagatagacagttaacacaactatatttgcatctacagcaacaagtgaaaaagttacttgtattgtacgacca

SEQ ID NO: 20120 - DNA, 1194 bp, Muscodor strobelii
  misc_feature: SGI cDNA ID NO. 566783
  misc_feature: Reduced expression when VOC is produced
  misc_feature: Encodes the peptide sequence at SEQ ID NO 20121
atggcgaatactacacagacagccgtggctgctcgacagccccggcagcgacagcttcgaatgcaagccaacgagcaagctttcccggacatgaacacgattcggaaagcgattccagctcactgcttcgtgccctctaccgcgagatccatgggctatgtcgcacgcgatctgtccatggctgggggcctgacgtggacagctctgtctttgatccccatggtctcaaacccaacggccagggccgtttgctgggccgtttatggcttccttcagggactcgtcggggtcggcatctggatccttgcgcacgagtgcggccatggggcattctctgcccacaggggcctgaacgatgtggtgggctggattctccattcaattctgctggttccattcttctcctggaaattctcccacgcgcggcaccatcgatttacaggtcatctagagaaagatatggccttcgttccttcgacccggccacatctgtcgcatcaccaccagctggtgctagggttcgtcgatcccgaggttctagaggatgcgccgatcgtcaaccttgccaagcttattgcacaccagcttggggggtggcaggcgtatcttttgttcaatgtctcgtccgcagaccaaagtcttcagaacccagacgcaaagtggtggaggcgaagccatttcgatccctttagtagcgtatttcgacccagcgaagctgtctacatcgccctctcagatgtcggcattgctatggtgggagctggcatttggtacggggccaagatgctcgggtgggacacgatgttgctcttgtatggtgtgccatacttctgggtccatcactggttagtggccatcacctacctgcaccataatcatccagacgtaccgcattacgaaggcagccattggagttttgtggcaggcgctttggcaacagtcgaccgagatttcggtttcatcggtcgacacgtgttccacggtattatcgacactcacgttgtgcaccacttgttctcgaaaatcccattctatcatgccgaggaagcgacaaaagccataaagccgctacttggcgacctctatcatagtgacgaacagtcgtttatgggatcgctgtggacaacttggaacacgtgcaaatacgtcgagaaggacccgagcaatccgggagctatgaggtggacaagatag

SEQ ID NO: 20121 - protein, 397 aa, Muscodor strobelii
  misc_feature: SGI Peptide ID NO. 566783
  misc_feature (88)..(358): Pfam Id: PF00487 Pfam Desc: Fatty acid desaturase
  misc_feature (28)..(397): NCBI GI: 116191535 Blast Desc: CHGG_05485 [Chaetomium globosum CBS 148.51] gi|88181398|gb|EAQ88866.1| CHGG_05485 [Chaetomium globosum CBS 148.51]
  misc_feature (7)..(397): NCBI GI: 171680922 Blast Desc: protein product [Podospora anserina] gi|170940419|emb|CAP65646.1| protein product [Podospora anserina]
  misc_feature (6)..(395): NCBI GI: 39946863 Blast Desc: MGG_08474 [Magnaporthe grisea 70-15] gi|145012308|gb|EDJ96964.1| MGG_08474 [Magnaporthe grisea 70-15]
  misc_feature (5)..(397): NCBI GI: 256724499 Blast Desc: [Nectria haematococca mpVI 77-13-4]
  misc_feature (1)..(397): NCBI GI: 82658705 Blast Desc: bifunctional D12/D15 fatty acid desaturase [Gibberella moniliformis]
  misc_feature (19)..(397): NCBI GI: 261361627 Blast Desc: Delta(12) fatty acid desaturase [Verticillium albo-atrum VaMs.102]
  misc_feature (28)..(395): NCBI GI: 85088599 Blast Desc: NCU09497 [Neurospora crassa OR74A] gi|28919092|gb|EAA28621.1| NCU09497 [Neurospora crassa OR74A]
  misc_feature (24)..(397): NCBI GI: 115437526 Blast Desc: conserved [Aspergillus terreus NIH2624] gi|114188648|gb|EAU30348.1| conserved [Aspergillus terreus NIH2624]
  misc_feature (13)..(397): NCBI GI: 119467380 Blast Desc: oleate delta-12 desaturase [Neosartorya fischeri NRRL 181] gi|119405648|gb|EAW15599.1| oleate delta-12 desaturase [Neosartorya fischeri NRRL 181]
  misc_feature (9)..(397): NCBI GI: 70984529 Blast Desc: oleate delta-12 desaturase [Aspergillus fumigatus Af293] gi|66845398|gb|EAL85733.1| oleate delta-12 desaturase [Aspergillus fumigatus Af293] gi|159122555|gb|EDP47676.1| oleate
  misc_feature (16)..(386): SWISSPROT Homolog: EC 1.14.99.33 Delta(12)-fatty acid dehydrogenase
  misc_feature: Useful for introducing or modulating the production of volatile compounds
MANTTQTAVAARQPRQRQLRMQANEQAFPDMNTIRKAIPAHCFVPSTARSMGYVARDLSMAGGLTWTALSLIPMVSNPTARAVCWAVYGFLQGLVGVGIWILAHECGHGAFSAHRGLNDVVGWILHSILLVPFFSWKFSHARHHRFTGHLEKDMAFVPSTRPHLSHHHQLVLGFVDPEVLEDAPIVNLAKLIAHQLGGWQAYLLFNVSSADQSLQNPDAKWWRRSHFDPFSSVFRPSEAVYIALSDVGIAMVGAGIWYGAKMLGWDTMLLLYGVPYFWVHHWLVAITYLHHNHPDVPHYEGSHWSFVAGALATVDRDFGFIGRHVFHGIIDTHVVHHLFSKIPFYHAEEATKAIKPLLGDLYHSDEQSFMGSLWTTWNTCKYVEKDPSNPGAMRWTR

SEQ ID NO: 20122 - DNA, 742 bp, Muscodor strobelii
  misc_feature: SGI EST ID NO. CUFF.47215.0
  misc_feature: Variant of the nucleotide sequence at SEQ ID NO 20120
gtttatggcttccttcagggactcgtcggggtcggcatctggatccttgcgcacgagtgcggccatggggcattctctgcccacaggggcctgaacgatgtggtgggctggattctccattcaattctgctggttccattcttctcctggaaattctcccacgcgcggcaccatcgatttacaggtcatctagagaaagatatggccttcgttccttcgacccggccacatctgtcgcatcaccaccagctggtgctagggttcgtcgatcccgaggttctagaggatgcgccgatcgtcaaccttgccaagcttattgcacaccagcttggggggtggcaggcgtatcttttgttcaatgtctcgtccgcagaccaaagtcttcagaacccagacgcaaagtggtggaggcgaagccatttcgatccctttagtagcgtatttcgacccagcgaagctgtctacatcgccctctcagatgtcggcattgctatggtgggagctggcatttggtacggggccaagatgctcgggtgggacacgatgttgctcttgtatggtgtgccatacttctgggtccatcactggttagtggccatcacctacctgcaccataatcatccagacgtaccgcattacgaaggcagccattggagttttgtggcaggcgctttggcaacagtcgaccgagatttcggtttcatcggtcgacacgtgttccacggtattatcgacactcacg

SEQ ID NO: 20123 - DNA, 1281 bp, Muscodor strobelii
  misc_feature: SGI cDNA ID NO. 566784
  misc_feature: Reduced expression when VOC is produced
  misc_feature: Encodes the peptide sequence at SEQ ID NO 20124
atgcatctgcgatccgtcatcgccgtcgctggcggtctcgccgccaccgcgaccaacgccctgctaccccctcccgagatccccgacagcgaggtggtcaccaccctccccatcgccgagagccccttcgacttcccccagatcctcgacaactacaatgtcctcgccgagcagaccgtagccgtcaagtgccccggctgtctacgcgcccaccatcatcctaagcgtcctaccaacgccaaaggcaaaggccacaggaagcccgagcagaagcccgagctgaccccggtgggcggcaagggcggacatgtgccgggccaccacaagggcaagccccataaggagatccccagccacctgaagctcgacttcaccgtacaggagaccgagcacggcgacatcctcgccgtcaacggcttcgagctctaccccaaccccgatccatctcgaggcctgcctaccgccgccgtcctccccgaccgacaccccaagcaccgcggcaagcaggagcccaaggacgccctcgacgacttcctgaaccacgcctcccacgtcaacagccacggcatccccgaccacgcctacaagaccctcggcttcggcatgcacagctacaccgtccccaccaccgagacgggcgacgccgccctcgtcaacgtcgagctgcagatcatggaggtcggcgatgtcttcgtcaacggcatccccgacatcgtcgtgtctctcgtccagaccagctccggcaagctcgccatggccaagatcgacaccatcgagaggactgccgagagccccatggctggccagaaggacaaggagtgcaccactatgctctgccgctggaaggccgccctactgggtccgttccgcaagggatgtggccgcaagggtgccggcatggctggtgaccacccacctcctcccccatatcgccacggtcatcacggacatgagcacaggcacggggttgtccggttcgtcaccaagttcctgatcaacatcgtacttcccgtcctcgtcggtatcctcgccggcatctccgccgggctaatcggcatgatgatcggtaccgcccttgtctacacctggcgtttcttgttccgtcgcggcggcaagagccacggctgccgatactcgcgccgctgcaagaaggctgcccagaaggcccagctgcaggatgccaccgcagaggatgagaagtctggacttatggtcgaggaggaggagatcgaagctcctcctgcttatgttgagaatggaaagggtcagattgagatttaa

SEQ ID NO: 20124 - protein, 426 aa, Muscodor strobelii
  misc_feature: SGI Peptide ID NO. 566784
  misc_feature (1)..(419): NCBI GI: 116193457 Blast Desc: CHGG_06446 [Chaetomium globosum CBS 148.51] gi|88182359|gb|EAQ89827.1| CHGG_06446 [Chaetomium globosum CBS 148.51]
  misc_feature (23)..(416): NCBI GI: 171684853 Blast Desc: protein product [Podospora anserina] gi|170942387|emb|CAP68039.1| protein product [Podospora anserina]
  misc_feature (115)..(422): NCBI GI: 261353157 Blast Desc: conserved [Verticillium albo-atrum VaMs.102]
  misc_feature (118)..(418): NCBI GI: 145610103 Blast Desc: MGG_02708 [Magnaporthe grisea 70-15] gi|145017486|gb|EDK01849.1| MGG_02708 [Magnaporthe grisea 70-15]
  misc_feature (118)..(418): NCBI GI: 149209943 Blast Desc: MGCH7_ch7g453 [Magnaporthe grisea 70-15] gi|86196408|gb|EAQ71046.1| MGCH7_ch7g453 [Magnaporthe grisea 70-15]
  misc_feature (10)..(416): NCBI GI: 154310738 Blast Desc: BC1G_06843 [Botryotinia fuckeliana B05.10] gi|150851383|gb|EDN26576.1| BC1G_06843 [Botryotinia fuckeliana B05.10]
  misc_feature (1)..(294): NCBI GI: 209570376 Blast Desc: [Glomerella graminicola]
  misc_feature (118)..(403): NCBI GI: 46128257 Blast Desc: FG08506.1 [Gibberella zeae PH-1]
  misc_feature (3)..(401): NCBI GI: 156058554 Blast Desc: SS1G_03289 [Sclerotinia sclerotiorum 1980] gi|154701076|gb|EDO00815.1| SS1G_03289 [Sclerotinia sclerotiorum 1980]
  misc_feature (2)..(304): NCBI GI: 85113432 Blast Desc: NCU02164 [Neurospora crassa OR74A] gi|28926308|gb|EAA35287.1| NCU02164 [Neurospora crassa OR74A]
  misc_feature: Useful for introducing or modulating the production of volatile compounds
MHLRSVIAVAGGLAATATNALLPPPEIPDSEVVTTLPIAESPFDFPQILDNYNVLAEQTVAVKCPGCLRAHHHPKRPTNAKGKGHRKPEQKPELTPVGGKGGHVPGHHKGKPHKEIPSHLKLDFTVQETEHGDILAVNGFELYPNPDPSRGLPTAAVLPDRHPKHRGKQEPKDALDDFLNHASHVNSHGIPDHAYKTLGFGMHSYTVPTTETGDAALVNVELQIMEVGDVFVNGIPDIVVSLVQTSSGKLAMAKIDTIERTAESPMAGQKDKECTTMLCRWKAALLGPFRKGCGRKGAGMAGDHPPPPPYRHGHHGHEHRHGVVRFVTKFLINIVLPVLVGILAGISAGLIGMMIGTALVYTWRFLFRRGGKSHGCRYSRRCKKAAQKAQLQDATAEDEKSGLMVEEEEIEAPPAYVENGKGQIEI

SEQ ID NO: 20125 - DNA, 2491 bp, Muscodor strobelii
  misc_feature: SGI EST ID NO. CUFF.47218.0
  misc_feature: Variant of the nucleotide sequence at SEQ ID NO 20123
cgtccccacagtggtgagatgatggcatgtttcagatctgcagccgccagatgatagaactcagctggtagggctggtctgcagctgtcaggtaggatccgaaagatgaaagagcctagatggggctttgaccaggtgtggcggcacttatttgacaggcgattcaggacgtctccactggggcgtcgtcatcctgcgactctactaaaccccactgggaaccaggcaccacctttcctccacgaccacctctcttcgcccttcaacgccaagtcctagacattcgaccatcttcctacttcatttctccattcaatttccatcaagcagcatcccactatcgacgacagcacacgatacgacactttatttccttttctttgtaacagcaccacagtaatcctcgcatgagagcctagtcaggatgcatctgcgatccgtcatcgccgtcgctggcggtctcgccgccaccgcgaccaacgccctgctaccccctcccgagatccccgacagcgaggtggtcaccaccctccccatcgccgagagccccttcgacttcccccagatcctcgacaactacaatgtcctcgccgagcagaccgtagccgtcaagtgccccggctgtctacgcgcccaccatcatcctaagcgtcctaccaacgccaaaggcaaaggccacaggaagcccgagcagaagcccgagctgaccccggtgggcggcaagggcggacatgtgccgggccaccacaagggcaagccccataaggagatccccagccacctgaagctcgacttcaccgtacaggagaccgagcacggcgacatcctcgccgtcaacggcttcgagctctaccccaaccccgatccatctcgaggcctgcctaccgccgccgtcctccccgaccgacaccccaagcaccgcggcaagcaggagcccaaggacgccctcgacgacttcctgaaccacgcctcccacgtcaacagccacggcatccccgaccacgcctacaagaccctcggcttcggcatgcacagctacaccgtccccaccaccgagacgggcgacgccgccctcgtcaacgtcgagctgcagatcatggaggtcggcgatgtcttcgtcaacggcatccccgacatcgtcgtgtctctcgtccagaccagctccggcaagctcgccatggccaagatcgacaccatcgagaggactgccgagagccccatggctggccagaaggacaaggagtgcaccactatgctctgccgctggaaggccgccctactgggtccgttccgcaagggatgtggccgcaagggtgccggcatggctggtgaccacccacctcctcccccatatcgccacggtcatcacggacatgagcacaggcacggggttgtccggttcgtcaccaagttcctgatcaacatcgtacttcccgtcctcgtcggtatcctcgccggcatctccgccgggctaatcggcatgatgatcggtaccgcccttgtctacacctggcgtttcttgttccgtcgcggcggcaagagccacggctgccgatactcgcgccgctgcaagaaggctgcccagaaggcccagctgcaggatgccaccgcagaggatgagaagtctggacttatggtcgaggaggaggagatcgaagctcctcctgcttatgttgagaatggaaagggtcagattgagatttaagagtttggagattgtgagatgatggttgtgttgagtaaaatagtttgtgaggcatgagtgagcgaagcgagtatttgtgagagaagtcgtcggaatggatgacgagattgtacaatacgatactttgtttgtttgcttaggttactactgtcttttcagacacgaattttatctcctttgcttgttatgcatttccactatggctacgctttctattctcatcacgggctcgttaataatttccctatcatcagtctggatctctactcaccaaaatatatgacagctacatataagatggacgtctacgtacgtagatacaggccttcccaatttgtgaaatatgtaagatttcacagcgctgattcgcgggatcaatacttgcgccaatgagaggtgcaaaaccttaagatccttgctgggagaccggaaaaaacgagagccataagcatgttataaccctttatagacttaggtgttgctatcatccaattctattgtctatcaatctctaaacactatccacctgtctattttccagtccgtatctatattcttatcctcatctacacccgcgcaactgctgctgctgctgcgaccccgacgaaataacgacgctctccacctatcttgtccacctcatagctcccggattgctcgggtccttctcgacgtatttgcacgtgttccaagttgtccacagcgatcccataaacgactgttcgtcactatgatagaggtcgccaagtagcggctttatggcttttgtcgcttcctcggcatgat

SEQ ID NO: 20126 - DNA, 1347 bp, Muscodor strobelii
  misc_feature: SGI cDNA ID NO. 566785
  misc_feature: Encodes the peptide sequence at SEQ ID NO 20127
atggcatcaaaggggctcctaggcgatgctatcaagacactgacaaagaaggcccgccgctcgatcgcggcgagaaagcagcaaaatgccacagcatcagccctcgccgatgatatcactgctcggaactgcagagacatcatcaaggagccgaaaaaggcaaagacacctaaaaatgattctaaagatcaccctgatcaagaggagggtgtagtcgacgtacccagtgccggttgcactcatcaaacgtcccacgacgagatagaggttgcaagcatcacaactcatcaatcatcccgcgaaatagaatgctcatcacctcagagcgtatcatcggggcccacaattgttgttgaagagtctcctcgacccgaaattcaccgagctgagacatcttcgcaatgggtagaggtcgactcgtctcagactgaggaccccctatctccgtctaccgagccgcatctcgagatgacagaatcccgcattcttgacattgccatatcacccttccccccagttcccctttcagccgctcttccaccactggccaaaccagtgataataccacgtcgcgatcccggtggcacgatccctttcgcacgggcctggtcttcggagctgggcgcaagctcaattgtcaaagaagacttcatagccttcattgacaacctgaacgtaatcatgtcgccgcacattgctttccacatgctcgagatcgccggactgatagtcagcgtcgtgccctacgacgccgccgaggccatcggcggggccctcggcgtccttgctatgtttggtgctgcggctgtgaactggaaacggactaaagaatatctagggttgatgaatgagtcgtattttcacccgcggagactccatatcaaggtcgtgagtacgaagaagctgaagaaattgcttaagttggagaagaaagacccttgtcttttacctctttccgaggaaagtcttgatcttacatcgcaggataggtgcctgaagtatttatctgcacatacatgtgagctggattttgatgtgccgccccccagtaaggcgacgaatacactggcaaaaatcacagcgtgggagattagacataaggtcctgcaggcagataagaaggctaagtggggaaggaagagagcttggaaacgacatcagaagggaaagaacgttaatgagaggtggatgggatggggcgaacggcagagggttaagggactggattggttgtttattatgaatttggatgagtgggaagaggcaaaaagagtgaaggaggaaaagaagagggagaagaacgagagaaagaggaatgctacttggaagactattagttcatcatga

SEQ ID NO: 20127 - protein, 448 aa, Muscodor strobelii
  misc_feature: SGI Peptide ID NO. 566785
  misc_feature (174)..(437): NCBI GI: 154315952 Blast Desc: BC1G_04548 [Botryotinia fuckeliana B05.10] gi|150846944|gb|EDN22137.1| BC1G_04548 [Botryotinia fuckeliana B05.10]
  misc_feature (184)..(395): NCBI GI: 115433300 Blast Desc: [Aspergillus terreus NIH2624] gi|114189639|gb|EAU31339.1| [Aspergillus terreus NIH2624]
  misc_feature (156)..(359): NCBI GI: 164662206 Blast Desc: MGL_0818 [Malassezia globosa CBS 7966] gi|159106127|gb|EDP45011.1| MGL_0818 [Malassezia globosa CBS 7966]
  misc_feature (157)..(435): NCBI GI: 169603103 Blast Desc: SNOG_04559 [Phaeosphaeria nodorum SN15] gi|111067199|gb|EAT88319.1| SNOG_04559 [Phaeosphaeria nodorum SN15]
  misc_feature (182)..(374): NCBI GI: 242806275 Blast Desc: conserved [Talaromyces stipitatus ATCC 10500] gi|218715336|gb|EED14758.1| conserved [Talaromyces stipitatus ATCC 10500]
  misc_feature (182)..(300): NCBI GI: 115386856 Blast Desc: [Aspergillus terreus NIH2624] gi|114190967|gb|EAU32667.1| [Aspergillus terreus NIH2624]
  misc_feature (182)..(396): NCBI GI: 169868060 Blast Desc: [Coprinopsis cinerea okayama7#130] gi|116498350|gb|EAU81245.1| [Coprinopsis cinerea okayama7#130]
  misc_feature (182)..(302): NCBI GI: 169764989 Blast Desc: [Aspergillus oryzae RIB40] gi|83764820|dbj|BAE54964.1| protein product [Aspergillus oryzae]
  misc_feature (181)..(396): NCBI GI: 46115112 Blast Desc: FG03398.1 [Gibberella zeae PH-1]
  misc_feature (181)..(313): NCBI GI: 145252764 Blast Desc: An16g05870 [Aspergillus niger] gi|134083449|emb|CAK46927.1| [Aspergillus niger]
MASKGLLGDAIKTLTKKARRSIAARKQQNATASALADDITARNCRDIIKEPKKAKTPKNDSKDHPDQEEGVVDVPSAGCTHQTSHDEIEVASITTHQSSREIECSSPQSVSSGPTIVVEESPRPEIHRAETSSQWVEVDSSQTEDPLSPSTEPHLEMTESRILDIAISPFPPVPLSAALPPLAKPVIIPRRDPGGTIPFARAWSSELGASSIVKEDFIAFIDNLNVIMSPHIAFHMLEIAGLIVSVVPYDAAEAIGGALGVLAMFGAAAVNWKRTKEYLGLMNESYFHPRRLHIKVVSTKKLKKLLKLEKKDPCLLPLSEESLDLTSQDRCLKYLSAHTCELDFDVPPPSKATNTLAKITAWEIRHKVLQADKKAKWGRKRAWKRHQKGKNVNERWMGWGERQRVKGLDWLFIMNLDEWEEAKRVKEEKKREKNERKRNATWKTISSS

SEQ ID NO: 20128 - DNA, 690 bp, Muscodor strobelii
  misc_feature: SGI cDNA ID NO. 566786
  misc_feature: Encodes the peptide sequence at SEQ ID NO 20129
atgatgaaccctccgcctacgcggcacgctacggagcggatactagcgccggcacagacaccgacatccatggaagatgtaatccaatttaacctccaaagttggcctaccgatgtatacagagatggccaggtcaccagagaccgaatccggaatttgctagcgtcccatcatgtcgacgtgctacagctggcgcaacgactctgtggacacatcaatgagttggtagacttccgagaggaagtcttaaagagcgagcccgaaggtcatcaagaaaatatcatgaaggctttccaagactttgacgaattagcgcgacacctccaagccgaaaccttcagggacgtccgtgcctggattacgcaacgccaacattcagaatttggagattgggacaaaaacctcgttgagcggaatattgagggacatactcgttaccagcaacagtctgaggataggagaaaagagtttattcaatataagggttgggacgaaactggtgaggcggtgggttttatggactatgtgagaatggatatcactcgtaatttgctcccgtttgcacagcatgatccgacgtccttcaggaagctttgtgaggatattgagcgagctattaccttgaaacagcaacatcagcggctggcgccgcgaaatttcgagtaccaagaagaaagcgagagtcaataa

SEQ ID NO: 20129 - protein, 229 aa, Muscodor strobelii
  misc_feature: SGI Peptide ID NO. 566786
MMNPPPTRHATERILAPAQTPTSMEDVIQFNLQSWPTDVYRDGQVTRDRIRNLLASHHVDVLQLAQRLCGHINELVDFREEVLKSEPEGHQENIMKAFQDFDELARHLQAETFRDVRAWITQRQHSEFGDWDKNLVERNIEGHTRYQQQSEDRRKEFIQYKGWDETGEAVGFMDYVRMDITRNLLPFAQHDPTSFRKLCEDIERAITLKQQHQRLAPRNFEYQEESESQ

SEQ ID NO: 20130 - DNA, 269 bp, Muscodor strobelii
  misc_feature: SGI EST ID NO. CUFF.47088.0
  misc_feature: Variant of the nucleotide sequence at SEQ ID NO 20128
ggattacgcaacgccaacattcagaatttggagattgggacaaaaacctcgttgagcggaatattgagggacatactcgttaccagcaacagtctgaggataggagaaaagagtttattcaatataagggttgggacgaaactggtgaggcggtgggttttatggactatgtgagaatggatatcactcgtaatttgctcccgtttgcacagcatgatccgacgtccttcaggaagctttgtgaggatattgagcgagctattaccttg

SEQ ID NO: 20131 - DNA, 855 bp, Muscodor strobelii
  misc_feature: SGI cDNA ID NO. 566787
  misc_feature: Elevated expression when VOC is produced
  misc_feature: Encodes the peptide sequence at SEQ ID NO 20132
atggacagcctatcgggcgagttctacttcagaagagtagacagcagaaacaaagaccagtataattctgccagcgatgagctagatgagtcaaagacggcgctgctagctgctactgaaagcgacggctcggacgtcgaatatcaatcaaaacgacatcccatccattggagacttcattgtgggctcattcttctctactcggtcttgtatcttatggttgccatcgccacatggcggaagacgccatcgagcgacgtgtgcaatatagctacagtctcattgccagatggatatgagcttcgttgggaggatcggagattcccaacatccattgttgataatccgctcacggggaatccccggtcagagctggacgaagcatggcacactctcctccaaaatgataatattagggtcccgcggtcatatttagaggacctcaatttgagcacagtctatacgttggatggtcttgatggtatcgcatcactgagtgtttaccattccctacattgccttaagaaggtgaagagaatgcttttcaaggaccactaccacaaagataaatccgaggtggccatggctcgagaaagcaaacacgttgaccattgcattgaatacattcgtgagagcctgatgtgccagcccgacctctctatggtcacctttcgctggattaacgagacggcgcaacacgatgaccagactgcgttctatcccacgaactttgatgtggcaatgcacaagtgtgccgactgggagtcgcttgattcgtgggctagtagccgaatgttcgatctgtttcgagttgacttgctacagagaccggcgccgtatcaaggcaattggtag

SEQ ID NO: 20132 - protein, 284 aa, Muscodor strobelii
  misc_feature: SGI Peptide ID NO. 566787
  misc_feature (30)..(277): NCBI GI: 242817094 Blast Desc: conserved [Talaromyces stipitatus ATCC 10500] gi|218713348|gb|EED12772.1| conserved [Talaromyces stipitatus ATCC 10500]
  misc_feature (93)..(277): NCBI GI: 242817099 Blast Desc: conserved [Talaromyces stipitatus ATCC 10500] gi|218713349|gb|EED12773.1| conserved [Talaromyces stipitatus ATCC 10500]
  misc_feature (103)..(279): NCBI GI: 156044674 Blast Desc: SS1G_10441 [Sclerotinia sclerotiorum 1980] gi|154694829|gb|EDN94567.1| SS1G_10441 [Sclerotinia sclerotiorum 1980]
  misc_feature (13)..(268): NCBI GI: 238501772 Blast Desc: conserved [Aspergillus flavus NRRL3357] gi|220692357|gb|EED48704.1| conserved [Aspergillus flavus NRRL3357]
  misc_feature (13)..(268): NCBI GI: 169769306 Blast Desc: [Aspergillus oryzae RIB40] gi|83766981|dbj|BAE57121.1| protein product [Aspergillus oryzae]
  misc_feature (49)..(276): NCBI GI: 67900556 Blast Desc: AN7265.2 [Aspergillus nidulans FGSC A4] gi|40741946|gb|EAA61136.1| AN7265.2 [Aspergillus nidulans FGSC A4] gi|259483389|tpe|CBF78739.1| TPA: conserved [Aspergillus FGSC
  misc_feature (94)..(277): NCBI GI: 242800321 Blast Desc: conserved [Talaromyces stipitatus ATCC 10500] gi|218716908|gb|EED16329.1| conserved [Talaromyces stipitatus ATCC 10500]
  misc_feature (94)..(277): NCBI GI: 242800331 Blast Desc: conserved [Talaromyces stipitatus ATCC 10500] gi|218716910|gb|EED16331.1| conserved [Talaromyces stipitatus ATCC 10500]
  misc_feature (94)..(277): NCBI GI: 242800326 Blast Desc: conserved [Talaromyces stipitatus ATCC 10500] gi|218716909|gb|EED16330.1| conserved [Talaromyces stipitatus ATCC 10500]
  misc_feature (101)..(277): NCBI GI: 212534486 Blast Desc: conserved [Penicillium marneffei ATCC 18224] gi|210069798|gb|EEA23888.1| conserved [Penicillium marneffei ATCC 18224]
  misc_feature: Useful for introducing or modulating the production of volatile compounds
MDSLSGEFYFRRVDSRNKDQYNSASDELDESKTALLAATESDGSDVEYQSKRHPIHWRLHCGLILLYSVLYLMVAIATWRKTPSSDVCNIATVSLPDGYELRWEDRRFPTSIVDNPLTGNPRSELDEAWHTLLQNDNIRVPRSYLEDLNLSTVYTLDGLDGIASLSVYHSLHCLKKVKRMLFKDHYHKDKSEVAMARESKHVDHCIEYIRESLMCQPDLSMVTFRWINETAQHDDQTAFYPTNFDVAMHKCADWESLDSWASSRMFDLFRVDLLQRPAPYQGNW

SEQ ID NO: 20133 - DNA, 4031 bp, Muscodor strobelii
  misc_feature: SGI EST ID NO. CUFF.47500.0
  misc_feature: Variant of the nucleotide sequence at SEQ ID NO 20131
gataaatgccaggactgcagcgcctgccaacatagtagtattacattggcagagacaagaccaatgagcagcattagtccagctttaattttccatggggcgactactgtatagacgagccgcgggctggtgtcatcaggaaggtcgtggacttcctcagccagtggctcgtatttggcggaaggtgttgtcatcgcgcttgactgttatgcgccccaacagctatgattgcagcataagtagggggaaatgggtgagtcgaagaatgagttgaaaaataagaaaatttcggatccggaggcacccatgtactttaaatgtgccctaaaagcaccgacgtatatgcgcaactttgatatgcttttttttcgacggtgcatttgcatgaaatacccagaaccaaagccttgatcaacatcgccatgcaccaaccttactagagcaccccaacgtttgcaccgacgaatctcgtagtcacgaatcaaacaatgaggaattggcctggaaccagataagcgagtgtattctcatcagctaacgatgagttgcccatatagtcaagcatagttactatttgctttgtattcatttgcaatcatgcagtcccactccagctgccctcaccctaaatagcatgtatcgttatccgtcttagcagccgacttgcctggctttctcggcgtcaatccaggacaagttgaccttgataagatattaaacatcctccatcacatcgactgtagagacctctaggctatgattatgtaagatgctgcaggccggtataaagacactccgtgctacgggtctgcttaccagcacgagcgtctacccatgattggtcaaccttcgcaggatatacaactgcctcgtcggggtccgcaactagattgaagccaataagatgacgcaagtccatacaactcagagactcttacgcgcagctgtgtcgcgagtgacagccagtccagcaacgagacccaacatgaggtagccgaggatcagaatgctcttcatgtttgaggctggggtaattgtgttagttttgggtaatcggagatagttggctggctttggggtctaaagattgattgtgatggtctctacaggatcgtagctatagctcaaatggaaaagttgaccagggtcgagcttgcttccttatttatgtccacctgctgcgatatcattaccccctcacatcaatactcggttgcaccttgataatacttccgtggaggtataagacaatcatcaaaagatcctatcgatgttcaggactctgttaagttgaccgccagtttcaagaacggtatacgcctagtgatctggttacagtggttctgattggaaagataacgaatgcccagcatagcatcagtgcacgaaatgcaaagcaacgtcggcgaggcggattataaagtaagaagaacactttgcagcgtgtaatagtgcagatgtggtaaggggaaagtgtccattgtacttggcaatctacccctcagtggatcttctgcccgtttcttgtcaaatgtcgtagcattgcagcaatatcgtattgaacgtattttatcccttcactttagtgctggaagccctgcatgtcattgacccgatgctccctagcccattccgcaagttcgtcatagttacggcaggcacgaagagtgtgccaccccgtaacacctccgagatcagtgtcaaccggctcaagagtagcatcggccgcgcagagcaagctttgccgaagatagtcaaagcaatggcgcatatgtgactggatctcttctcccggcatctgcgcggtttgtgcgacggcatcgtaatagttgtggtatattgaccactagatgtgcgaagacaaaatgagcatgcaagtatggatcccagcgtcaccatcggcacggaggcttttgcacttaccaagcaatgtaactgatgtatcgccgacaaagtgtagacttgcttgctatgaggaggaaaccggacagtcccctggccttctaagcggaactcagcatacactctacggaagttagatagtggtgatcacggacgcggtattagagagttccaggccgtatcagaagcagaattcagacgaggatcagacccgaacgtccggttgtacttaaattcgacttgtatagtatgaacaacctcatccggtgtccgcaccgtatctaccagcaacgtcggcggtatgacatttccaccaacgatgctggcgttccgatggtgacggagaatttcaactgagacaagtaatgacagtataattaaaagaacaatgagcacaatcttccacgtacgcctccctttcgtagccgtgatttcgtcgacagaggcagagggttgatgatatgatgccatgtgggatctttgagcagtgccgccgtacgagtcaagaagtgtgtgactgagaagtgctcataagtctaatcattgaagcgttcagtggtaaattatcgaagaaggcttggaacaggtgtgaaactgataacgtacatagtcatatatcccatgcgcccgcaaattcttttgcaatgtatccctgtaagtcgtagctctcgaaccctctgtcatagtccgagaggaattagagtctcaaatgtacgctcgaatactatgcaggtgatgataagcaaggtgatcgagaccgcatgcatggatcggcaaagatggacagcctatcgggcgagttctacttcagaagagtaggtaagttatgcaccacccctccttgctactcctaccattcatttgttgatcaacgagttttgagacacatgtgattacaacgcacgctccaggttttaggtatctggtttctgcaaaataatttttatttcgctttgtgcgcgaaggtagctgaaatggcaagatcctccatagacagcagaaacaaagaccagtataattctgccagcgatgagctagatgagtcaaagacggcgctgctagctgctactgaaagcgacggctcggacgtcgaatatcaatcaaaacgacatcccatccattggagacttcattgtgggctcattcttctctactcggtcttgtatcttatggttgccatcgccacatggcggaagacgccatcgagcgacgtgtgcaatatagctacagtctcattgccagatggatatgagcttcgttgggaggatcggagattcccaacatccattgttgataatccgctcacggggaatccccggtcagagctggacgaagcatggcacactctcctccaaaatgataatattagggtcccgcggtcatatttagaggacctcaatttgagcacagtctatacgttggatggtcttgatggtatcgcatcactgagtgtttaccattccctacattgccttaagaaggtgaagagaatgcttttcaaggaccactaccacaaagataaatccgaggtggccatggctcgagaaagcaaacacgttgaccattgcattgaatacattcgtgagagcctgatgtgccagcccgacctctctatggtcacctttcgctggattaacgagacggcgcaacacgatgaccagactgcgttctatcccacgaactttgatgtggcaatgcacaagtgtgccgactgggagtcgcttgattcgtgggctagtagccgaatgttcgatctgtttcgagttgacttgctacagagaccggcgccgtatcaaggcaattggtagcttagtcactggttagtatcaacaagatgacttcaagagtatgtggaacgctgcactaatctgcggcctaaagcggcgattgctacggcggtaatagcggtagcatatcagtattggcatattgccgtacggtagaaatgtaagaccttggtggccattattgtatatgaaagacggcgataatttcagtaatagcgggaggaaatcatgtggtggtcgcctgtatctgcgtacgcagatgcaccattaacaataaggagagaaaatcatggcccttaagatccattgagaattattacttgaattgaagtctactcctgg

SEQ ID NO: 20134 - DNA, 798 bp, Muscodor strobelii
  misc_feature: SGI cDNA ID NO. 566788
  misc_feature: Elevated expression when VOC is produced
  misc_feature: Encodes the peptide sequence at SEQ ID NO 20135
atgacaacaccttccgccaaatacgagccactggctgaggaagtccacgaccttcctgatgacaccagcccgcggctcgtctatacagtagtcgccccatggaaaattaaagctggactaatgctgctcattggtcttgtctctgccaatgtaatactactatgttggcaggcgctgcagtcctggcatttatccgataacaaggtgggttgcagtcggtcatactacgcgggacttggaagagacttgccaatccagatttaccccacctctgagtttgtctcggacaacttgacggcagtcattcctctctgggaagcactgagtggcgacggcggagtggtggctctggccgaggactatgtcaagggaaagcaactgccccatgcgctcagattcccctgggacgaatcaaagggggtgtacttgctgcagggctttcacaatctccactgtctgaggacgctcttccgatacgtcatgtacaccgaaaacaagctcccccaacgcatcgccatggtgcacgcgttgcactgcctggaccagttacggcaggacgtcatttgcaatgccgacgacacgccacgatatgcaggctttcaggaccctcccggaaccggcgctggacaggtcaggctatgcaagaactgggccaaattagaagcatgggctacgaagaacacggcctgtttccatcacgaagacgaggtggccgggccgatggtcgatcgctttaagtcctgtcccgacgggcgagtgctgtggcctgtggaggacactgccgagactgcttattag

SEQ ID NO: 20135 - protein, 265 aa, Muscodor strobelii
  misc_feature: SGI Peptide ID NO. 566788
  misc_feature (1)..(260): NCBI GI: 242817079 Blast Desc: conserved [Talaromyces stipitatus ATCC 10500] gi|218713345|gb|EED12769.1| conserved [Talaromyces stipitatus ATCC 10500]
  misc_feature (74)..(265): NCBI GI: 156051644 Blast Desc: SS1G_07229 [Sclerotinia sclerotiorum 1980] gi|154705007|gb|EDO04746.1| SS1G_07229 [Sclerotinia sclerotiorum 1980]
  misc_feature (59)..(251): NCBI GI: 156034839 Blast Desc: [Sclerotinia sclerotiorum 1980] gi|154698758|gb|EDN98496.1| [Sclerotinia sclerotiorum 1980]
  misc_feature (4)..(251): NCBI GI: 242816284 Blast Desc: TSTA_107140 [Talaromyces stipitatus ATCC 10500] gi|218715083|gb|EED14506.1| TSTA_107140 [Talaromyces stipitatus ATCC 10500]
  misc_feature (73)..(265): NCBI GI: 242784974 Blast Desc: TSTA_033120 [Talaromyces stipitatus ATCC 10500] gi|218720646|gb|EED20065.1| TSTA_033120 [Talaromyces stipitatus ATCC 10500]
  misc_feature (49)..(251): NCBI GI: 242818752 Blast Desc: TSTA_055700 [Talaromyces stipitatus ATCC 10500] gi|218713645|gb|EED13069.1| TSTA_055700 [Talaromyces stipitatus ATCC 10500]
  misc_feature (76)..(251): NCBI GI: 154297777 Blast Desc: [Botryotinia fuckeliana B05.10] gi|150858429|gb|EDN33621.1| [Botryotinia fuckeliana B05.10]
  misc_feature (1)..(249): NCBI GI: 169620792 Blast Desc: SNOG_13602 [Phaeosphaeria nodorum SN15] gi|111057929|gb|EAT79049.1| SNOG_13602 [Phaeosphaeria nodorum SN15]
  misc_feature (72)..(249): NCBI GI: 189210629 Blast Desc: conserved [Pyrenophora tritici-repentis Pt-1C-BFP] gi|187977739|gb|EDU44365.1| conserved [Pyrenophora tritici-repentis Pt-1C-BFP]
  misc_feature (6)..(259): NCBI GI: 242780316 Blast Desc: TSTA_024590 [Talaromyces stipitatus ATCC 10500] gi|218719716|gb|EED19135.1| TSTA_024590 [Talaromyces stipitatus ATCC 10500]
  misc_feature: Useful for introducing or modulating the production of volatile compounds
MTTPSAKYEPLAEEVHDLPDDTSPRLVYTVVAPWKIKAGLMLLIGLVSANVILLCWQALQSWHLSDNKVGCSRSYYAGLGRDLPIQIYPTSEFVSDNLTAVIPLWEALSGDGGVVALAEDYVKGKQLPHALRFPWDESKGVYLLQGFHNLHCLRTLFRYVMYTENKLPQRIAMVHALHCLDQLRQDVICNADDTPRYAGFQDPPGTGAGQVRLCKNWAKLEAWATKNTACFHHEDEVAGPMVDRFKSCPDGRVLWPVEDTAETAY

SEQ ID NO: 20136 - DNA, 5392 bp, Muscodor strobelii
  misc_feature: SGI EST ID NO. CUFF.47499.2
  misc_feature: Variant of the nucleotide sequence at SEQ ID NO 20134
tggcgtcttccgccatgtggcgatggcaaccataagatacaagaccgagtagagaagaatgagcccacaatgaagtctccaatggatgggatgtcgttttgattgatattcgacgtccgagccgtcgctttcagtagcagctagcagcgccgtctttgactcatctagctcatcgctggcagaattatactggtctttgtttctgctgtctatggaggatcttgccatttcagctaccttcgcgcacaaagcgaaataaaaattattttgcagaaaccagatacctaaaacctggagcgtgcgttgtaatcacatgtgtctcaaaactcgttgatcaacaaatgaatggtaggagtagcaaggaggggtggtgcataacttacctactcttctgaagtagaactcgcccgataggctgtccatctttgccgatccatgcatgcggtctcgatcaccttgcttatcatcacctgcatagtattcgagcgtacatttgagactctaattcctctcggactatgacagagggttcgagagctacgacttacagggatacattgcaaaagaatttgcgggcgcatgggatatatgactatgtacgttatcagtttcacacctgttccaagccttcttcgataatttaccactgaacgcttcaatgattagacttatgagcacttctcagtcacacacttcttgactcgtacggcggcactgctcaaagatcccacatggcatcatatcatcaaccctctgcctctgtcgacgaaatcacggctacgaaagggaggcgtacgtggaagattgtgctcattgttcttttaattatactgtcattacttgtctcagttgaaattctccgtcaccatcggaacgccagcatcgttggtggaaatgtcataccgccgacgttgctggtagatacggtgcggacaccggatgaggttgttcatactatacaagtcgaatttaagtacaaccggacgttcgggtctgatcctcgtctgaattctgcttctgatacggcctggaactctctaataccgcaaggccaggggactgtccggtttcctcctcatagcaagcaagtctacactttgtcggcgatacatcagttacattgcttgtggtcaatataccacaactattacgatgccgtcgcacaaaccgcgcagatgccgggagaagagatccagtcacatatgcgccattgctttgactatcttcggcaaagcttgctctgcgcggccgatgctactcttgagccggttgacactgatctcggaggtgttacggggtggcacactcttcgtgcctgccgtaactatgacgaacttgcggaatgggctagggagcatcgggtcaatgacatgcagggcttccagcactaaagtgaagggataaaatacgttcaatacgatattgctgcaatgctacgacatttgacaagaaacgggcagaagatccactgaggggtagattgccaagtacaatggacactttccccttaccacatctgcactattacacgctgcaaagtgttcttcttactttataatccgcctcgccgacgttgctttgcatttcgtgcactgatgctatgctgggcattcgttatctttccaatcagaaccactgtaaccagatcactaggcgtataccgttcttgaaactggcggtcaacttaacagagtcctgaacatcgataggatcttttgatgattgtcttatacctccacggaagtattatcaaggtgcaaccgagtattgatgtgagggggtaatgatatcgcagcaggtggacataaataaggaagcaagctcgaccctggtcaacttttccatttgagctatagctacgatcctgtagagaccatcacaatcaatctttagaccccaaagccagccaactatctccgattacccaaaactaacacaattaccccagcctcaaacatgaagagcattctgatcctcggctacctcatgttgggtctcgttgctggactggctgtcactcgcgacacagctgcgcttgcggaccccgacgaggcagttgtatatcctgcgaaggttgaccaatcatgggtagacgctcgtgctgcctagaggtctctacagtcgatgtgatggaggatgtttaatatcttatcaaggtcaacttgtcctggattgacgccgagaaagccaggcaagtcggctgctaagacggataacgatacatgctatttagggtgagggcagctggagtgggactgcatgattgcaaatgaatacaaagcaaatagtaactatgcttgactatatgggcaactcatcgttagctgatgagaatacactcgcttatctggttccaggccaattcctcattgtttgattcgtgactacgagattcgtcggtgcaaacgttggggtgctctagtaaggttggtgcatggcgatgttgatcaaggctttggttctgggtatttcatgcaaatgcaccgtcgaaaaaaaagcatatcaaagttgcgcatatacgtcggtgcttttagggcacatttaaagtacatgggtgcctccggatccgaaattttcttatttttcaactcattcttcgactcacccatttccccctacttatgctgcaatcatagctgttggggcgcataacagtcaagcgcgatgacaacaccttccgccaaatacgagccactggctgaggaagtccacgaccttcctgatgacaccagcccgcggctcgtctatacagtagtcgccccatggaaaattaaagctggactaatgctgctcattggtcttgtctctgccaatgtaatactactatgttggcaggcgctgcagtcctggcatttatccgataacaaggtgggttgcagtcggtcatactacgcgggacttggaagagacttgccaatccagatttaccccacctctgagtttgtctcggacaacttgacggcagtcattcctctctgggaagcactgagtggcgacggcggagtggtggctctggccgaggactatgtcaagggaaagcaactgccccatgcgctcagattcccctgggacgaatcaaagggggtgtacttgctgcagggctttcacaatctccactgtctgaggacgctcttccgatacgtcatgtacaccgaaaacaagctcccccaacgcatcgccatggtgcacgcgttgcactgcctggaccagttacggcaggacgtcatttgcaatgccgacgacacgccacgatatgcaggctttcaggaccctcccggaaccggcgctggacaggtcaggctatgcaagaactgggccaaattagaagcatgggctacgaagaacacggcctgtttccatcacgaagacgaggtggccgggccgatggtcgatcgctttaagtcctgtcccgacgggcgagtgctgtggcctgtggaggacactgccgagactgcttattaggtacatgaaccaatgggatttcccctgtcccctggccacaggtaagctcggcaagggttggtcagttgctgttccttgcgtcccgcgcccacacccgggaaggaatgagatccttgtatagaatatgtatggtcttttcggaaaactttgtatagatcacctcagagctactaggtcgttaacttgtcatcgctgtagctacactcattaatcttgcccaatttcttgaactggacactgtaaaccttgcgtgcgccccgctgtcaacctgaaggggacaaatctggtgggtttaccagtcgataattacgagcacgatgcaggtgacaccggcggcggtgcaacgaaacatggcagcagaagacaccaaagaaacatttgaaacttcttcttctgcggaccatttgacacagcaaagcagtgtatcagaagaaggcctgtttgcttggtcacaggttgccgctgctttcgtactaaatcttaacacatggggtttcttaaatacgttcggcgttttccaaaccttttaccagctcgacctcctacgatctgaaacgccctcggccatcgcctggatcgggtcaacacaggccttctttctctttctcgtctctcttggggcaggacccgctttcgatcgaggctatcttagacagctgctctggaccgggtcaacattatttgttctcggcatgtttcttgtcggtatctcattgcggtattatcagattttcctaacacaggccgtgttgatgggtttgggattcggctgtgtctatctgccagcacctgtggtcgtttcgcagtattttcataagagagctgctttagcgcagggattagcctcgactggtagcgctataggtggtattatatatcccattgttttcacgcagctccggccacgcataggattcggatgggctactcgggtgctggcgtttgtattacttggtacatccgccattccactgttggtaatgaagtccagatcaccgccgaaacccagccgtagcctcttcgataaagaggcattccacgacgtcccgtatctcctcttctcaacggggctgttcttcgggtttatgggcttctacgttatcttgaactatattcagctatttgctattagccggtctctggggatgacttctttgactaactacctcctcgttattatcaacgctagctccatctttggtcgtgtagtcggtggcattttcgctgataaagttggctcaatccatatccaggtagtggtcaccgccgtcgccgctgtgttggtctactctctactggccgtgtactctaccggagggctagcggtcttttcgatccttttcggagctgcctcgggtgcgttcactggtcttccggccaccggcatagttactctctctgacgataagagtaaaattgggactcggctgggaatgacgttgacttatctaggcgtaggagtacttgttggaaatcctattgccggcgcaatcctgggccgtgacaactattgggtaggacttctcgtgttctgtggctccatcttagttgtctccgttgtttttctagtagcaagtcgagtggcaaaggtagggcacaggttccgttgcaagatctagaatagctaaggcctcaagtatgacatttaatgtacctgaaatggtttttacaaggccgtcatgaggtcacgtcttttggcttaagacatgcacacccctgtcactgcaagccatggatatgcgggggattctgtcattgcgatccatatccctgcgcccacccatgtttctcttgtacagcaggcatatgcgttgacatgatggatatcttccgccccgttgtgtatcagcagtaaagtgatatcatcagctgagccgccgaacttcaacacttcatgcgggcacgcaataatgaagaattctctggctct

SEQ ID NO: 20137 - DNA, 1350 bp, Muscodor strobelii
  misc_feature: SGI cDNA ID NO. 566789
  misc_feature: Elevated expression when VOC is produced
  misc_feature: Encodes the peptide sequence at SEQ ID NO 20138
atgcaggtgacaccggcggcggtgcaacgaaacatggcagcagaagacaccaaagaaacatttgaaacttcttcttctgcggaccatttgacacagcaaagcagtgtatcagaagaaggcctgtttgcttggtcacaggttgccgctgctttcgtactaaatcttaacacatggtcaggcgcgtttttccattccaacggtgatgatgctttaccggagcggggtttcttaaatacgttcggcgttttccaaaccttttaccagctcgacctcctacgatctgaaacgccctcggccatcgcctggatcgggtcaacacaggccttctttctctttctcgtctctcttggggcaggacccgctttcgatcgaggctatcttagacagctgctctggaccgggtcaacattatttgttctcggcatgtttcttgtcggtatctcattgcggtattatcagattttcctaacacaggccgtgttgatgggtttgggattcggctgtgtctatctgccagcacctgtggtcgtttcgcagtattttcataagagagctgctttagcgcagggattagcctcgactggtagcgctataggtggtattatatatcccattgttttcacgcagctccggccacgcataggattcggatgggctactcgggtgctggcgtttgtattacttggtacatccgccattccactgttggtaatgaagtccagatcaccgccgaaacccagccgtagcctcttcgataaagaggcattccacgacgtcccgtatctcctcttctcaacggggctgttcttcgggtttatgggcttctacgttatcttgaactatattcagctatttgctattagccggtctctggggatgacttctttgactaactacctcctcgttattatcaacgctagctccatctttggtcgtgtagtcggtggcattttcgctgataaagttggctcaatccatatccaggtagtggtcaccgccgtcgccgctgtgttggtctactctctactggccgtgtactctaccggagggctagcggtcttttcgatccttttcggagctgcctcgggtgcgttcactggtcttccggccaccggcatagttactctctctgacgataagagtaaaattgggactcggctgggaatgacgttgacttatctaggcgtaggagtacttgttggaaatcctattgccggcgcaatcctgggccgtgacaactattgggtaggacttctcgtgttctgtggctccatcttagttgtctccgttgtttttctagtagcaagtcgagtggcaaaggtagggcacaggttccgttgcaagatctag

SEQ ID NO: 20138 - protein, 449 aa, Muscodor strobelii
  misc_feature: SGI Peptide ID NO. 566789
  misc_feature (57)..(402): Pfam Id: PF07690 Pfam Desc: Major Facilitator Superfamily
  misc_feature (96)..(402): Pfam Id: PF07690 Pfam Desc: Major Facilitator Superfamily
  misc_feature (5)..(444): NCBI GI: 242817124 Blast Desc: monocarboxylate transporter, [Talaromyces stipitatus ATCC 10500] gi|218713354|gb|EED12778.1| monocarboxylate transporter, [Talaromyces stipitatus ATCC 10500]
  misc_feature (22)..(446): NCBI GI: 225563380 Blast Desc: monocarboxylate permease-like protein [Ajellomyces capsulatus G186AR]
  misc_feature (31)..(446): NCBI GI: 154282011 Blast Desc: [Ajellomyces capsulatus NAm1] gi|150411997|gb|EDN07385.1| [Ajellomyces capsulatus NAm1]
  misc_feature (77)..(442): NCBI GI: 156048833 Blast Desc: SS1G_08123 [Sclerotinia sclerotiorum 1980] gi|154692522|gb|EDN92260.1| SS1G_08123 [Sclerotinia sclerotiorum 1980]
  misc_feature (4)..(440): NCBI GI: 116208398 Blast Desc: CHGG_03492 [Chaetomium globosum CBS 148.51] gi|88184089|gb|EAQ91557.1| CHGG_03492 [Chaetomium globosum CBS 148.51]
  misc_feature (20)..(439): NCBI GI: 116181436 Blast Desc: CHGG_01346 [Chaetomium globosum CBS 148.51] gi|88185643|gb|EAQ93111.1| CHGG_01346 [Chaetomium globosum CBS 148.51]
  misc_feature (3)..(448): NCBI GI: 238840867 Blast Desc: monocarboxylate permease-like protein [Microsporum canis CBS 113480]
  misc_feature (6)..(442): NCBI GI: 238843532 Blast Desc: riboflavin transporter MCH5 [Microsporum canis CBS 113480]
  misc_feature (9)..(437): NCBI GI: 171695864 Blast Desc: protein product [Podospora anserina] gi|170948174|emb|CAP60338.1| protein product [Podospora anserina]
  misc_feature (7)..(449): NCBI GI: 145229117 Blast Desc: An01g04400 [Aspergillus niger] gi|134054966|emb|CAK36975.1| protein product [Aspergillus niger]
  misc_feature: Useful for introducing or modulating the production of volatile compounds
MQVTPAAVQRNMAAEDTKETFETSSSADHLTQQSSVSEEGLFAWSQVAAAFVLNLNTWSGAFFHSNGDDALPERGFLNTFGVFQTFYQLDLLRSETPSAIAWIGSTQAFFLFLVSLGAGPAFDRGYLRQLLWTGSTLFVLGMFLVGISLRYYQIFLTQAVLMGLGFGCVYLPAPVVVSQYFHKRAALAQGLASTGSAIGGIIYPIVFTQLRPRIGFGWATRVLAFVLLGTSAIPLLVMKSRSPPKPSRSLFDKEAFHDVPYLLFSTGLFFGFMGFYVILNYIQLFAISRSLGMTSLTNYLLVIINASSIFGRVVGGIFADKVGSIHIQVVVTAVAAVLVYSLLAVYSTGGLAVFSILFGAASGAFTGLPATGIVTLSDDKSKIGTRLGMTLTYLGVGVLVGNPIAGAILGRDNYWVGLLVFCGSILVVSVVFLVASRVAKVGHRFRCKI

SEQ ID NO: 20139 - DNA, 5392 bp, Muscodor strobelii; identical to SEQ ID NO: 20136
  misc_feature: SGI EST ID NO. CUFF.47499.2
  misc_feature: Variant of the nucleotide sequence at SEQ ID NO 20137

SEQ ID NO: 20140 - DNA, 1434 bp, Muscodor strobelii
  misc_feature: SGI cDNA ID NO. 566790
  misc_feature: Elevated expression when VOC is produced
  misc_feature: Encodes the peptide sequence at SEQ ID NO 20141
atgcctagaggtggctccatcggtgcccttaactgggagcctgattttgaaacaatcgcggtccatggaggccaggaacccgatcccagtaatggatcaagagcgcctcctatcttccaaacagccagctatgtgttcgatgacgccgaagacggcgctgcgaaatgctcgtggaacaaacctgggtacatgtatagtcgcctgggaaatccgacgaacagcatttttgaacagcgaatggccttgctagaaggtggcgtaggcgccattgccacggcgtccggacattcggcacagttcatggcactgacgcaatgctgcgagtctgggcataacatcgttagtactagttggttatacggaggcacctttaaccaatttcgagtttacctcccgaggttcaatattcacgtcaaatgggtttccggcaatgacccgaaagacttcgacactgcaatcgatgagaatacacgtgccgtgtatattgagacgattagcaaccccaagcagtctgttccagacatccccgccattgccgacgtagcgcacaagcacggagttccactagtgattgacaatactttcggcatgggtggttatctttgccagcccatcaagcttggcgctgatatagtcactcactcgtgcacaaaatggatcggcggccacaatacgagcatgggcggcgtcattattgacggcgggaggtttgaatggggctcgaagctctcggcagtcaagtttccaggactgacggaaccggcacctggttaccacgggctcaaattctgggaaacctacgggcccctcgccttgagcgctaaactgaggatggacgccatgcgcgatctggggccttgtatgagtcccttcaatgcctggttgttcttgcaagggctcgagactcttccgctacgggctcagcgcattgtggaaaatacgcagaaattggcagaatggtttgaacagcacccgtgcgtcaactgggtcatgtatcctggcctgcgatctcatgaggactacgaaatcgcgcgaaaactattaccaagagggaaaggaggggtactgactttcggtgtggctggtaaagtagacgaagtgcgtgcagtcgttgacaatctcaagatgtgcagtcacgtggccaacgtaggcgactgcaagacgctcatcatacatccatgggtcaccacgcaccagcagatacccgacgaggacaagatcaaagccggggttacccccgacctcatcagagtaagtgtgggcatcgagaacatcgaagatatcaagcgcgatttcacgcaggcatttgctgaggcgggcctgaaacatgccgagaagatagcaacagatccgaccgcaaagactatgaaagtagcatatgatggattcatgggaaaaaaggatgatgatatgaaggttccaaagcgcatttga

SEQ ID NO: 20141 - protein, 477 aa, Muscodor strobelii
  misc_feature: SGI Peptide ID NO. 566790
  misc_feature (17)..(437): Pfam Id: PF01053 Pfam Desc: Cys/Met metabolism PLP-dependent enzyme
  misc_feature (1)..(467): NCBI GI: 256730364 Blast Desc: NECHADRAFT_95019 [Nectria haematococca mpVI 77-13-4]
  misc_feature (1)..(477): NCBI GI: 242813741 Blast Desc: o-acetylhomoserine sulfhydrylase, [Talaromyces stipitatus ATCC 10500] gi|218714566|gb|EED13989.1| o-acetylhomoserine sulfhydrylase, [Talaromyces stipitatus ATCC
  misc_feature (5)..(445): NCBI GI: 169605599 Blast Desc: SNOG_05823 [Phaeosphaeria nodorum SN15] gi|111065767|gb|EAT86887.1| SNOG_05823 [Phaeosphaeria nodorum SN15]
  misc_feature (16)..(440): NCBI GI: 220908253 Blast Desc: O-acetylhomoserine/O-acetylserine sulfhydrylase [Cyanothece sp. PCC 7425] gi|219864864|gb|ACL45203.1| O-acetylhomoserine/O-acetylserine sulfhydrylase [Cyanothece sp.
  misc_feature (16)..(438): NCBI GI: 186686443 Blast Desc: O-acetylhomoserine/O-acetylserine sulfhydrylase [Nostoc punctiforme PCC 73102] gi|186468895|gb|ACC84696.1| O-acetylhomoserine/O-acetylserine sulfhydrylase [Nostoc PCC
  misc_feature (16)..(436): NCBI GI: 21673439 Blast Desc: O-acetylhomoserine (thiol)-lyase [Chlorobium tepidum TLS] gi|21646541|gb|AAM71846.1| o-acetylhomoserine (thiol)-lyase [Chlorobium tepidum TLS]
  misc_feature (9)..(446): NCBI GI: 170111842 Blast Desc: [Laccaria bicolor S238N-H82] gi|164637898|gb|EDR02179.1| [Laccaria bicolor S238N-H82]
  misc_feature (16)..(442): NCBI GI: 254833234 Blast Desc: homocysteine synthase [Tuber borchii]
  misc_feature (16)..(436): NCBI GI: 193212288 Blast Desc: O-acetylhomoserine/O-acetylserine sulfhydrylase [Chlorobaculum parvum NCIB 8327] gi|193085765|gb|ACF11041.1| O-acetylhomoserine/O-acetylserine sulfhydrylase [Chlorobaculum
  misc_feature (16)..(438): NCBI GI: 193214991 Blast Desc: O-acetylhomoserine/O-acetylserine sulfhydrylase [Chloroherpeton thalassium ATCC 35110] gi|193088468|gb|ACF13743.1| O-acetylhomoserine/O-acetylserine
  misc_feature (16)..(437): SWISSPROT Homolog: EC 2.5.1.49 O-acetylhomoserine aminocarboxypropyltransferase
  misc_feature: Useful for introducing or modulating the production of volatile compounds
MPRGGSIGALNWEPDFETIAVHGGQEPDPSNGSRAPPIFQTASYVFDDAEDGAAKCSWNKPGYMYSRLGNPTNSIFEQRMALLEGGVGAIATASGHSAQFMALTQCCESGHNIVSTSWLYGGTFNQFRVYLPRFNIHVKWVSGNDPKDFDTAIDENTRAVYIETISNPKQSVPDIPAIADVAHKHGVPLVIDNTFGMGGYLCQPIKLGADIVTHSCTKWIGGHNTSMGGVIIDGGRFEWGSKLSAVKFPGLTEPAPGYHGLKFWETYGPLALSAKLRMDAMRDLGPCMSPFNAWLFLQGLETLPLRAQRIVENTQKLAEWFEQHPCVNWVMYPGLRSHEDYEIARKLLPRGKGGVLTFGVAGKVDEVRAVVDNLKMCSHVANVGDCKTLIIHPWVTTHQQIPDEDKIKAGVTPDLIRVSVGIENIEDIKRDFTQAFAEAGLKHAEKIATDPTAKTMKVAYDGFMGKKDDDMKVPKRI

SEQ ID NO: 20142 - DNA, 1547 bp, Muscodor strobelii
  misc_feature: SGI EST ID NO. CUFF.47525.0
  misc_feature: Variant of the nucleotide sequence at SEQ ID NO 20140
ccagctatgtgttcgatgacgccgaagacggcgctgcgaaatgctcgtggaacaaacctgggtacatgtatagtcgcctgggaaatccgacgaacagcatttttgaacagcgaatggccttgctagaaggtggcgtaggcgccattgccacggcgtccggacattcggcacagttcatggcactgacgcaatgctgcgagtctgggcataacatcgttagtactagttggttatacggaggcacctttaaccaatttcgagtttacctcccgaggttcaatattcacgtcaaatgggtttccggcaatgacccgaaagacttcgacactgcaatcgatgagaatacacgtgccgtgtatattgagacgattagcaaccccaagcagtctgttccagacatccccgccattgccgacgtagcgcacaagcacggagttccactagtgattgacaatactttcggcatgggtggttatctttgccagcccatcaagcttggcgctgatatagtcactcactcgtgcacaaaatggatcggcggccacaatacgagcatgggcggcgtcattattgacggcgggaggtttgaatggggctcgaagctctcggcagtcaagtttccaggactgacggaaccggcacctggttaccacgggctcaaattctgggaaacctacgggcccctcgccttgagcgctaaactgaggatggacgccatgcgcgatctggggccttgtatgagtcccttcaatgcctggttgttcttgcaagggctcgagactcttccgctacgggctcagcgcattgtggaaaatacgcagaaattggcagaatggtttgaacagcacccgtgcgtcaactgggtcatgtatcctggcctgcgatctcatgaggactacgaaatcgcgcgaaaactattaccaagagggaaaggaggggtactgactttcggtgtggctggtaaagtagacgaagtgcgtgcagtcgttgacaatctcaagatgtgcagtcacgtggccaacgtaggcgactgcaagacgctcatcatacatccatgggtcaccacgcaccagcagatacccgacgaggacaagatcaaagccggggttacccccgacctcatcagagtaagtgtgggcatcgagaacatcgaagatatcaagcgcgatttcacgcaggcatttgctgaggcgggcctgaaacatgccgagaagatagcaacagatccgaccgcaaagactatgaaagtagcatatgatggattcatgggaaaaaaggatgatgatatgaaggttccaaagcgcatttgatgtgtttgctctggcgcggaagtgaaggaagacggggttggattttatttttatgtggcttggatatatgcggcatcgcttgacaaaggggggaaaatcattttgcttcgaccgagaaatcgtggtgttaagcatagtgtggtagtatatatactcatgtccatcatctgccatgatgttacggatcttcagggaatagggtagagaaatcgacataagtattgtgtttaagcaaca

SEQ ID NO: 20143 - DNA, 1059 bp, Muscodor strobelii
  misc_feature: SGI cDNA ID NO. 566791
  misc_feature: Elevated expression when VOC is produced
  misc_feature: Encodes the peptide sequence at SEQ ID NO 20144
atgttcacagtaccccccgatgcggatatcaggccacttctctatgctctcagcgtcgttttcggtgtcttgccgaccatcgctgtgatactccgattccaggtcaggataagatccaaagctcgactcggattagaggactggtttatactcatttccttggctgcatgtctcactaatgcaattctcattatcgtcggcaccgcggccggtaatatgggccgaccactcgatcgtgacagtgccggaaagcccgtttacgaccataagttcttcatttatcaaaagacgaaatatggcatcggcatagcccagctcctgtctctgggtccttgcaagctctctgttctcttcctataccgtcgcatcttcggcatagagggtcgccgcttcaacatcatatccatgaccttgatcgttatcgttattggctggactatcgcgttcttcgttaccaatgccattcagtactggcccgtaccgtcgcagtggacgaaaccaccctcggaattaggatcaacgtaccccaaaggcacggatatgtttttggcacaatgttatatagacgttgctttagatgttcttatcatcgcacttccagttccactgatttgcaaactcaacatgaatttgaagaggaagctgcagatcagtgcagtgtttcttttgggtgcacttatgacagctgccagcatcacaaggacagttatccagtatggtgtcgctcgggaattcaacactggcaatgtggacaagacatactatcttgcgcccattaattattggccactgattgaagcggcactgggaatcatagcagcatcccttccagtccttcgacccatcggccaaatatattccatcagaaacctagttatactgtcaagcaaagcacttagtcggaagactagcacctccggcgatgactcggagaagggtccgcccacaagccacagtgatgcctcaaagggtgagaaatggttgaagccgtatgacatatccgcacttcacaccactgtcaatgatgatagccgtgatgacgagccgatcaaaccttag

SEQ ID NO: 20144 - protein, 352 aa, Muscodor strobelii
  misc_feature: SGI Peptide ID NO. 566791
  misc_feature (16)..(351): NCBI GI: 212534488 Blast Desc: conserved [Penicillium marneffei ATCC 18224] gi|210069799|gb|EEA23889.1| conserved [Penicillium marneffei ATCC 18224]
  misc_feature (14)..(316): NCBI GI: 238501762 Blast Desc: conserved [Aspergillus flavus NRRL3357] gi|220692352|gb|EED48699.1| conserved [Aspergillus flavus NRRL3357]
  misc_feature (15)..(282): NCBI GI: 169611618 Blast Desc: SNOG_08924 [Phaeosphaeria nodorum SN15] gi|111062972|gb|EAT84092.1| SNOG_08924 [Phaeosphaeria nodorum SN15]
  misc_feature (15)..(282): NCBI GI: 242816288 Blast Desc: conserved [Talaromyces stipitatus ATCC 10500] gi|218715084|gb|EED14507.1| conserved [Talaromyces stipitatus ATCC 10500]
  misc_feature (16)..(282): NCBI GI: 242800335 Blast Desc: conserved [Talaromyces stipitatus ATCC 10500] gi|218716911|gb|EED16332.1| conserved [Talaromyces stipitatus ATCC 10500]
  misc_feature (5)..(348): NCBI GI: 239612727 Blast Desc: conserved [Ajellomyces dermatitidis ER-3]
  misc_feature (106)..(318): NCBI GI: 67900566 Blast Desc: AN7270.2 [Aspergillus nidulans FGSC A4] gi|40741951|gb|EAA61141.1| AN7270.2 [Aspergillus nidulans FGSC A4] gi|259483384|tpe|CBF78730.1| TPA: conserved [Aspergillus FGSC
  misc_feature (17)..(326): NCBI GI: 145244817 Blast Desc: An11g07030 [Aspergillus niger] gi|134079370|emb|CAK96999.1| protein product [Aspergillus niger]
  misc_feature (93)..(331): NCBI GI: 261357808 Blast Desc: conserved [Verticillium albo-atrum VaMs.102]
  misc_feature (106)..(282): NCBI GI: 242816292 Blast Desc: conserved [Talaromyces stipitatus ATCC 10500] gi|218715085|gb|EED14508.1| conserved [Talaromyces stipitatus ATCC 10500]
  misc_feature: Useful for introducing or modulating the production of volatile compounds
MFTVPPDADIRPLLYALSVVFGVLPTIAVILRFQVRIRSKARLGLEDWFILISLAACLTNAILIIVGTAAGNMGRPLDRDSAGKPVYDHKFFIYQKTKYGIGIAQLLSLGPCKLSVLFLYRRIFGIEGRRFNIISMTLIVIVIGWTIAFFVTNAIQYWPVPSQWTKPPSELGSTYPKGTDMFLAQCYIDVALDVLIIALPVPLICKLNMNLKRKLQISAVFLLGALMTAASITRTVIQYGVAREFNTGNVDKTYYLAPINYWPLIEAALGIIAASLPVLRPIGQIYSIRNLVILSSKALSRKTSTSGDDSEKGPPTSHSDASKGEKWLKPYDISALHTTVNDDSRDDEPIKP

SEQ ID NO: 20145 - DNA, 1683 bp, Muscodor strobelii
  misc_feature: SGI EST ID NO. CUFF.47094.0
  misc_feature: Variant of the nucleotide sequence at SEQ ID NO 20143
cgacaccatgagacagggaggactttcactgaaccgcccctttacgaccagtggcgcagatcaggtcctttgaatggcacacaatgccacatattgacaggctatggctcttggccctctgaacaataataactgtcttctagagtccaaattgttcactcccttccagaactccgtttttgatatcaagaatgagccgtcctcgactgtatagtataatcaagggagcttgacctcaactcgacaggctatcatataagctgcccgacgcggaaaacatacgaagatgttcacagtaccccccgatgcggatatcaggccacttctctatgctctcagcgtcgttttcggtgtcttgccgaccatcgctgtgatactccgattccaggtcaggataagatccaaagctcgactcggattagaggactggtttatactcatttccttggctgcatgtctcactaatgcaattctcattatcgtcggcaccgcggccggtaatatgggccgaccactcgatcgtgacagtgccggaaagcccgtttacgaccataagttcttcatttatcaaaagacgaaatatggcatcggcatagcccagctcctgtctctgggtccttgcaagctctctgttctcttcctataccgtcgcatcttcggcatagagggtcgccgcttcaacatcatatccatgaccttgatcgttatcgttattggctggactatcgcgttcttcgttaccaatgccattcagtactggcccgtaccgtcgcagtggacgaaaccaccctcggaattaggatcaacgtaccccaaaggcacggatatgtttttggcacaatgttatatagacgttgctttagatgttcttatcatcgcacttccagttccactgatttgcaaactcaacatgaatttgaagaggaagctgcagatcagtgcagtgtttcttttgggtgcacttatgacagctgccagcatcacaaggacagttatccagtatggtgtcgctcgggaattcaacactggcaatgtggacaagacatactatcttgcgcccattaattattggccactgattgaagcggcactgggaatcatagcagcatcccttccagtccttcgacccatcggccaaatatattccatcagaaacctagttatactgtcaagcaaagcacttagtcggaagactagcacctccggcgatgactcggagaagggtccgcccacaagccacagtgatgcctcaaagggtgagaaatggttgaagccgtatgacatatccgcacttcacaccactgtcaatgatgatagccgtgatgacgagccgatcaaaccttagcgaaccgatgattatcgagggtattgacagcgatgaacaagattccagtacatgcttacatatcgggggtcttaagtccaggttatgctctagttggatgaggacttgatggtgaatgagtgtttatgttgtggagaatacacccagcagcatgaacccgctcttcgcgaattgacacactcggcttgttgttgaagagcagcaaaaacattttaggcgcaataagaccttattgcacatatactatccctgcatgttgtgcgcgatctcaaaagacgttccgggaattttgccgtatctttctcggtctaaatgcatgttgctgaagtttcgctgca

SEQ ID NO: 20146 - DNA, 7581 bp, Muscodor strobelii
  misc_feature: SGI cDNA ID NO. 566792
  misc_feature: Encodes the peptide sequence at SEQ ID NO 20147
atgtctaacccacatcaacatggctcctactgggctaaggcgtatgatgctcttgaccctggactccaagcgactttgcaagcaaccaggcctggaaaattggatgtcttgaagatcttgctgcatactgccgagaagaagcgcgcaatttgcattcgtaacaggctacgggtccggctccctaatggccaagtttcgatcgttcgggatgtggtagagaagatcgctggatgggttcgaaagtttatcgctataggggacgttgcaattcaatccgaccctcaaacagcagcactcccgtgggctgcggtgcgctttatcttgcaagcttgtataagtgataacttactcgatggtgcgatggtgtcagaccttgaggagatctctcgtttgatcaccaaataccatcatttcgaacaaatccatcttcagcggaacgccgtgtcaaagccacagctagaagaagcgacaactaaactctatgctagtattctggcgtttctcgcgtcagctgtccagtactatggaaaacgcgcaatatctcgcactgctcaggggactttcagggggtcaacaaatcacctgctaccagagatactgcgagaggaaagcgagcttttcattctagccgacctcgctgacgctgaggtgttgcgctctctcgagaactccgtcacccggcttgtcgcaaaagctgtcgttgatggtgagattccggacgagtcaaagcaccaagagcttctgcactggctctcgacggtcccagctagtgcgcatcacgagttgatatcgaaaaccaggatgccaggttcggctgcgtggctgttggaccaccctgtgtatagagactggagaaattcgagtgcttctgcgactttacaccttcaaggcgttcccggatccggtaaatccacaatttgctcagctgtagtggactcatttcttgccgagagaaaatcgaatagtcttgccgcacctgtcgcgtacttctactgtactaactgggaaagcgaacgagaaagaggccaaccaactgaaatcatgagaagcttactgagacaactcgttgtcacctgtccaacacacctcggcatcaagaacttgatccacgcggcgtatgagaaacgtgttgcacagtctaaagcagacggcttagatatccgtaaactcgatatcggcgactgcgtggaacttctcaatcaagtcgtcgccgctgccccaattataatagttatcgatgcgctagatgaagtgaacgaagagcaacggcccggccttaccgaagctttgagtcagatcgttgttaactcgacgaacgtggttaaaatttttgtttcgggacggaacgatagtcgcttgtcagcgctgttggcagctaatatcgaggacgaacacaatacgcagacctcgaactcaggagcattgaatctcaagactatacaaattagccgcgagaacaattcaaaagatatggagtcgtacataaggtgtcgtcttgcttcagccaagagtaaccgacgtttgttgaaggacaaagcttcacaagacctcatgaacttactcacagatagattaattacaggagctggtgaaatgttccagtgggtcaacgcccagttacgatacatctgcgaccagactcatgaagacgacatcatgaacatcatttcagcaggaaaattgttgacgctagacggtcactatgcagctctatactggccctaccactatgccacaacagttacagacaaccaaaatgacagcctttggctcttggtctcgtctttcatctacgatacaccaggagatgtcagcctgtcatttgttacgtggatggacaacataggacacatctcagaatacatgcccattcatcaccccatgttggccattgtgcaggctattgctaactcagactgttcgccattgtttgttgcaagcctcttcaatctgtcaactttaatcgagacaattgtcgactcatctaagcacgcagacttggaaatccggaacgaccaaggccatacagctctgtatcttgcttgttttactgggagcatatctgtggcgcgtgtgttattagcccatggagcaaatcccaatgtaacgtgtggaaaattcggtaatcctttacaagctgcaagcttcgcggggcgtgcagatatcgctacattgctgctagcacaaggtagcctgatccatcaagacggaatgttccaaagcgcactcgaggcagctttctatggaagccacgaagactctgcattggcgatactcaaagatgagtctaccattcgaaatactgacgagtatgattccgcgctcgggtgtgcagctcaatgtggctttctccatgttatcgacttgcttgagacatctatctataccaacctgttcggcgtcatgccacccgaaaatcaaacaatcaaattgacaagagccattaaaggaggacagcttggcatcttacgtcatttcgttgaaaggcagtcgagtccgatgtcagcaatgcccagcgacgcaattgctactgcggcactgtacggacatgtcactctcgtaaccttcttgagcgagttgggacttgaccttgacaaagagggcaaacttgggtcgccacttcgatgtgctagtttaatgggtcatgtacatgctgtacgtgtcctcgttgagctgggcgcccgaatcaataactcaagtcactatggaacggcgctgcaggctgcgtcctcaaaaggtcatgcgagtatcgttgccctgctgctagagcagggagcagatgtaaatagtcagagtggtccatatggcacggccctgcaagctgccgcctatcacggacatcttgacgttttcagactcctcttgaaatctaatgcggagatggaactcggtggcatagctaaagacgcattccatgccgctgtgcttgggggacatcacgagttggtcaaatggatcctaaatcaaggtatcaccttccgttacagaatcaagactgttttttgtatagtgaagcgctcatcgaatgcaataaaggcgagcatggatgctcgcgagcgtgcaagtattcaaatgatctacgaagacgagtttttgcgcaacttcgatattgttagtacgagagataacgggaacattgttgtccacgacccaaaaaagcaacgcgcaaacttctaccaacagccttccgacgcaccctatgcgctgcaactaagcgcttcaagaggcgagaccgagatgctcatgatgctattacggcaccggcgtcgtttaacaatcaccgatgctgaaattcgggaagccctagaacacgctgctttaaatggtcacctagccatagtgaatcatctcgtgggcttcatgtcaaaaccattgctttattccgcagggttccgagcattgaagaaagcaattgctggtggccactcgacggttttcgattcacttgcgcaacaaatgtcttggaaatactggaaaacccatgaactcagtgatctgctcagccaagcctgcggcgctgatacagaaatgctggctaacgtatatgagaggcttcaggggcatatgtcccagccgaccctggctgagaccctcgtctctggcttgggaaacgcagcaagacatgggcgtagtgacgttgtggactcggcattcataagaccaatactttccattaatcaaagagcagcgcaggaggcttttagacttgcctgcgaaggaggccacaaaggtaccgtcatcactattctacgagccgccgcgcctgcctttttggatgcgaagaacattcgcgaaggcattttgacaagcgcatgtcgtggtcatcttgaactattagaatatctgatgagtctagctatatgtggcgaagaaaagcagaataaggtagagatcttccttttagctgtcagtcatgctcggcttaaagtagttcattggatcttggaacggagcaacggattggtgaaagatagcctcaattccgcaatagtcatggcatccgcgacgggaaacgctggcattgtacaagcactccttcaagatggtgctgatgcaaacagcattgtgcttctaaccactattaacccttctgaatcgcccctgattgttcggccaaatggctttccgtatgagaaggattgcacaatcacttgcttgcaagctgccctcctttatttgcagtcctattatgattccgactgggtgacgtatcaccggaccgcggaaacacgagaactcaagaacctagcagcagaagctccagtccagcttctcctcgatcacggagccaatgctaatagccgtggaaatattcccgaagttccgatacacattgcagttactcacggctctcatagggtagtgcggtggctcattgaagctggagcagatgtaaacttgctgaatggtggcgaaagtgcgctctggagggctgcctcgagaaaagaggatggcgcgagtatcgtacagttgttgttggactctggcgcggacatgccgcatgatgtcgaggcatttagccacttactcaaccaagccaaagcaaacttccgagacgatgccttatataaatcggggtacgaaaatttggactatacgaaagaagaggccctgaaaggtgtcagagccgatttcacaaacggacctggagctatcatacaaattctgcttcaacgtgctccggatcacatccgcctccagggaatagcgggttccgggtttgggctggtgcttcagagagctagcatgatcaatgagaacgaatttgtccgcactcttctggaaaaggggattgatgcagacgccgttggcggctggtatggcactgctttgcaagccgcggcgcgcttcggtcatttagaccttgtagaatacttgcttaaacaaggcgccgacccaaacatcattgctggcaagcaccataccgctctacgagcagccatcttgggatctcatgcgacagtagtcgaggcgcttctagatcatggcgcagacattaatatcacgcccgaaccacacggtcgtgaagatctggtatctttagtcgtattaactgccgaattcggcgattctaagattatgtcactgttgatcgccgccggattggatgtctcgagccacacgacatggcatccacatccgttgatcacagcctgcgagcggggtgaccttgaaatggtatcacatctcgtggaagcaggagcaccaatcaatgtccaatatgatggaaggcgtcctgatggcggtggtcccggcacgtcgccattacatatcgcatgtcttcaaggaaattccgagatggttgagttgctcatatgtatgggagctagcgtagagaccgcacttccgaactcacgtcattcatacccccttgagaaggccgcgcacgcaggacacgtctcggtcgttaggcttctgattgcagctggagcagatgtcaaccaaggatcgacagtagagagtgcggcagcaggtggacatttcgacgtcgtattggaactcctggccgccggcgccaccgtttacgacgaacaaaggcgtcttaatgccgtcgagggcgcattgaactcggaatgcaatcccatgataccagaagctcttctcacaacaacgataactctctcaaacggtgagaacatcgttttagacgcggtaagatcagttatgactacgagatactctaaaataccgccgaagactcttgatattatcggagaacatgttactccatgtccagatctcctcaaatatgcttgccgctcaggctccgtagacctggtggcgaagatgctaaaaaatgatatcgcgacggatcccggcagtgagctaactagtgaatctctattgctcgcggtatggtatctacaccccgaaattgtgcggctgttgttagatcacggcacaagcacggaaacccaggacaaagcgcttggcggtctgattagtgcagccattcttgcctgcaatgggcaaggtcttccgcagctagctgacggaaagacgcctctccagcgaaaggaacattacaagcgatctgaaagggctttccgcatgcgttctagacccggagcaccagatagattgtacgacatattgagcgcatcaggcgatactcggcaaggacgcaagagccaaaaatgcgcaatcattgtgcagattctccttgagtatggtgttgagtccggaatagactttgacgaatatggccaatcgttgcatcttgcgtgtctcacgggtctcgagtccgttgtggatgtgatgcttgtccatggcgtcaacgctaacgctgaagcgggatttttcaaatatccgcttttctgcgccttgcgtcaaggctaccttacgatagtcaagcggctcctcgagcatagcgcagatgctagtgcgatgcatcccgactttgggtcggcgctgcactttgcgtgtaagaggggagaccttgaggctgcgtacttgttactagaccatggagctagcgcaaatgtgcgaagtccgcgaggaaacactgtgctctcggtcctcatccccaaaatgcatgattttcatacaatggggctgatagacagtatactggacaagaccgacaacatacgactgtgtgagaatgacttggtggccgcggcgcgttgctggaagcagcaaattggtgatcggtactttcttgagatactactgagctacgacaccaagcagactgtcccggagtcggcaatccttgctttcttacaaagccacaccaacgtgcagagacccgatgaagctagatgcggtctacttcgatcacttcttagccgttacggctcgcgtaaagtgactgaatcaatgctgaagagcgctcaaaagactgccgagctagacattttgctatcgcaccgcccgcggtgccccattacactagatatagtggaggcgtcagagcattgggcgcttgcagaagcattgttgagggcagaaccaaaaatcataccttcagagaaaattgcgacagatgctcttaggcctagagacatgcggagtgtgccattctcgcatatttcgagacttgacttcctgcacctgttgtggaagcggaacaagggaatgaaagtcacgcaggatatgctaaagtatatcgacgattacaatctaaaggaggtagaatttctaatctcaagatacgatactacgctagagattcccgatgaagtgttcatcagagcaggaccagaggtgctgcgcatattggccaaatacagaccagacctacctgccaaggggatcggacaaagcactttcctgaagaagctgaagttcgggtttcctgatgtgacgatcgacacgatattaagcgccatgccgactgttcctgtttcagaggtggtcttcttggaggcttttaattgtttgaatgggacgtggccgcagcgaaatcagatgcttgtggatgttttgaagaaacatgggagaaaggttgagcttacggagaaggtgagggcgacgattgatgaggcgttgaaagatgataagtatcgggttgtgcgagaggcttattatcgtgagatacaagttcctgttgagaatattgtggagaaagttggatga

SEQ ID NO: 20147 - protein, 2526 aa, Muscodor strobelii
  misc_feature: SGI Peptide ID NO. 566792
  misc_feature (673)..(705): Pfam Id: PF00023 Pfam Desc: Ankyrin repeat
  misc_feature (1438)..(1470): Pfam Id: PF00023 Pfam Desc: Ankyrin repeat
  misc_feature (1606)..(1638): Pfam Id: PF00023 Pfam Desc: Ankyrin repeat
  misc_feature (2133)..(2165): Pfam Id: PF00023 Pfam Desc: Ankyrin repeat
  misc_feature (1751)..(1783): Pfam Id: PF00023 Pfam Desc: Ankyrin repeat
  misc_feature (904)..(933): Pfam Id: PF00023 Pfam Desc: Ankyrin repeat
  misc_feature (1609)..(1638): Pfam Id: PF00023 Pfam Desc: Ankyrin repeat
  misc_feature (1751)..(1778): Pfam Id: PF00023 Pfam Desc: Ankyrin repeat
  misc_feature (1442)..(1469): Pfam Id: PF00023 Pfam Desc: Ankyrin repeat
  misc_feature (1714)..(1742): Pfam Id: PF00023 Pfam Desc: Ankyrin repeat
  misc_feature (1639)..(1671): Pfam Id: PF00023 Pfam Desc: Ankyrin repeat
  misc_feature (1786)..(1818): Pfam Id: PF00023 Pfam Desc: Ankyrin repeat
  misc_feature (1948)..(1975): Pfam Id: PF00023 Pfam Desc: Ankyrin repeat
  misc_feature (659)..(1841): NCBI GI: 242816359 Blast Desc: multiple ankyrin repeats single kh domain protein, [Talaromyces stipitatus ATCC 10500] gi|218715100|gb|EED14523.1| multiple ankyrin repeats single kh domain protein, [Talaromyces
  misc_feature (663)..(1771): NCBI GI: 242816359 Blast Desc: multiple ankyrin repeats single kh domain protein, [Talaromyces stipitatus ATCC 10500] gi|218715100|gb|EED14523.1| multiple ankyrin repeats single kh domain protein, [Talaromyces
  misc_feature (2)..(496): NCBI GI: 116179068 Blast Desc: CHGG_00162 [Chaetomium globosum CBS 148.51] gi|88184459|gb|EAQ91927.1| CHGG_00162 [Chaetomium globosum CBS 148.51]
  misc_feature (568)..(987): NCBI GI: 55823921 Blast Desc: ankyrin repeat containing protein [Fusarium heterosporum]
  misc_feature (15)..(572): NCBI GI: 189193223 Blast Desc: conserved [Pyrenophora tritici-repentis Pt-1C-BFP] gi|187978514|gb|EDU45140.1| conserved [Pyrenophora tritici-repentis Pt-1C-BFP]
  misc_feature (567)..(997): NCBI GI: 169776862 Blast Desc: [Aspergillus oryzae RIB40] gi|83771633|dbj|BAE61764.1| protein product [Aspergillus oryzae]
  misc_feature (904)..(2179): NCBI GI: 242816359 Blast Desc: multiple ankyrin repeats single kh domain protein, [Talaromyces stipitatus ATCC 10500] gi|218715100|gb|EED14523.1| multiple ankyrin repeats single kh domain protein, [Talaromyces
  misc_feature (823)..(1849): NCBI GI: 212532817 Blast Desc: multiple ankyrin repeats single kh domain protein, [Penicillium marneffei ATCC 18224] gi|210071929|gb|EEA26018.1| multiple ankyrin repeats single kh domain protein, [Penicillium
  misc_feature (1422)..(2164): NCBI GI: 67526171 Blast Desc: AN3543.2 [Aspergillus nidulans FGSC A4] gi|40739678|gb|EAA58868.1| AN3543.2 [Aspergillus nidulans FGSC A4] gi|259481936|tpe|CBF75924.1| TPA: conserved [Aspergillus FGSC
  misc_feature (630)..(1668): NCBI GI: 242816359 Blast Desc: multiple ankyrin repeats single kh domain protein, [Talaromyces stipitatus ATCC 10500] gi|218715100|gb|EED14523.1| multiple ankyrin repeats single kh domain protein, [Talaromyces
MSNPHQHGSYWAKAYDALDPGLQATLQATRPGKLDVLKILLHTAEKKRAICIRNRLRVRLPNGQVSIVRDVVEKIAGWVRKFIAIGDVAIQSDPQTAALPWAAVRFILQACISDNLLDGAMVSDLEEISRLITKYHHFEQIHLQRNAVSKPQLEEATTKLYASILAFLASAVQYYGKRAISRTAQGTFRGSTNHLLPEILREESELFILADLADAEVLRSLENSVTRLVAKAVVDGEIPDESKHQELLHWLSTVPASAHHELISKTRMPGSAAWLLDHPVYRDWRNSSASATLHLQGVPGSGKSTICSAVVDSFLAERKSNSLAAPVAYFYCTNWESERERGQPTEIMRSLLRQLVVTCPTHLGIKNLIHAAYEKRVAQSKADGLDIRKLDIGDCVELLNQVVAAAPIIIVIDALDEVNEEQRPGLTEALSQIVVNSTNVVKIFVSGRNDSRLSALLAANIEDEHNTQTSNSGALNLKTIQISRENNSKDMESYIRCRLASAKSNRRLLKDKASQDLMNLLTDRLITGAGEMFQWVNAQLRYICDQTHEDDIMNIISAGKLLTLDGHYAALYWPYHYATTVTDNQNDSLWLLVSSFIYDTPGDVSLSFVTWMDNIGHISEYMPIHHPMLAIVQAIANSDCSPLFVASLFNLSTLIETIVDSSKHADLEIRNDQGHTALYLACFTGSISVARVLLAHGANPNVTCGKFGNPLQAASFAGRADIATLLLAQGSLIHQDGMFQSALEAAFYGSHEDSALAILKDESTIRNTDEYDSALGCAAQCGFLHVIDLLETSIYTNLFGVMPPENQTIKLTRAIKGGQLGILRHFVERQSSPMSAMPSDAIATAALYGHVTLVTFLSELGLDLDKEGKLGSPLRCASLMGHVHAVRVLVELGARINNSSHYGTALQAASSKGHASIVALLLEQGADVNSQSGPYGTALQAAAYHGHLDVFRLLLKSNAEMELGGIAKDAFHAAVLGGHHELVKWILNQGITFRYRIKTVFCIVKRSSNAIKASMDARERASIQMIYEDEFLRNFDIVSTRDNGNIVVHDPKKQRANFYQQPSDAPYALQLSASRGETEMLMMLLRHRRRLTITDAEIREALEHAALNGHLAIVNHLVGFMSKPLLYSAGFRALKKAIAGGHSTVFDSLAQQMSWKYWKTHELSDLLSQACGADTEMLANVYERLQGHMSQPTLAETLVSGLGNAARHGRSDVVDSAFIRPILSINQRAAQEAFRLACEGGHKGTVITILRAAAPAFLDAKNIREGILTSACRGHLELLEYLMSLAICGEEKQNKVEIFLLAVSHARLKVVHWILERSNGLVKDSLNSAIVMASATGNAGIVQALLQDGADANSIVLLTTINPSESPLIVRPNGFPYEKDCTITCLQAALLYLQSYYDSDWVTYHRTAETRELKNLAAEAPVQLLLDHGANANSRGNIPEVPIHIAVTHGSHRVVRWLIEAGADVNLLNGGESALWRAASRKEDGASIVQLLLDSGADMPHDVEAFSHLLNQAKANFRDDALYKSGYENLDYTKEEALKGVRADFTNGPGAIIQILLQRAPDHIRLQGIAGSGFGLVLQRASMINENEFVRTLLEKGIDADAVGGWYGTALQAAARFGHLDLVEYLLKQGADPNIIAGKHHTALRAAILGSHATVVEALLDHGADINITPEPHGREDLVSLVVLTAEFGDSKIMSLLIAAGLDVSSHTTWHPHPLITACERGDLEMVSHLVEAGAPINVQYDGRRPDGGGPGTSPLHIACLQGNSEMVELLICMGASVETALPNSRHSYPLEKAAHAGHVSVVRLLIAAGADVNQGSTVESAAAGGHFDVVLELLAAGATVYDEQRRLNAVEGALNSECNPMIPEALLTTTITLSNGENIVLDAVRSVMTTRYSKIPPKTLDIIGEHVTPCPDLLKYACRSGSVDLVAKMLKNDIATDPGSELTSESLLLAVWYLHPEIVRLLLDHGTSTETQDKALGGLISAAILACNGQGLPQLADGKTPLQRKEHYKRSERAFRMRSRPGAPDRLYDILSASGDTRQGRKSQKCAIIVQILLEYGVESGIDFDEYGQSLHLACLTGLESVVDVMLVHGVNANAEAGFFKYPLFCALRQGYLTIVKRLLEHSADASAMHPDFGSALHFACKRGDLEAAYLLLDHGASANVRSPRGNTVLSVLIPKMHDFHTMGLIDSILDKTDNIRLCENDLVAAARCWKQQIGDRYFLEILLSYDTKQTVPESAILAFLQSHTNVQRPDEARCGLLRSLLSRYGSRKVTESMLKSAQKTAELDILLSHRPRCPITLDIVEASEHWALAEALLRAEPKIIPSEKIATDALRPRDMRSVPFSHISRLDFLHLLWKRNKGMKVTQDMLKYIDDYNLKEVEFLISRYDTTLEIPDEVFIRAGPEVLRILAKYRPDLPAKGIGQSTFLKKLKFGFPDVTIDTILSAMPTVPVSEVVFLEAFNCLNGTWPQRNQMLVDVLKKHGRKVELTEKVRATIDEALKDDKYRVVREAYYREIQVPVENIVEKVG

SEQ ID NO: 20148 - DNA, 2750 bp, Muscodor strobelii
  misc_feature: SGI EST ID NO. CUFF.47140.0
  misc_feature: Variant of the nucleotide sequence at SEQ ID NO 20146
cttgggtctgtcctgcccgtctaccttgcccacagctctctcctcatcggacaccttgactagaacctcaacatctgctgagattgagattttagacctcatcgatatccccttaaacatccagtggttcttaatatgcttcatgagttcatctcctaacaaatgccccgctcacgtaccacgcgtccgctctcacgtgtaatgagtccatatcgtaactctgcttggcccttcactttttcctcgcaatcgggtcctcagacatgcctcgcccctattataccttcaatccaggtcgatatcactgcagaaacgaggataccttgacggctagtggttcactatgaaggcattcattccttcaagccatacctggatcgctaacgcatctcacatgcacactctggtcttggcaacctaatagactcggagctgcatacctaaggtattgataccgggcggagcatcagcagccacatctttgcatgttccatcgcaacatctatgtcaaagtaggctacgcccgggggccttgtcattgtcattgtcaatgtcattgtgagtcacatcatagccctcaaacataaaatcaaacatgattcttgtccgagccttgtcctctacgctggcattcatgtaacccacatcgtttgcctttcactcaacatggactagtaacggtgaccatgtctaacccacatcaacatggctcctactgggctaaggcgtatgatgctcttgaccctggactccaagcgactttgcaagcaaccaggcctggaaaattggatgtcttgaagatcttgctgcatactgccgagaagaagcgcgcaatttgcattcgtaacaggctacgggtccggctccctaatggccaagtttcgatcgttcgggatgtggtagagaagatcgctggatgggttcgaaagtttatcgctataggggacgttgcaattcaatccgaccctcaaacagcagcactcccgtgggctgcggtgcgctttatcttgcaagcttgtataagtgataacttactcgatggtgcgatggtgtcagaccttgaggagatctctcgtttgatcaccaaataccatcatttcgaacaaatccatcttcagcggaacgccgtgtcaaagccacagctagaagaagcgacaactaaactctatgctagtattctggcgtttctcgcgtcagctgtccagtactatggaaaacgcgcaatatctcgcactgctcaggggactttcagggggtcaacaaatcacctgctaccagagatactgcgagaggaaagcgagcttttcattctagccgacctcgctgacgctgaggtgttgcgctctctcgagaactccgtcacccggcttgtcgcaaaagctgtcgttgatggtgagattccggacgagtcaaagcaccaagagcttctgcactggctctcgacggtcccagctagtgcgcatcacgagttgatatcgaaaaccaggatgccaggttcggctgcgtggctgttggaccaccctgtgtatagagactggagaaattcgagtgcttctgcgactttacaccttcaaggcgttcccggatccggtaaatccacaatttgctcagctgtagtggactcatttcttgccgagagaaaatcgaatagtcttgccgcacctgtcgcgtacttctactgtactaactgggaaagcgaacgagaaagaggccaaccaactgaaatcatgagaagcttactgagacaactcgttgtcacctgtccaacacacctcggcatcaagaacttgatccacgcggcgtatgagaaacgtgttgcacagtctaaagcagacggcttagatatccgtaaactcgatatcggcgactgcgtggaacttctcaatcaagtcgtcgccgctgccccaattataatagttatcgatgcgctagatgaagtgaacgaagagcaacggcccggccttaccgaagctttgagtcagatcgttgttaactcgacgaacgtggttaaaatttttgtttcgggacggaacgatagtcgcttgtcagcgctgttggcagctaatatcgaggacgaacacaatacgcagacctcgaactcaggagcattgaatctcaagactatacaaattagccgcgagaacaattcaaaagatatggagtcgtacataaggtgtcgtcttgcttcagccaagagtaaccgacgtttgttgaaggacaaagcttcacaagacctcatgaacttactcacagatagattaattacaggagctggtgaaatgttccagtgggtcaacgcccagttacgatacatctgcgaccagactcatgaagacgacatcatgaacatcatttcagcaggaaaattgttgacgctagacggtgtctattcctcgacgctcgagagaacttcgagagcggaaactatttcatccaccatcgctacccgaacattctgctggctcttgtatatgagagagtctatgccttcagaggcatttcttcgttgcgtatcggcgcaacgtcaagacggacaattagcacttcaatcggatgacttgatctatatttgctcagacttgattaggctggattccgaatgtgattgttttcggttctctcacgcgtctgcgctcgaatttctcgagaagcaagagtacttttctcaagagaaagcgcatcggctcatatccgaacgatgcattaaagtgtgcataaatgggtcgaacatccatggcccatctgcgtcg

SEQ ID NO: 20149 - DNA, 1725 bp, Muscodor strobelii
  misc_feature: SGI cDNA ID NO. 566793
  misc_feature: Reduced expression when VOC is produced
  misc_feature: Encodes the peptide sequence at SEQ ID NO 20150
atgcagcgccgtgccctcacccgacggctcttgctgcttccagccgtgaagcctcaatcaccaacgacaccccgcctcatcatagcccgcgcgcagctcgcctcccaggccagaccacagcttcccttcctctcgacgccccttgccggccagggccagttccgatatctcacgacagagcgcaaacgatggatagtcttcgaagtctaccgcggcgtcaagttcaccctctacttctgggccatggccgggtgcgctctcgtggccttctggtgtgtccagcaagaatggttcgagagacagtggccctcgccccacgagtggtccttcatcagcagagtccgctttcgattctgcaacatgaaggctaatgagcagggtctgatcaaggtggaatggcccgtcatctcgcagtccatcacaaacctcatcgggcggctggaggacaggaacctagacggcgagggactgcaggacttgatcgagggcggtgtttggatcgatggcgttggaaactcaggcttcgacatccaggcaaagagcgagaactggaggagaggctactatgagaccttgatgctcgccgcgaaatgtgctgagcatctcgacgaccacgtgctcgacacgacgaggaggattgtcttccccgccgaacatgtcattgggccttcgaaccccaaccccagaccgatccccttcggttccgcgagtgcaccaaaggaggaaaactgcacgcgcgcatttgtcgagcccgaaacgttctacatgcgcatcctcacaacaaggggcttctcaacgaaacagaagatggatgccgcactagcctacgcatcatggctcgactacaagaacgtgcccgacgccgccataaggatgtacgaatgggcactttccatcgcatccgagaacaccccgcccaccgcactcccatacgacacccaatcctacgtcgtgaaagaaggcatccgccaccctgcatccaacatcctcacctctctcaccgccctcgccgcccacaaggcccgtaacgacgacatctccaccgctctccccatcctcctctccgtccttcgcgcccgacgctccttacccgacccctcgtcaaatacccgaaccatgaacaccaccactcaatcagccaccgactccccctgggcacccaaaaacatcctcaatacgataacccacctcatctcacccccatcctaccccccaccaccatcctcaggcgaagagccacctatcagagacgcaaaaggactctgcgaagaagcagggctgaatctctacattggggaaataatctacgcatcgggcaactcccacgaagacggcatcgcatggacccgcgaagctgtggatctcgccgaagaacaactacatactctcaagagcgagaaaacaactaatgacgacgcgaagaagacgtgtagggagtgcttaagctctggattgggaaactgggggacgatggttgagagactcattagggaggaacaggccaggagagaaaaggaggagaataagggtgctgggaagggttggctgggtctttggggtaatggaaatagtgaaggtaatgtggaagagcagagtggtgtaggacgatgggaggcagagggtctggtcatcaaggagagagtcagaagggcacaggatgtgctagaagagatggagaggccgagcagtttgattggtgctgccatgaatattcttaaggcatag

SEQ ID NO: 20150 - protein, 574 aa, Muscodor strobelii
  misc_feature: SGI Peptide ID NO. 566793
  misc_feature (1)..(557): NCBI GI: 154321874 Blast Desc: BC1G_01084 [Botryotinia fuckeliana B05.10] gi|150850331|gb|EDN25524.1| BC1G_01084 [Botryotinia fuckeliana B05.10]
  misc_feature (1)..(558): NCBI GI: 46135797 Blast Desc: FG09414.1 [Gibberella zeae PH-1]
  misc_feature (11)..(558): NCBI GI: 85114592 Blast Desc: NCU00562 [Neurospora crassa OR74A] gi|28926515|gb|EAA35487.1| [Neurospora crassa OR74A]
  misc_feature (1)..(570): NCBI GI: 145245343 Blast Desc: An11g09800 [Aspergillus niger] gi|134079639|emb|CAK97065.1| [Aspergillus niger]
  misc_feature (19)..(550): NCBI GI: 238505418 Blast Desc: conserved [Aspergillus flavus NRRL3357] gi|220690052|gb|EED46402.1| conserved [Aspergillus flavus NRRL3357]
  misc_feature (19)..(550): NCBI GI: 169780434 Blast Desc: [Aspergillus oryzae RIB40] gi|83773421|dbj|BAE63548.1| protein product [Aspergillus oryzae]
  misc_feature (37)..(556): NCBI GI: 119493162 Blast Desc: NFIA_070740 [Neosartorya fischeri NRRL 181] gi|119411960|gb|EAW21903.1| conserved [Neosartorya fischeri NRRL 181]
  misc_feature (28)..(562): NCBI GI: 171683973 Blast Desc: protein product [Podospora anserina] gi|170941947|emb|CAP67599.1| protein product [Podospora anserina]
  misc_feature (37)..(556): NCBI GI: 159127967 Blast Desc: conserved [Aspergillus fumigatus A1163]
  misc_feature (37)..(556): NCBI GI: 71000541 Blast Desc: conserved [Aspergillus fumigatus Af293] gi|66852591|gb|EAL92916.1| conserved [Aspergillus fumigatus Af293]
  misc_feature: Useful for introducing or modulating the production of volatile compounds
MQRRALTRRLLLLPAVKPQSPTTPRLIIARAQLASQARPQLPFLSTPLAGQGQFRYLTTERKRWIVFEVYRGVKFTLYFWAMAGCALVAFWCVQQEWFERQWPSPHEWSFISRVRFRFCNMKANEQGLIKVEWPVISQSITNLIGRLEDRNLDGEGLQDLIEGGVWIDGVGNSGFDIQAKSENWRRGYYETLMLAAKCAEHLDDHVLDTTRRIVFPAEHVIGPSNPNPRPIPFGSASAPKEENCTRAFVEPETFYMRILTTRGFSTKQKMDAALAYASWLDYKNVPDAAIRMYEWALSIASENTPPTALPYDTQSYVVKEGIRHPASNILTSLTALAAHKARNDDISTALPILLSVLRARRSLPDPSSNTRTMNTTTQSATDSPWAPKNILNTITHLISPPSYPPPPSSGEEPPIRDAKGLCEEAGLNLYIGEIIYASGNSHEDGIAWTREAVDLAEEQLHTLKSEKTTNDDAKKTCRECLSSGLGNWGTMVERLIREEQARREKEENKGAGKGWLGLWGNGNSEGNVEEQSGVGRWEAEGLVIKERVRRAQDVLEEMERPSSLIGAAMNILKA

SEQ ID NO: 20151 - DNA, 2157 bp, Muscodor strobelii
  misc_feature: SGI EST ID NO. CUFF.47145.0
  misc_feature: Variant of the nucleotide sequence at SEQ ID NO 20149
gttaggtactccatcctcaccttatcctcgacgacggccaaaagctcagtatcgccaatacccagcacgcatccgccaagaactagcgagcggtcattatacttgcctagaaagggctttggcatcatgccgtgaaccccaagctgcaacccagccgtccattgccacgacatcagcccgacccggcgcagggtcatcatccaagatgcagcgccgtgccctcacccgacggctcttgctgcttccagccgtgaagcctcaatcaccaacgacaccccgcctcatcatagcccgcgcgcagctcgcctcccaggccagaccacagcttcccttcctctcgacgccccttgccggccagggccagttccgatatctcacgacagagcgcaaacgatggatagtcttcgaagtctaccgcggcgtcaagttcaccctctacttctgggccatggccgggtgcgctctcgtggccttctggtgtgtccagcaagaatggttcgagagacagtggccctcgccccacgagtggtccttcatcagcagagtccgctttcgattctgcaacatgaaggctaatgagcagggtctgatcaaggtggaatggcccgtcatctcgcagtccatcacaaacctcatcgggcggctggaggacaggaacctagacggcgagggactgcaggacttgatcgagggcggtgtttggatcgatggcgttggaaactcaggcttcgacatccaggcaaagagcgagaactggaggagaggctactatgagaccttgatgctcgccgcgaaatgtgctgagcatctcgacgaccacgtgctcgacacgacgaggaggattgtcttccccgccgaacatgtcattgggccttcgaaccccaaccccagaccgatccccttcggttccgcgagtgcaccaaaggaggaaaactgcacgcgcgcatttgtcgagcccgaaacgttctacatgcgcatcctcacaacaaggggcttctcaacgaaacagaagatggatgccgcactagcctacgcatcatggctcgactacaagaacgtgcccgacgccgccataaggatgtacgaatgggcactttccatcgcatccgagaacaccccgcccaccgcactcccatacgacacccaatcctacgtcgtgaaagaaggcatccgccaccctgcatccaacatcctcacctctctcaccgccctcgccgcccacaaggcccgtaacgacgacatctccaccgctctccccatcctcctctccgtccttcgcgcccgacgctccttacccgacccctcgtcaaatacccgaaccatgaacaccaccactcaatcagccaccgactccccctgggcacccaaaaacatcctcaatacgataacccacctcatctcacccccatcctaccccccaccaccatcctcaggcgaagagccacctatcagagacgcaaaaggactctgcgaagaagcagggctgaatctctacattggggaaataatctacgcatcgggcaactcccacgaagacggcatcgcatggacccgcgaagctgtggatctcgccgaagaacaactacatactctcaagagcgagaaaacaactaatgacgacgcgaagaagacgtgtagggagtgcttaagctctggattgggaaactgggggacgatggttgagagactcattagggaggaacaggccaggagagaaaaggaggagaataagggtgctgggaagggttggctgggtctttggggtaatggaaatagtgaaggtaatgtggaagagcagagtggtgtaggacgatgggaggcagagggtctggtcatcaaggagagagtcagaagggcacaggatgtgctagaagagatggagaggccgagcagtttgattggtgctgccatgaatattcttaaggcatagactcattcgttggctgtctcttggaacagaaaacatgccatgggatgcaaaacaaggagtattgacgaatgaaaggagagtgggaatattgagaggagttgtatataccattgtatctataccactcttttgccacgataaggctgtagtatcgagtatgataatcgacatgaagtcaaaatcaacgctatataacccaatgcctcgagaaaacgcttccctgaaat

SEQ ID NO: 20152 - DNA, 2043 bp, Muscodor strobelii
  misc_feature: SGI cDNA ID NO. 566794
  misc_feature: Encodes the peptide sequence at SEQ ID NO 20153
atgttcgtgcgcaagtggtcgggcctgcccgcagaccctcaattccatactagcctcaaggatcttggatacttcgtcaatgaagatgacgagatccgctcgatcgagaaccctgactactacttcaagttcttcatcaaccgcaatccgcgatggaacgagcgccagcgcttctccatgcaccaagctgtgcaagcaatcatctttgagcgcctcgagcgcctcggcatgcagaagaccatcttacccctgggccacaccgatctcaccaagcagcacctgcccatcttcatgagcaaagacatcgagaaggcctcccgcgtcgtcgtcatcttcggcgagactcatcaggatctcggtatcctcgcctggcgcgttgtatgcggaccaggcggaatcaataaagggtgcatgacctccatcgttaaggaattgcagaagcagcagtcttctcctattgacaccaacccgcctggcatcatattagccaacatcggggagctcacttggtgggacgaaggcaagcgcactgtaaaccgcaatgcgttcgaggggcagcccatgcaatcggcctgtcaccctagagcctacatcaactttactggagagtaccatgtacccggtaacgagacagccaaggctcacatccaatacatcttcgacaaaatcatctccgatcccaagctcattcgtgccgatgccaagattgacctcctggccattggagatggagcagatgtcctgaccaacgtcctgaacaatatgtggcctggacctgacaggatctgggacaagcgtatcaactgctttgccaatgtcggcggcatgttacctgtctggttcatcgagaatgaggacttcttggaggggtttatgagggagcagcgaacacgcgtctggaccctctcaggcgagcccatcggcacggtactctcaaccttcgagggaaacgagaagacaggggcattcacagaactcgggtcctacgtattcagttccggtcacgagacctacaccgagatgatgctgatccattgccatgccgccgtcctcggcttcatgcaagaagtcgcgctgttcgtccctttcagtatcacgactatgaacaaggacgacgacggcaagacggagagcaaggaggtcgagatggtcagatacagaaatccggacttttccactacttatagtgatcctgttgatcaagaacccagtacgtgggcttccgaggttaagaaacagggatggactgttccggttgctgcttgggagcggcctgatcctatggagactgtgaccgctgccaaggggcctgccgcagattcgaagaagaaagaccctgctgagcccgagccaactagtatgacggacaagggctcagaggagggtcctgagatgagcagggataagagtaaagaggaaccccaactggcggacaatcagaaagatgaagccaagaacacgagcaaggagacactgcaggagaagggaccaatccaccctagagatgtggactggcgcaaaaagcacgggaatcaaggacttaccagtactccctgtggtgatggctggacctctgatgagatccgggaggaggagggttctgacgaggatgatgccgatatcccttatcgtgtcgatggacagcttctcgtgggtgaggctaaggctaaggccaaggctgaagttgaagctaagctaaaggctgaggctgaggctaggtttgaggcttatgagttggctttggaggtggttaggaaggaggctaaggagatggagaaagagaaggaaaaggagatcgagaaggagatcgagaaggagatcgagaaggagatcgagaaggagatcgagaaggagatcgagaaggagatcgagaaggagatcgagaaggagatcgagaaggaggttgggggtggagttgaggagactgctcctggcggcgagaaggaaaatgagaagaccaagggcaaagagaaggaaagcgagagcaagaacaagcctgtcgttggtgacgataagggtgatgaggagacgggtgcttcttga

SEQ ID NO: 20153 - protein, 680 aa, Muscodor strobelii
  misc_feature: SGI Peptide ID NO. 566794
  misc_feature (1)..(359): NCBI GI: 116193023 Blast Desc: CHGG_06229 [Chaetomium globosum CBS 148.51] gi|88182142|gb|EAQ89610.1| CHGG_06229 [Chaetomium globosum CBS 148.51]
  misc_feature (1)..(359): NCBI GI: 85114596 Blast Desc: NCU00563 [Neurospora crassa OR74A] gi|28926516|gb|EAA35488.1| [Neurospora crassa OR74A]
  misc_feature (1)..(364): NCBI GI: 46135799 Blast Desc: FG09415.1 [Gibberella zeae PH-1]
  misc_feature (1)..(372): NCBI GI: 39971107 Blast Desc: MGG_03020 [Magnaporthe grisea 70-15] gi|149210665|ref|XP_001522707.1| MGCH7_ch7g805 [Magnaporthe grisea 70-15] gi|86196760|gb|EAQ71398.1| MGCH7_ch7g805 grisea
  misc_feature (1)..(358): NCBI GI: 154321876 Blast Desc: BC1G_01085 [Botryotinia fuckeliana B05.10] gi|150850332|gb|EDN25525.1| BC1G_01085 [Botryotinia fuckeliana B05.10]
  misc_feature (1)..(358): NCBI GI: 156045758 Blast Desc: SS1G_09155 [Sclerotinia sclerotiorum 1980] gi|154693551|gb|EDN93289.1| SS1G_09155 [Sclerotinia sclerotiorum 1980]
  misc_feature (24)..(360): NCBI GI: 171683903 Blast Desc: protein product [Podospora anserina] gi|170941912|emb|CAP67564.1| protein product [Podospora anserina]
  misc_feature (24)..(358): NCBI GI: 261353289 Blast Desc: mitochondrial 40S ribosomal protein MRP2 [Verticillium albo-atrum VaMs.102]
  misc_feature (30)..(359): NCBI GI: 256727646 Blast Desc: NECHADRAFT_91217 [Nectria haematococca mpVI 77-13-4]
  misc_feature (1)..(361): NCBI GI: 238840882 Blast Desc: conserved [Microsporum canis CBS 113480]
MFVRKWSGLPADPQFHTSLKDLGYFVNEDDEIRSIENPDYYFKFFINRNPRWNERQRFSMHQAVQAIIFERLERLGMQKTILPLGHTDLTKQHLPIFMSKDIEKASRVVVIFGETHQDLGILAWRVVCGPGGINKGCMTSIVKELQKQQSSPIDTNPPGIILANIGELTWWDEGKRTVNRNAFEGQPMQSACHPRAYINFTGEYHVPGNETAKAHIQYIFDKIISDPKLIRADAKIDLLAIGDGADVLTNVLNNMWPGPDRIWDKRINCFANVGGMLPVWFIENEDFLEGFMREQRTRVWTLSGEPIGTVLSTFEGNEKTGAFTELGSYVFSSGHETYTEMMLIHCHAAVLGFMQEVALFVPFSITTMNKDDDGKTESKEVEMVRYRNPDFSTTYSDPVDQEPSTWASEVKKQGWTVPVAAWERPDPMETVTAAKGPAADSKKKDPAEPEPTSMTDKGSEEGPEMSRDKSKEEPQLADNQKDEAKNTSKETLQEKGPIHPRDVDWRKKHGNQGLTSTPCGDGWTSDEIREEEGSDEDDADIPYRVDGQLLVGEAKAKAKAEVEAKLKAEAEARFEAYELALEVVRKEAKEMEKEKEKEIEKEIEKEIEKEIEKEIEKEIEKEIEKEIEKEIEKEVGGGVEETAPGGEKENEKTKGKEKESESKNKPVVGDDKGDEETGAS

SEQ ID NO: 20154 - DNA, 345 bp, Muscodor strobelii
  misc_feature: SGI cDNA ID NO. 566795
  misc_feature: Encodes the peptide sequence at SEQ ID NO 20155
atgtcgatgttcagggcgaagaagatggacctcgggtgcaacatcatcaacacccgcattgtccgcgatcacactaaacggaagacatttgccgcattcgagcccgagagacaagcactccgatatatcattcgcaacaccactctccctgcccgcacccgtgccgaagcccagctccaattgacgcagatgcactgctatactcgcccgacccagatccgcggacgatgtattctaggtggcaaaacaaggggtatattgcgggatttcaaattatcaagatacaacttcaggatgcaggcattatcaggcaacattccgggtgtgcggaaggccagttggtag

SEQ ID NO: 20155 - protein, 114 aa, Muscodor strobelii
  misc_feature: SGI Peptide ID NO. 566795
  misc_feature (59)..(113): Pfam Id: PF00253 Pfam Desc: Ribosomal protein S14p/S29e
  misc_feature (1)..(114): NCBI GI: 39971105 Blast Desc: conserved [Magnaporthe grisea 70-15] gi|149210663|ref|XP_001522706.1| MGCH7_ch7g804 [Magnaporthe grisea 70-15] gi|86196759|gb|EAQ71397.1| MGCH7_ch7g804 grisea
  misc_feature (1)..(114): NCBI GI: 85114600 Blast Desc: mitochondrial 40S ribosomal protein MRP2 [Neurospora crassa OR74A] gi|28926517|gb|EAA35489.1| mitochondrial 40S ribosomal protein MRP2 [Neurospora crassa OR74A]
  misc_feature (1)..(114): NCBI GI: 171683905 Blast Desc: protein product [Podospora anserina] gi|170941913|emb|CAP67565.1| protein product [Podospora anserina]
  misc_feature (1)..(114): NCBI GI: 46105080 Blast Desc: FG00168.1 [Gibberella zeae PH-1]
  misc_feature (1)..(114): NCBI GI: 116193019 Blast Desc: conserved [Chaetomium globosum CBS 148.51] gi|88182140|gb|EAQ89608.1| conserved [Chaetomium globosum CBS 148.51]
  misc_feature (1)..(114): NCBI GI: 256732413 Blast Desc: [Nectria haematococca mpVI 77-13-4]
  misc_feature (1)..(114): NCBI GI: 154321878 Blast Desc: mitochondrial 40S ribosomal protein MRP2 [Botryotinia fuckeliana B05.10] gi|150850333|gb|EDN25526.1| mitochondrial 40S ribosomal protein MRP2 [Botryotinia fuckeliana B05.10]
  misc_feature (1)..(114): NCBI GI: 156045756 Blast Desc: conserved [Sclerotinia sclerotiorum 1980] gi|154693550|gb|EDN93288.1| conserved [Sclerotinia sclerotiorum 1980]
  misc_feature (1)..(114): NCBI GI: 225678810 Blast Desc: mitochondrial 40S ribosomal protein MRP2 [Paracoccidioides brasiliensis Pb03] gi|226293645|gb|EEH49065.1| mitochondrial 40S ribosomal protein MRP2 [Paracoccidioides Pb18]
  misc_feature (1)..(114): NCBI GI: 226281466 Blast Desc: mitochondrial 40S ribosomal protein MRP2 [Paracoccidioides brasiliensis Pb01]
MSMFRAKKMDLGCNIINTRIVRDHTKRKTFAAFEPERQALRYIIRNTTLPARTRAEAQLQLTQMHCYTRPTQIRGRCILGGKTRGILRDFKLSRYNFRMQALSGNIPGVRKASW

SEQ ID NO: 20156 - DNA, 2197 bp, Muscodor strobelii
  misc_feature: SGI EST ID NO. CUFF.47572.1
  misc_feature: Variant of the nucleotide sequence at SEQ ID NO 20154
gaacgatcaagtggtggagaacgtcgtcgggtaggagggtctacatgaatgttaggaagtggcatcatacgacattgagtcttgcgttctttttcatgttttattctaattcattctgctcactagtagtcaatcgttgtccgcatttaagtcgtttgtttttaaatctagtgtagtcgtaccatgtgtcaatctctagcaaaagctaggaatactttccccgtcactttgaagtgtcaaacgatttcgagtcatctagcaccggtaacgccgtgattacacaacatttcaatagctcacttgaataatctgggaccacctgcgcatgacaacacgggtcaatatgctgttctcatagtgtcatcaattcgttgaagctaccgagaaggaacgccaagtcccctaatgctcatatcccatgaacgccatctcaatgatacatgttaaacgatagaccgtttaggccttgcccttgcgtttgaggtactcctcctcctcggcctggatgtcagcatctatcttcgcgcctctggagggttcgttgccgtggagcttggcctgtcattacgtcagctcgtgtctgggtctgcgacaagatggcagtagcggcgtagtgtgatatgagcttacaggtagagtggggtcctgcttcaaggcagcgacctcaggtgtgtcctggtcgccctccttctccttacgctcctcattggcgagacgattggcaatggatcgctcatcctctgcgtatcatgtaagtaggtgcacacatgaattcgatgaaagcagcactgaatgtaggacatactggagtcgttggccaagtgagagtgctccttgccctcctcgaatctgacgggctggttgggttcctcgccagacttgtaagtgcgctggtcatcagccgcatagacgccactggtgccgaccttggagtttccagacattttgattgtgtgtgcggtgttggaaatggtgaaggagtttgtgaggacgatgttaatgtttggaaagttggaggggtgttaagtgtttttcgccagattgattaatgaaggaagaaacattcgcaggtgagacactgcagcggaatctttatattcatccgaactttgcatcatgatgcccctctgtcagaggaatgcgctcctacgtcatcaccaacagtgtttgctactagaacccaccatagctcgctaaattccggggcttaccaacgggccaggaacaccgggccacactgatagtggcacggctctgacagagtgggaaacagacctttgttgcatgcaaaatctgagtcgttacactgattgctctatccgatttacgtttggcgcagcagtgatatcagcacgcgacgtcattgactccacgagccgcattcgttcctggctagagcgggtctcggagcttttcgcacgacattgccacgtctgggagagaggtcatcgaatccgccagctgcctgaaaaccgatacgccatgacagctggcagctacaattgggattgacaacgattccgaaaattcgaaggtacaagcttcgtatcaagcgcgacgaagaccattatcatcaatcaacgacaaccacacaacaccgccaagatgtcgatgttcagggcgaagaagatggacctcgggtgcaacatcatcaacacccgcattgtccgcgatcacactaaacggaagacatttgccgcattcgagcccgagagacaagcactccgatatatcattcgcaacaccactctccctgcccgcacccgtgccgaagcccagctccaattgacgcagatgcactgctatactcgcccgacccagatccgcggacgatgtattctaggtggcaaaacaaggggtatattgcgggatttcaaattatcaagatacaacttcaggatgcaggcattatcaggcaacattccgggtgtgcggaaggccagttggtagagactatggagatgtgtgactggatgtaagataggtacgaggcgcatactacattgctcttcagctagcaattgtaccattaccgatacgaatacacttgtacgatcacatatcatgcagcagaaggacgcttttgagccgcttgccatgtgcatgtgataggccgctgagcaaagtcattactaacacgcggggttgtaatttcattaaatgtcaacagcaagatcctagagtagagtgatccgac

SEQ ID NO: 20157 - DNA, 348 bp, Muscodor strobelii
  misc_feature: SGI cDNA ID NO. 566796
  misc_feature: Encodes the peptide sequence at SEQ ID NO 20158
atgtctggaaactccaaggtcggcaccagtggcgtctatgcggctgatgaccagcgcacttacaagtctggcgaggaacccaaccagcccgtcagattcgaggagggcaaggagcactctcacttggccaacgactccaaggatgagcgatccattgccaatcgtctcgccaatgaggagcgtaaggagaaggagggcgaccaggacacacctgaggtcgctgccttgaagcaggaccccactctacctgccaagctccacggcaacgaaccctccagaggcgcgaagatagatgctgacatccaggccgaggaggaggagtacctcaaacgcaagggcaaggcctaa

SEQ ID NO: 20158 - protein, 115 aa, Muscodor strobelii
  misc_feature: SGI Peptide ID NO. 566796
  misc_feature (1)..(115): NCBI GI: 256733604 Blast Desc: NECHADRAFT_35755 [Nectria haematococca mpVI 77-13-4]
  misc_feature (1)..(114): NCBI GI: 171683865 Blast Desc: protein product [Podospora anserina] gi|170941893|emb|CAP67545.1| protein product [Podospora anserina]
  misc_feature (1)..(115): NCBI GI: 46128369 Blast Desc: FG08562.1 [Gibberella zeae PH-1]
  misc_feature (5)..(113): NCBI GI: 116193125 Blast Desc: CHGG_06280 [Chaetomium globosum CBS 148.51] gi|88182193|gb|EAQ89661.1| CHGG_06280 [Chaetomium globosum CBS 148.51]
  misc_feature (2)..(112): NCBI GI: 242818981 Blast Desc: conserved [Talaromyces stipitatus ATCC 10500] gi|218713686|gb|EED13110.1| conserved [Talaromyces stipitatus ATCC 10500]
  misc_feature (2)..(112): NCBI GI: 212530348 Blast Desc: conserved [Penicillium marneffei ATCC 18224] gi|210074729|gb|EEA28816.1| conserved [Penicillium marneffei ATCC 18224]
  misc_feature (1)..(113): NCBI GI: 189194237 Blast Desc: conserved [Pyrenophora tritici-repentis Pt-1C-BFP] gi|187979021|gb|EDU45647.1| conserved [Pyrenophora tritici-repentis Pt-1C-BFP]
  misc_feature (1)..(113): NCBI GI: 115399042 Blast Desc: [Aspergillus terreus NIH2624] gi|114191993|gb|EAU33693.1| [Aspergillus terreus NIH2624]
  misc_feature (4)..(113): NCBI GI: 85116143 Blast Desc: NCU02596 [Neurospora crassa OR74A] gi|28926799|gb|EAA35763.1| conserved [Neurospora crassa OR74A]
  misc_feature (32)..(115): NCBI GI: 154309081 Blast Desc: BC1G_07435 [Botryotinia fuckeliana B05.10] gi|150852478|gb|EDN27670.1| BC1G_07435 [Botryotinia fuckeliana B05.10]
MSGNSKVGTSGVYAADDQRTYKSGEEPNQPVRFEEGKEHSHLANDSKDERSIANRLANEERKEKEGDQDTPEVAALKQDPTLPAKLHGNEPSRGAKIDADIQAEEEEYLKRKGKA

SEQ ID NO: 20159 - DNA, 1192 bp, Muscodor strobelii
  misc_feature: SGI EST ID NO. CUFF.47571.2
  misc_feature: Variant of the nucleotide sequence at SEQ ID NO 20157
cgtaaatcggatagagcaatcagtgtaacgactcagattttgcatgcaacaaaggtctgtttcccactctgtcagagccgtgccactatcagtgtggcccggtgttcctggcccgttggtaagccccggaatttagcgagctatggtgggttctagtagcaaacactgttggtgatgacgtaggagcgcattcctctgacagaggggcatcatgatgcaaagttcggatgaatataaagattccgctgcagtgtctcacctgcgaatgtttcttccttcattaatcaatctggcgaaaaacacttaacacccctccaactttccaaacattaacatcgtcctcacaaactccttcaccatttccaacaccgcacacacaatcaaaatgtctggaaactccaaggtcggcaccagtggcgtctatgcggctgatgaccagcgcacttacaagtctggcgaggaacccaaccagcccgtcagattcgaggagggcaaggagcactctcacttggccaacgactccaaggatgagcgatccattgccaatcgtctcgccaatgaggagcgtaaggagaaggagggcgaccaggacacacctgaggtcgctgccttgaagcaggaccccactctacctgccaagctccacggcaacgaaccctccagaggcgcgaagatagatgctgacatccaggccgaggaggaggagtacctcaaacgcaagggcaaggcctaaacggtctatcgtttaacatgtatcattgagatggcgttcatgggatatgagcattaggggacttggcgttccttctcggtagcttcaacgaattgatgacactatgagaacagcatattgacccgtgttgtcatgcgcaggtggtcccagattattcaagtgagctattgaaatgttgtgtaatcacggcgttaccggtgctagatgactcgaaatcgtttgacacttcaaagtgacggggaaagtattcctagcttttgctagagattgacacatggtacgactacactagatttaaaaacaaacgacttaaatgcggacaacgattgactactagtgagcagaatgaattagaataaaacatgaaaaagaacgcaagactcaatgtcgtatgatgccacttcctaacattcatgtagaccctcctacccgacgacgttctccaccacttgatcgttc

SEQ ID NO: 20160 - DNA, 525 bp, Muscodor strobelii
  misc_feature: SGI cDNA ID NO. 566797
  misc_feature: Encodes the peptide sequence at SEQ ID NO 20161
atgttagctgatctaacaatggctcatacgtataaaccgagtcacaaggttgtagaaatccaactcgacaagaatctcatcgaaggactagacaagaccacccaggaagatttcgtgcagaaacttaattcgaagagaatcagtacagcccagattgaagctgcgatcgcggccttagaaacgcaccaagaggaggttcagcatcaagtcgaggaaactatcggatacatagaggatctacatgacacattgcagagagtcctgattgtcgacacagttcagtacttctggaacaggcatcaaacgaaggtcggagctgtgaaactgataatagaaaacggattcgccaaaatacaagccgacgtggagaaactcctgaatcactaccttgttgttggcgaaaatacttcgaatgccgaagaatttaggaacgaggcattcgccaacatttgtgagcaaattatgcttgagaaactgcggcttgcactagtagagcttcgcgacgagagactgaatcaagagtaa

SEQ ID NO: 20161 - protein, 174 aa, Muscodor strobelii
  misc_feature: SGI Peptide ID NO. 566797
MLADLTMAHTYKPSHKVVEIQLDKNLIEGLDKTTQEDFVQKLNSKRISTAQIEAAIAALETHQEEVQHQVEETIGYIEDLHDTLQRVLIVDTVQYFWNRHQTKVGAVKLIIENGFAKIQADVEKLLNHYLVVGENTSNAEEFRNEAFANICEQIMLEKLRLALVELRDERLNQE

SEQ ID NO: 20162 - DNA, 1452 bp, Muscodor strobelii
  misc_feature: SGI cDNA ID NO. 566798
  misc_feature: Encodes the peptide sequence at SEQ ID NO 20163
atgtctaccagctccccgtttgactgcctccgtacagctggtatccaccccacccagattctcatgcccggcgatgcgcagttcattgcgcgtcagtcttcgtattcgtctcgaaccgcccagtcgttggaaccggcatgtatcgtgcaaccaaggtctgccgaggaggttgcgacggtcgtgcgagcccttgtagagtctcgccagtcgtttgccgtccgaagcggtggacatatggcatggcccggtgcaagtaacatcggtgccgatggtatgaccgtcgacctgggccgcatggattgggttcgagtgctcaaagatagagaaacatccggaaaggtagtggatattgggcccggcgcccgctggggaagggtgtactccgagttggaacttcacgggctgcacgtcgctggtggtcgcgagggcaatgtcggtgtcgcgggcctggtgctcgggggcggcatggccttcttcaccggccgctacgggcttgcctgcgacaacgtcgtcgagttcgaggttgtgcttagtgatgggcgacttgctcatgcccgctcccagggcgactacagcgatctattccgcgcactgaaaggtggcggcagtaactttggtattgtcaccaacttcaagatgcgtacgatacctgcgcgtcaggcatgggccgggatgacagtccacccaaagtctgctgctaaccgggccatttttgcattaaatgagtttgtgactcgtgctgcggaggatgttgatagcaacttactctgtttctttacatacatggatattgtcattcttggagcactgattcaggtggccggcgtcgaagaggcacctgcctacaaagaatggctgtccatgccgaccgtctcctccacgtgcaagaaaatgtccatatcgcaacttgcaatggattacagtcaagcgacaggctactacaatacttggttcacggcaaccttcaagaatgacagtcggattgtggccaaggccgtcgaactacatgagaagctagtagaaaaactgaaaatcctcattcccgatggcgatttcatcacgcagtgcctttttcaaccgtttcccaagctcttcggccagttgtcagctagagcgggcggcaatatgacaggcattcaagagcagcagcaggatggtctgctttggctcgctgtcgcacaggtgcgtactgctgagcatgatgaagaggcttatgttcttgtacgagactgggtacatgcggtcagacagtacgccgaggcactagatgacggtcttctagactggatatatctgaactatgccgacaagacacagaatccacttgcgagctacggagcaaccaatgttgagttcatgaggaatgtagcggccaagtatgattccgacaaggtctttcagaagttttgccaaagtggtttcaagatcagtaaggtcaaactacccatttga

SEQ ID NO: 20163 - protein, 483 aa, Muscodor strobelii
  misc_feature: SGI Peptide ID NO. 566798
  misc_feature (45)..(186): Pfam Id: PF01565 Pfam Desc: FAD binding domain
  misc_feature (10)..(482): NCBI GI: 256732288 Blast Desc: NECHADRAFT_41792 [Nectria haematococca mpVI 77-13-4]
  misc_feature (1)..(480): NCBI GI: 46110302 Blast Desc: FG02033.1 [Gibberella zeae PH-1]
  misc_feature (9)..(479): NCBI GI: 171679329 Blast Desc: protein product [Podospora anserina] gi|170939290|emb|CAP64518.1| protein product [Podospora anserina]
  misc_feature (1)..(480): NCBI GI: 171678393 Blast Desc: protein product [Podospora anserina] gi|170937266|emb|CAP61923.1| protein product [Podospora anserina]
  misc_feature (10)..(478): NCBI GI: 169609567 Blast Desc: SNOG_07875 [Phaeosphaeria nodorum SN15] gi|111063031|gb|EAT84151.1| SNOG_07875 [Phaeosphaeria nodorum SN15]
  misc_feature (10)..(479): NCBI GI: 169612738 Blast Desc: SNOG_09495 [Phaeosphaeria nodorum SN15] gi|111061640|gb|EAT82760.1| SNOG_09495 [Phaeosphaeria nodorum SN15]
  misc_feature (1)..(476): NCBI GI: 256726365 Blast Desc: NECHADRAFT_39434 [Nectria haematococca mpVI 77-13-4]
  misc_feature (10)..(478): NCBI GI: 255945439 Blast Desc: Pc20g09930 [Penicillium chrysogenum Wisconsin 54-1255] gi|211588222|emb|CAP86322.1| Pc20g09930 [Penicillium chrysogenum Wisconsin 54-1255]
  misc_feature (6)..(478): NCBI GI: 189198724 Blast Desc: conserved [Pyrenophora tritici-repentis Pt-1C-BFP] gi|187982798|gb|EDU48286.1| conserved [Pyrenophora tritici-repentis Pt-1C-BFP]
  misc_feature (10)..(479): NCBI GI: 46118786 Blast Desc: FG04732.1 [Gibberella zeae PH-1]
MSTSSPFDCLRTAGIHPTQILMPGDAQFIARQSSYSSRTAQSLEPACIVQPRSAEEVATVVRALVESRQSFAVRSGGHMAWPGASNIGADGMTVDLGRMDWVRVLKDRETSGKVVDIGPGARWGRVYSELELHGLHVAGGREGNVGVAGLVLGGGMAFFTGRYGLACDNVVEFEVVLSDGRLAHARSQGDYSDLFRALKGGGSNFGIVTNFKMRTIPARQAWAGMTVHPKSAANRAIFALNEFVTRAAEDVDSNLLCFFTYMDIVILGALIQVAGVEEAPAYKEWLSMPTVSSTCKKMSISQLAMDYSQATGYYNTWFTATFKNDSRIVAKAVELHEKLVEKLKILIPDGDFITQCLFQPFPKLFGQLSARAGGNMTGIQEQQQDGLLWLAVAQVRTAEHDEEAYVLVRDWVHAVRQYAEALDDGLLDWIYLNYADKTQNPLASYGATNVEFMRNVAAKYDSDKVFQKFCQSGFKISKVKLPI

SEQ ID NO: 20164 - DNA, 428 bp, Muscodor strobelii
  misc_feature: SGI EST ID NO. CUFF.47133.0
  misc_feature: Variant of the nucleotide sequence at SEQ ID NO 20162
caatacttggttcacggcaaccttcaagaatgacagtcggattgtggccaaggccgtcgaactacatgagaagctagtagaaaaactgaaaatcctcattcccgatggcgatttcatcacgcagtgcctttttcaaccgtttcccaagctcttcggccagttgtcagctagagcgggcggcaatatgacaggcattcaagagcagcagcaggatggtctgctttggctcgctgtcgcacaggtgcgtactgctgagcatgatgaagaggcttatgttcttgtacgagactgggtacatgcggtcagacagtacgccgaggcactagatgacggtcttctagactggatatatctgaactatgccgacaagacacagaatccacttgcgagctacggagcaaccaatgttgagttcatgaggaatgtag

SEQ ID NO: 20165 - DNA, 744 bp, Muscodor strobelii
  misc_feature: SGI cDNA ID NO. 566799
  misc_feature: Encodes the peptide sequence at SEQ ID NO 20166
atggcacccgtgaaggtgttagtcaccggcgcaaaccgtggcttaggccaagcaatcgtaaagcgccttcttgccaagcctgaaacgactgtcatcgcagcggtacgcaatccgtcgcacccaacagcccaagctctcatcgaactgccaaaggcgcagggatcgagcctcatcatagtcaagtatgatgcgggagtttggggagatgcctttgagatagtcaaagaaattggtaaacagggagtagaccacctcgatatcgttcttgcgaacgccggtatcgccaagcagtatcctttagcaaaagatgtcaagcccgaggacatccgtgagcatgtcgaagtcaacgtaatatccggcattgcattgtaccaagccacgcgggatcttttacagaaggctcccagcggcaaacccgtctacacttttatgggctctggagcaggttcgctaggacgacagccagcggtgcctagtgccctatacggagcgtccaagtctatggtaaactggtacgggaagcgcattaacgccgaggacgagtggctgaacgttttcgtcgccgacccgggctgggcgcagaccgacatgggcaacagtgcggccaaaggctggggtctcgagtcggcgcccgactctgttgacaaggtctgcgatggtgtcattgagctgctgatgacgggaattaaggagaaattcggcggcagagttgtgcggtgggacggtgaagttcagccttggtga

SEQ ID NO: 20166 - protein, 247 aa, Muscodor strobelii
  misc_feature: SGI Peptide ID NO. 566799
  misc_feature (4)..(181): Pfam Id: PF00106 Pfam Desc: short chain dehydrogenase
  misc_feature (4)..(137): Pfam Id: PF00106 Pfam Desc: short chain dehydrogenase
  misc_feature (1)..(247): NCBI GI: 121708887 Blast Desc: NADPH-dependent 1-acyl dihydroxyacetone phosphate reductase, [Aspergillus clavatus NRRL 1] gi|119400427|gb|EAW10853.1| NADPH-dependent 1-acyl phosphate NRRL
  misc_feature (1)..(247): NCBI GI: 116198605 Blast Desc: CHGG_07458 [Chaetomium globosum CBS 148.51] gi|88178737|gb|EAQ86205.1| CHGG_07458 [Chaetomium globosum CBS 148.51]
  misc_feature (22)..(245): NCBI GI: 116194187 Blast Desc: CHGG_06811 [Chaetomium globosum CBS 148.51] gi|88182724|gb|EAQ90192.1| CHGG_06811 [Chaetomium globosum CBS 148.51]
  misc_feature (3)..(247): NCBI GI: 171693165 Blast Desc: protein product [Podospora anserina] gi|170946531|emb|CAP73332.1| protein product [Podospora anserina]
  misc_feature (1)..(247): NCBI GI: 39969327 Blast Desc: MGG_10274 [Magnaporthe grisea 70-15] gi|149211159|ref|XP_001522954.1| MGCH7_ch7g1041 [Magnaporthe grisea 70-15] gi|86196996|gb|EAQ71634.1| MGCH7_ch7g1041 grisea
  misc_feature (1)..(247): NCBI GI: 154311969 Blast Desc: BC1G_06018 [Botryotinia fuckeliana B05.10] gi|150850668|gb|EDN25861.1| BC1G_06018 [Botryotinia fuckeliana B05.10]
  misc_feature (1)..(247): NCBI GI: 154315483 Blast Desc: BC1G_04314 [Botryotinia fuckeliana B05.10] gi|150847254|gb|EDN22447.1| BC1G_04314 [Botryotinia fuckeliana B05.10]
  misc_feature (1)..(247): NCBI GI: 116205818 Blast Desc: CHGG_02202 [Chaetomium globosum CBS 148.51] gi|88182799|gb|EAQ90267.1| CHGG_02202 [Chaetomium globosum CBS 148.51]
  misc_feature (1)..(247): NCBI GI: 255934834 Blast Desc: Pc12g16460 [Penicillium chrysogenum Wisconsin 54-1255] gi|211583063|emb|CAP81273.1| Pc12g16460 [Penicillium chrysogenum Wisconsin 54-1255]
  misc_feature (2)..(247): NCBI GI: 261357797 Blast Desc: aflatoxin biosynthesis ketoreductase nor-1 [Verticillium albo-atrum VaMs.102]
  misc_feature (7)..(197): SWISSPROT Homolog: EC 1.1.1.100 3-oxoacyl-[acyl-carrier-protein] reductase
MAPVKVLVTGANRGLGQAIVKRLLAKPETTVIAAVRNPSHPTAQALIELPKAQGSSLIIVKYDAGVWGDAFEIVKEIGKQGVDHLDIVLANAGIAKQYPLAKDVKPEDIREHVEVNVISGIALYQATRDLLQKAPSGKPVYTFMGSGAGSLGRQPAVPSALYGASKSMVNWYGKRINAEDEWLNVFVADPGWAQTDMGNSAAKGWGLESAPDSVDKVCDGVIELLMTGIKEKFGGRVVRWDGEVQPW

SEQ ID NO: 20167 - DNA, 1749 bp, Muscodor strobelii
  misc_feature: SGI cDNA ID NO. 566800
  misc_feature: Encodes the peptide sequence at SEQ ID NO 20168
atgaactggcttgctcctttggcccttttgcccgccatatcggctgctgctccctggctgcctgatactgggcttataccccgatatgactcgatatgccgtttccttcctgaggactctgggtggccgagcgaaagtaaatgggcggaattgaatgacaccgtggggggcatgctgatccgaggtgtgcccattggccggccgtgctatggatcttcacctgatgttgcggcctgtgctgatgtgcaggagaactgggaagaccttgagccctttctagatgatcctgtcaacgtcatttccgcttatttcgagaacgttacgtgcagcccgtttaatgggcccttgtccacgaacgcggccgaacgcaatgcgacatgttccctgggcggacttgcttatttcgcaatcaatgtcaccggggctataacggtaacgtctgcgatcaagttcgccaaggagaacaatatacgcttaatcatcaagaacacgggtcacgacgatcttggtaggtccactggtcagggctccttagcgctttggacacacaacttgaagagctctagcttcttccagtacgacagctccacttataagggtcctgctgctcgaataggtgcaggtgtgcaagtggaagagctttacaaggctgcttcagctgccggctaccgggctacaggaggcacatgtgcgagcgttggtgtgtccggtggctggatccagtcggcggggcatggaccactcgcttcggcgtacggccttggttctgaccagaccctggagtttgaggtagtcacaaccgatgggcaacatctcaacgcatcgcgtgccaagaacgctgatctctattgggccctgagcggtggcggtccgggcaacttcggcgttgtgctttcagtcacactcaaggtgtacgaggatggtccagttgccggctccgtgctttcattttcggagagcgaccctgagaagttctgggctgctgttgaagcctgggagagacatctgctggtgctcgacgacatcccaggctttcagaccctcgtagctctgagcgagggagcgttcgcgctcaactatgcaacgctgccagaggcgagcacgacagaaatgacggcagcacttgcgcccttttacgaggaactcgacaatctcgggattaaggtcagttccaacgaaacccttgtccacgacgggtacctggagcactttgaatactacgacagcggcagtttcaatagtcgcaacgtcactgtcgggaaccgcatcattcctcgtgacattgttacgaacaatacgcggctcagcagtctcaccgatgtgtacaaacagattctagctgtgccgaacgcggcattgtacatcatcgctcaaaatgttactcacgctcgcgttcgcaacaaggccggcgacaacgccgtgctgccagcctggcggaactcccttttctttgtcaacctcgctctcatgggaagtccacaagagtcgttcgccggcctcgctgctgatcttgccgtggtcaatgactggcagctggcgctgagaaacatcacgcctggcagcggcagttacatgaatgaggcgacgtatgactacccttattggaaagaggattattacggtcaaacctacgagaaactggtctccattaagaataagtacgaccccgaccatgtgctgtggagttggccttcggccggcggcgaagcactcgagctgaagggcgacggccacctgtgcgaagcttaa

SEQ ID NO: 20168 - protein, 582 aa, Muscodor strobelii
  misc_feature: SGI Peptide ID NO. 566800
  misc_feature (523)..(567): Pfam Id: PF08031 Pfam Desc: Berberine and berberine like
  misc_feature (133)..(275): Pfam Id: PF01565 Pfam Desc: FAD binding domain
  misc_feature (145)..(275): Pfam Id: PF01565 Pfam Desc: FAD binding domain
  misc_feature (5)..(581): NCBI GI: 154315485 Blast Desc: BC1G_04315 [Botryotinia fuckeliana B05.10] gi|150847255|gb|EDN22448.1| BC1G_04315 [Botryotinia fuckeliana B05.10]
  misc_feature (31)..(581): NCBI GI: 156060147 Blast Desc: SS1G_02212 [Sclerotinia sclerotiorum 1980] gi|154699620|gb|EDN99358.1| SS1G_02212 [Sclerotinia sclerotiorum 1980]
  misc_feature (7)..(582): NCBI GI: 67541979 Blast Desc: AN7153.2 [Aspergillus nidulans FGSC A4] gi|40742215|gb|EAA61405.1| AN7153.2 [Aspergillus nidulans FGSC A4] gi|259483516|tpe|CBF78970.1| TPA: conserved [Aspergillus FGSC
  misc_feature (33)..(581): NCBI GI: 154293996 Blast Desc: BC1G_14177 [Botryotinia fuckeliana B05.10] gi|150845149|gb|EDN20342.1| BC1G_14177 [Botryotinia fuckeliana B05.10]
  misc_feature (4)..(582): NCBI GI: 67541835 Blast Desc: AN7081.2 [Aspergillus nidulans FGSC A4] gi|40742020|gb|EAA61210.1| AN7081.2 [Aspergillus nidulans FGSC A4] gi|259483600|tpe|CBF79122.1| TPA: conserved [Aspergillus FGSC
  misc_feature (30)..(582): NCBI GI: 169780938 Blast Desc: [Aspergillus oryzae RIB40] gi|83773673|dbj|BAE63800.1| protein product [Aspergillus oryzae]
  misc_feature (100)..(581): NCBI GI: 156050269 Blast Desc: SS1G_07721 [Sclerotinia sclerotiorum 1980] gi|154692122|gb|EDN91860.1| SS1G_07721 [Sclerotinia sclerotiorum 1980]
  misc_feature (33)..(582): NCBI GI: 67524381 Blast Desc: AN2648.2 [Aspergillus nidulans FGSC A4] gi|40743866|gb|EAA63050.1| AN2648.2 [Aspergillus nidulans FGSC A4] gi|259486442|tpe|CBF84282.1| TPA: isoamyl alcohol oxidase,
  misc_feature (31)..(582): NCBI GI: 85102097 Blast Desc: NCU04108 [Neurospora crassa OR74A] gi|21622328|emb|CAD36969.1| isoamyl alcohol oxidase [Neurospora crassa] gi|28922807|gb|EAA32028.1| NCU04108 [Neurospora crassa
  misc_feature (31)..(581): NCBI GI: 145243717 Blast Desc: An11g03740 [Aspergillus niger] gi|134079053|emb|CAK48362.1| protein product [Aspergillus niger]
MNWLAPLALLPAISAAAPWLPDTGLIPRYDSICRFLPEDSGWPSESKWAELNDTVGGMLIRGVPIGRPCYGSSPDVAACADVQENWEDLEPFLDDPVNVISAYFENVTCSPFNGPLSTNAAERNATCSLGGLAYFAINVTGAITVTSAIKFAKENNIRLIIKNTGHDDLGRSTGQGSLALWTHNLKSSSFFQYDSSTYKGPAARIGAGVQVEELYKAASAAGYRATGGTCASVGVSGGWIQSAGHGPLASAYGLGSDQTLEFEVVTTDGQHLNASRAKNADLYWALSGGGPGNFGVVLSVTLKVYEDGPVAGSVLSFSESDPEKFWAAVEAWERHLLVLDDIPGFQTLVALSEGAFALNYATLPEASTTEMTAALAPFYEELDNLGIKVSSNETLVHDGYLEHFEYYDSGSFNSRNVTVGNRIIPRDIVTNNTRLSSLTDVYKQILAVPNAALYIIAQNVTHARVRNKAGDNAVLPAWRNSLFFVNLALMGSPQESFAGLAADLAVVNDWQLALRNITPGSGSYMNEATYDYPYWKEDYYGQTYEKLVSIKNKYDPDHVLWSWPSAGGEALELKGDGHLCEA

SEQ ID NO: 20169 - DNA, 945 bp, Muscodor strobelii
  misc_feature: SGI cDNA ID NO. 566801
  misc_feature: Encodes the peptide sequence at SEQ ID NO 20170
atgtctgtaattccgagcgagtcacttgagcgccggcgtgcccagaaccgcatagcccagcgaagattccgtgaaaaaaaacagagtagtcgtagagcagaggagacaatccagcccgatatgctgtctttgctagaatgcttcgacgaggtcaggtcgtctatacatgacacatccacaccggcggattacgtgaccagcacaacatctaccggtagctgtagcccaccttcgcccaatagccggactttgatcgagagcctcacttgcaaggacgagagttttttcgagaagacggccgcgacgtccgtcaatatcctgggtcctaacgtcgtgacgaaggttccaggaagccacctgggtgacttttctgcggccagggagaacagtttcgaaaccatgtgccagggctctgttcatttgactggccagccgagtccgtgtcatagctcgactctgtcgggatcctcccatgagtctcttcttggccacgatggtctgcatcagggtagcggttggctcaatgccctgcatatggcggcgcggcgtggccatggagggattatgcgtgttctgctacaacagaatccagattgcaacaaacgcgatagcgatggcctgacgcctctaatgcacgcactgcagggcggccatgaggatgtcgtcactctcctcctccagcacagcgctcggctggccgaagtagacaaccatcgccgttcagcgctgcactgggcagtacatagtcgtcaagagagattgattcgtctactactacgacaggcaacgaacagtttaggatcatggcagtatgtggatgtaaatggacaagacgacaccggttacacacccctgcacatggcaatcgagttgggattcgaagccggagttgtcgcattgatggattctggtgcggacctctatgctagagccgaaaagcggtga

SEQ ID NO: 20170 - protein, 314 aa, Muscodor strobelii
  misc_feature: SGI Peptide ID NO. 566801
  misc_feature (205)..(237): Pfam Id: PF00023 Pfam Desc: Ankyrin repeat
  misc_feature (172)..(204): Pfam Id: PF00023 Pfam Desc: Ankyrin repeat
  misc_feature (176)..(204): Pfam Id: PF00023 Pfam Desc: Ankyrin repeat
  misc_feature (280)..(312): Pfam Id: PF00023 Pfam Desc: Ankyrin repeat
  misc_feature (169)..(313): NCBI GI: 154315473 Blast Desc: BC1G_04309 [Botryotinia fuckeliana B05.10] gi|150847249|gb|EDN22442.1| BC1G_04309 [Botryotinia fuckeliana B05.10]
  misc_feature (123)..(307): NCBI GI: 115433911 Blast Desc: conserved [Aspergillus terreus NIH2624] gi|114189944|gb|EAU31644.1| conserved [Aspergillus terreus NIH2624]
  misc_feature (177)..(310): NCBI GI: 229582572 Blast Desc: Ankyrin [Sulfolobus islandicus Y.N.15.51] gi|228013288|gb|ACP49049.1| Ankyrin [Sulfolobus islandicus Y.N.15.51]
  misc_feature (150)..(314): NCBI GI: 270008619 Blast Desc: TcasGA2_TC015164 [Tribolium castaneum]
  misc_feature (150)..(314): NCBI GI: 189238284 Blast Desc: : similar to CG10011 CG10011-PA [Tribolium castaneum]
  misc_feature (180)..(313): NCBI GI: 238500305 Blast Desc: ankyrin repeat-containing protein, [Aspergillus flavus NRRL3357] gi|220693140|gb|EED49486.1| ankyrin repeat-containing protein, [Aspergillus flavus NRRL3357]
  misc_feature (171)..(305): NCBI GI: 115643117 Blast Desc: : similar to ankyrin 2,3/unc44 [Strongylocentrotus purpuratus] gi|115663200|ref|XP_001183051.1| : similar to ankyrin 2,3/unc44 [Strongylocentrotus purpuratus]
  misc_feature (177)..(306): NCBI GI: 167534507 Blast Desc: [Monosiga brevicollis MX1] gi|163772609|gb|EDQ86259.1| [Monosiga brevicollis MX1]
  misc_feature (167)..(306): NCBI GI: 145241147 Blast Desc: An08g11190 [Aspergillus niger] gi|134077749|emb|CAK45790.1| protein product [Aspergillus niger]
  misc_feature (177)..(312): NCBI GI: 221135813 Blast Desc: : similar to ankyrin 2,3/unc44, partial [Hydra magnipapillata]
MSVIPSESLERRRAQNRIAQRRFREKKQSSRRAEETIQPDMLSLLECFDEVRSSIHDTSTPADYVTSTTSTGSCSPPSPNSRTLIESLTCKDESFFEKTAATSVNILGPNVVTKVPGSHLGDFSAARENSFETMCQGSVHLTGQPSPCHSSTLSGSSHESLLGHDGLHQGSGWLNALHMAARRGHGGIMRVLLQQNPDCNKRDSDGLTPLMHALQGGHEDVVTLLLQHSARLAEVDNHRRSALHWAVHSRQERLIRLLLRQATNSLGSWQYVDVNGQDDTGYTPLHMAIELGFEAGVVALMDSGADLYARAEKR

SEQ ID NO: 20171 - DNA, 863 bp, Muscodor strobelii
  misc_feature: SGI EST ID NO. CUFF.47166.0
  misc_feature: Variant of the nucleotide sequence at SEQ ID NO 20169
ggattatgcgtgttctgctacaacagaatccagattgcaacaaacgcgatagcgatggcctgacgcctctaatgcacgcactgcagggcggccatgaggatgtcgtcactctcctcctccagcacagcgctcggctggccgaagtagacaaccatcgccgttcagcgctgcactgggcagtacatagtcgtcaagagagattgattcgtctactactacgacaggcaacgaacagtttaggatcatggcagtatgtggatgtaaatggacaagacgacaccggttacacacccctgcacatggcaatcgagttgggattcgaagccggagttgtcgcattgatggattctggtgcggacctctatgctagagccgaaaagcggtgagactaggtattccatacatgtcttccaactcttgcgtgcccagcatctaaaataggagttactgggttacaggagatccaatggagatagggtgagggtagccctgctacagttcattgaatcgccgatcaagcagcccaagacacccatgtacctagccctacgaccggggtgcatgtgcgatatattgtatagagactggtagaattccagaatccttcctactcggttgaacaaagattccatcacgccattacatcagcagtcttcgcaacaagcacatgtttccgcggaataagtacgttgtctgcctgtcagcacgctcggtctggaaaaaatgatgtgataagctgcaaggttcaacttcgggcgtcacggctagaaatacagtgacgacacggtcatcacaagtcttctgctgatgctaggcgcatcaagcataatctaggactgatgacatgctttatacaattcata

SEQ ID NO: 20172 - DNA, 1647 bp, Muscodor strobelii
  misc_feature: SGI cDNA ID NO. 566802
  misc_feature: Encodes the peptide sequence at SEQ ID NO 20173
atgtttgcaatgccaggctttaattggctcgggcattatcgtttatacgaaaatgttcggggcggtgtctatatcctaatcgttgtattggtcttacgagcagtttatatcgcgatataccgcttgtttctatcaccgctcgccaagattccgggacccaaactggctgcattaactcattggtatgagggttactatgaggtgtggttgggcgggcaattcttcaagcacctcgaggaactacacagagaatacggtaatgcacttgctacggtcggccctacataccacataccgatgtctagattccatagtccaattgtccggatcaacccaatcgaggtccacttcaacgacccaaatgccattgacgccgtcctaccgggcccaagcaggaagacaaaccggcatgctagcctggcaaaaaagacgggcacgcccaactcgatggtcacaacggtagaccatgagacgcaccgccagcgacgaaaccccgtggccgcatatttttccacggccagcatccgacagttggagcccgtgatgaggaatgccattacgacgttcctgcatcgactggacggtgtagcgcgggccggcccgaccccattgcaactccaccacgtgtttaaagcattcacaagtgacgtcatcacaaagtacgcgtttggtgactgcttcaactttatgaaccgcgccgactttgggaagccgtacttcaacgccaccgacttgttctttggccttaaccatgttatgatattcctgccgtggttcgccgtactgatacagaacacccccggctggtttgtcaagatactgatgcccgaattggccgagctggttgataagaaatcgtggtggattgacagggtccgcgagatccgcaactcccccaacccagcgcgtgtcaagagcaccatcttcgacggcattctgaacagtccgctcccgccggcagacaagactgatgaccgtttggcgagcgaagcacagctcgtcatcttcgcgggcgaggggaccacggcattcgccctcaccgcggccgtgtaccagctgctggcaaacccgcctgtcctcgcccggctgaaggaagagcttgcaaccgctatacctgcacaggaaacagtgccgtcatttgcacaggtatacgggctatcatatctcaatgctgtcatccaggaggttgtacgtctgcatcccggcgtcatgaaccgccaaatgcgcgtccctgccgatcagcccgtcgtttacgtagacaaggcgcgctccggaactgaatacgttgttccgcccggtttccttgtcagcgtgagcccgctgtgcatgcacatgaatgctgaagtgttcgaaaacccttatcagttcgagcctcagcgatggatcgacaatccacagttggcccgcgcgttcttggggttctcgaggggcacgaggagttgtcttggaatgaatcttgcccgacgtgaaatgtcagtgctgttggccaccctcttccgcaagtacgacctctatcgtggccaggggggccccacgcttgagctttatgatactaagcgggtgagagatatcgacgctaatcatgacatgattattcctgctcctgctaaaggaagcagaggactgcaggtcagggttagatgctga

SEQ ID NO: 20173 - protein, 548 aa, Muscodor strobelii
  misc_feature: SGI Peptide ID NO. 566802
  misc_feature (53)..(540): Pfam Id: PF00067 Pfam Desc: Cytochrome P450
  misc_feature (323)..(504): Pfam Id: PF00067 Pfam Desc: Cytochrome P450
  misc_feature (96)..(483): NCBI GI: 154315481 Blast Desc: BC1G_04313 [Botryotinia fuckeliana B05.10] gi|150847253|gb|EDN22446.1| BC1G_04313 [Botryotinia fuckeliana B05.10]
  misc_feature (21)..(547): NCBI GI: 256723227 Blast Desc: NECHADRAFT_97198 [Nectria haematococca mpVI 77-13-4]
  misc_feature (25)..(547): NCBI GI: 145234316 Blast Desc: An02g13980 [Aspergillus niger] gi|134057475|emb|CAK48829.1| protein product [Aspergillus niger]
  misc_feature (23)..(547): NCBI GI: 255938474 Blast Desc: Pc14g00120 [Penicillium chrysogenum Wisconsin 54-1255] gi|211584628|emb|CAP74153.1| Pc14g00120 [Penicillium chrysogenum Wisconsin 54-1255]
  misc_feature (22)..(547): NCBI GI: 119178512 Blast Desc: CIMG_08088 [Coccidioides immitis RS]
  misc_feature (26)..(546): NCBI GI: 121713434 Blast Desc: benzoate 4-monooxygenase cytochrome P450 [Aspergillus clavatus NRRL 1] gi|119402481|gb|EAW12902.1| benzoate 4-monooxygenase cytochrome P450 [Aspergillus clavatus NRRL 1]
  misc_feature (28)..(546): NCBI GI: 212530086 Blast Desc: benzoate 4-monooxygenase cytochrome P450, [Penicillium marneffei ATCC 18224] gi|210074598|gb|EEA28685.1| benzoate 4-monooxygenase cytochrome P450, [Penicillium marneffei ATCC
  misc_feature (25)..(546): NCBI GI: 145248191 Blast Desc: An13g02060 [Aspergillus niger] gi|134081093|emb|CAK41605.1| protein product [Aspergillus niger]
  misc_feature (22)..(547): NCBI GI: 240104883 Blast Desc: Cytochrome P450 family protein [Coccidioides posadasii C735 delta SOWgp]
  misc_feature (38)..(546): NCBI GI: 169786345 Blast Desc: [Aspergillus oryzae RIB40] gi|83776381|dbj|BAE66500.1| protein product [Aspergillus oryzae]
  misc_feature (47)..(511): SWISSPROT Homolog: EC 1.14.13.12 Benzoate 4-monooxygenase
MFAMPGFNWLGHYRLYENVRGGVYILIVVLVLRAVYIAIYRLFLSPLAKIPGPKLAALTHWYEGYYEVWLGGQFFKHLEELHREYGNALATVGPTYHIPMSRFHSPIVRINPIEVHFNDPNAIDAVLPGPSRKTNRHASLAKKTGTPNSMVTTVDHETHRQRRNPVAAYFSTASIRQLEPVMRNAITTFLHRLDGVARAGPTPLQLHHVFKAFTSDVITKYAFGDCFNFMNRADFGKPYFNATDLFFGLNHVMIFLPWFAVLIQNTPGWFVKILMPELAELVDKKSWWIDRVREIRNSPNPARVKSTIFDGILNSPLPPADKTDDRLASEAQLVIFAGEGTTAFALTAAVYQLLANPPVLARLKEELATAIPAQETVPSFAQVYGLSYLNAVIQEVVRLHPGVMNRQMRVPADQPVVYVDKARSGTEYVVPPGFLVSVSPLCMHMNAEVFENPYQFEPQRWIDNPQLARAFLGFSRGTRSCLGMNLARREMSVLLATLFRKYDLYRGQGGPTLELYDTKRVRDIDANHDMIIPAPAKGSRGLQVRVRC

SEQ ID NO: 20174 - DNA, 2461 bp, Muscodor strobelii
  misc_feature: SGI EST ID NO. CUFF.47193.0
  misc_feature: Variant of the nucleotide sequence at SEQ ID NO 20172
cgcgggccggcccgaccccattgcaactccaccacgtgtttaaagcattcacaagtgacgtcatcacaaagtacgcgtttggtgactgcttcaactttatgaaccgcgccgactttgggaagccgtacttcaacgccaccgacttgttctttggccttaaccatgttatgatattcctgccgtggttcgccgtactgatacagaacacccccggctggtttgtcaagatactgatgcccgaattggccgagctggttgataagaaatcgtggtggattgacagggtccgcgagatccgcaactcccccaacccagcgcgtgtcaagagcaccatcttcgacggcattctgaacagtccgctcccgccggcagacaagactgatgaccgtttggcgagcgaagcacagctcgtcatcttcgcgggcgaggggaccacggcattcgccctcaccgcggccgtgtaccagctgctggcaaacccgcctgtcctcgcccggctgaaggaagagcttgcaaccgctatacctgcacaggaaacagtgccgtcatttgcacaggtatacgggctatcatatctcaatgctgtcatccaggaggttgtacgtctgcatcccggcgtcatgaaccgccaaatgcgcgtccctgccgatcagcccgtcgtttacgtagacaaggcgcgctccggaactgaatacgttgttccgcccggtttccttgtcagcgtgagcccgctgtgcatgcacatgaatgctgaagtgttcgaaaacccttatcagttcgagcctcagcgatggatcgacaatccacagttggcccgcgcgttcttggggttctcgaggggcacgaggagttgtcttggaatgaatcttgcccgacgtgaaatgtcagtgctgttggccaccctcttccgcaagtacgacctctatcgtggccaggggggccccacgcttgagctttatgatactaagcgggtgagagatatcgacgctaatcatgacatgattattcctgctcctgctaaaggaagcagaggactgcaggtcagggttagatgctgatgaaccaggaataaacaaggatgtaatatgttagcgattgactctgatgctctgagctactacaggtatttatctatcaatgaaaatcgcacagtcggctattacacgattgctgcttttattccccagaagcattcatgcgcgttgcaaaccagggaaattgaagccatgcagtctacggccagtcacacattcgtaactctctgctcccctcaacgcgaagcccttctccagtagagcatgcactgacagagtcttccggatactaaggaatgcacatcatatatcatacgtgttatccgcgacacccaagcatacggttacaaagagataatgggaagactgcaaatctaggatgatgagcgcacaagataccaactgaattaggagagcttattagagaacaactctcggaagactagatttacgacgcagctcgctaagaaaatttgctctcgagagcctctttgtagaagtctgccatcgtcctgatcaactgaccggacccttcgccggatacaatggataaatgccccttgcctctagctcgatgcagcctcttgggtgtacacaatcgatcgaatgcttcctgttgctcggccgggcttgaaatatcgtcaagttccggtatgatcatcatcaccggcatgccctcaatggtctgcataaaagtcgcgggcttaaataacgcgagcttatagtaggtctgcagagtgatgcggtctcgaaatgacggatggccgcgctcaaccgccgcgcacatgaagcgatgagcttccaaacctccgggaccgccagcacctcccataccaataggattgtcgccccgtttgttaaaaggtaggagtgtcaaggggtcattgccctgaagctgcgactgtcggtcgcgaattacgtgcgcgtatgcccgctcgcgccgatctggtcgcacgaagctgagcagaggacataccatgataagggctctgggacgcctatccactgttgcggtgcaggcactcacggcagcaccaaatgacataccccacagcaagatacgttggctgtccacgtccgggaggctcgctgcgaaagtgatcacatctgtgttgattgaagaccgagcgtgagatacggcgctagtatgagaaaagcggccgtgactcaccagaaacgtcctcggccatctggtacgggttgatctggttccgtggttgtccgtcgctggctccgatgctccgtgcgtcgtataagactacgttgtagccaagcgcctgaaagttctcggccacttccggcaacgccatctccttaacgcagttgaactatctaagatcagtgggctgatagttgagcaaacatcacagagcgaggagtccttacaccgtgagtcatgacaatagctggagctggacctacagccc

SEQ ID NO: 20175 - DNA, 915 bp, Muscodor strobelii
  misc_feature: SGI cDNA ID NO. 566803
  misc_feature: Encodes the peptide sequence at SEQ ID NO 20176
atgatagttccgagataccagccgatcgaaattaagaccatagatggcaccactcttcgtggatgccactatggggctgtaggtccagctccagctattgtcatgactcacggtttcaactgcgttaaggagatggcgttgccggaagtggccgagaactttcaggcgcttggctacaacgtagtcttatacgacgcacggagcatcggagccagcgacggacaaccacggaaccagatcaacccgtaccagatggccgaggacgtttctgatgtgatcactttcgcagcgagcctcccggacgtggacagccaacgtatcttgctgtggggtatgtcatttggtgctgccgtgagtgcctgcaccgcaacagtggataggcgtcccagagcccttatcatggtatgtcctctgctcagcttcgtgcgaccagatcggcgcgagcgggcatacgcgcacgtaattcgcgaccgacagtcgcagcttcagggcaatgaccccttgacactcctaccttttaacaaacggggcgacaatcctattggtatgggaggtgctggcggtcccggaggtttggaagctcatcgcttcatgtgcgcggcggttgagcgcggccatccgtcatttcgagaccgcatcactctgcagacctactataagctcgcgttatttaagcccgcgacttttatgcagaccattgagggcatgccggtgatgatgatcataccggaacttgacgatatttcaagcccggccgagcaacaggaagcattcgatcgattgtgtacacccaagaggctgcatcgagctagaggcaaggggcatttatccattgtatccggcgaagggtccggtcagttgatcaggacgatggcagacttctacaaagaggctctcgagagcaaattttcttag

SEQ ID NO: 20176 - protein, 304 aa, Muscodor strobelii
  misc_feature: SGI Peptide ID NO. 566803
  misc_feature (5)..(303): NCBI GI: 169625383 Blast Desc: SNOG_15964 [Phaeosphaeria nodorum SN15] gi|160705643|gb|EAT76543.2| SNOG_15964 [Phaeosphaeria nodorum SN15]
  misc_feature (35)..(300): NCBI GI: 154315479 Blast Desc: BC1G_04312 [Botryotinia fuckeliana B05.10] gi|150847252|gb|EDN22445.1| BC1G_04312 [Botryotinia fuckeliana B05.10]
  misc_feature (9)..(302): NCBI GI: 156060143 Blast Desc: SS1G_02210 [Sclerotinia sclerotiorum 1980] gi|154699618|gb|EDN99356.1| SS1G_02210 [Sclerotinia sclerotiorum 1980]
  misc_feature (7)..(300): NCBI GI: 70983277 Blast Desc: DltD N-terminal domain protein [Aspergillus fumigatus Af293] gi|66844791|gb|EAL85128.1| DltD N-terminal domain protein [Aspergillus fumigatus Af293] gi|159124052|gb|EDP49171.1| DltD
  misc_feature (7)..(300): NCBI GI: 119483532 Blast Desc: NFIA_093920 [Neosartorya fischeri NRRL 181] gi|119409825|gb|EAW19772.1| conserved [Neosartorya fischeri NRRL 181]
  misc_feature (3)..(302): NCBI GI: 119497555 Blast Desc: NFIA_023500 [Neosartorya fischeri NRRL 181] gi|119413698|gb|EAW23639.1| conserved [Neosartorya fischeri NRRL 181]
  misc_feature (45)..(302): NCBI GI: 67541839 Blast Desc: AN7083.2 [Aspergillus nidulans FGSC A4] gi|40742022|gb|EAA61212.1| AN7083.2 [Aspergillus nidulans FGSC A4] gi|259483597|tpe|CBF79117.1| TPA: DltD N-terminal domain FGSC
  misc_feature (3)..(293): NCBI GI: 115396516 Blast Desc: [Aspergillus terreus NIH2624] gi|114193466|gb|EAU35166.1| [Aspergillus terreus NIH2624]
  misc_feature (9)..(299): NCBI GI: 116194936 Blast Desc: CHGG_04066 [Chaetomium globosum CBS 148.51] gi|88179979|gb|EAQ87447.1| CHGG_04066 [Chaetomium globosum CBS 148.51]
  misc_feature (9)..(276): NCBI GI: 124268070 Blast Desc: Mpe_A2886 [Methylibium petroleiphilum PM1] gi|124260845|gb|ABM95839.1| conserved [Methylibium petroleiphilum PM1]
MIVPRYQPIEIKTIDGTTLRGCHYGAVGPAPAIVMTHGFNCVKEMALPEVAENFQALGYNVVLYDARSIGASDGQPRNQINPYQMAEDVSDVITFAASLPDVDSQRILLWGMSFGAAVSACTATVDRRPRALIMVCPLLSFVRPDRRERAYAHVIRDRQSQLQGNDPLTLLPFNKRGDNPIGMGGAGGPGGLEAHRFMCAAVERGHPSFRDRITLQTYYKLALFKPATFMQTIEGMPVMMIIPELDDISSPAEQQEAFDRLCTPKRLHRARGKGHLSIVSGEGSGQLIRTMADFYKEALESKFS

SEQ ID NO: 20177 - DNA, 1538 bp, Muscodor strobelii
  misc_feature: SGI EST ID NO. CUFF.47194.2
  misc_feature: Variant of the nucleotide sequence at SEQ ID NO 20175
gggctgtaggtccagctccagctattgtcatgactcacggtgtaaggactcctcgctctgtgatgtttgctcaactatcagcccactgatcttagatagttcaactgcgttaaggagatggcgttgccggaagtggccgagaactttcaggcgcttggctacaacgtagtcttatacgacgcacggagcatcggagccagcgacggacaaccacggaaccagatcaacccgtaccagatggccgaggacgtttctgatgtgatcactttcgcagcgagcctcccggacgtggacagccaacgtatcttgctgtggggtatgtcatttggtgctgccgtgagtgcctgcaccgcaacagtggataggcgtcccagagcccttatcatggtatgtcctctgctcagcttcgtgcgaccagatcggcgcgagcgggcatacgcgcacgtaattcgcgaccgacagtcgcagcttcagggcaatgaccccttgacactcctaccttttaacaaacggggcgacaatcctattggtatgggaggtgctggcggtcccggaggtttggaagctcatcgcttcatgtgcgcggcggttgagcgcggccatccgtcatttcgagaccgcatcactctgcagacctactataagctcgcgttatttaagcccgcgacttttatgcagaccattgagggcatgccggtgatgatgatcataccggaacttgacgatatttcaagcccggccgagcaacaggaagcattcgatcgattgtgtacacccaagaggctgcatcgagctagaggcaaggggcatttatccattgtatccggcgaagggtccggtcagttgatcaggacgatggcagacttctacaaagaggctctcgagagcaaattttcttagcgagctgcgtcgtaaatctagtcttccgagagttgttctctaataagctctcctaattcagttggtatcttgtgcgctcatcatcctagatttgcagtcttcccattatctctttgtaaccgtatgcttgggtgtcgcggataacacgtatgatatatgatgtgcattccttagtatccggaagactctgtcagtgcatgctctactggagaagggcttcgcgttgaggggagcagagagttacgaatgtgtgactggccgtagactgcatggcttcaatttccctggtttgcaacgcgcatgaatgcttctggggaataaaagcagcaatcgtgtaatagccgactgtgcgattttcattgatagataaatacctgtagtagctcagagcatcagagtcaatcgctaacatattacatccttgtttattcctggttcatcagcatctaaccctgacctgcagtcctctgcttcctttagcaggagcaggaataatcatgtcatgattagcgtcgatatctctcacccgcttagtatcataaagctcaagcgtggggcccccctggccacgatagaggtcgtacttgcggaagagggtggccaacagcactgacatttcacgtcgggcaagattcatt

SEQ ID NO: 20178 - DNA, 7437 bp, Muscodor strobelii
  misc_feature: SGI cDNA ID NO. 566804
  misc_feature: Encodes the peptide sequence at SEQ ID NO 20179
atgcatcaccaacaagagccagttgccgtcgtagggttcgcatgccgattgcccggaaacaacaactcaccagagaggctctgggagttcttagagcaaggcaacatcgcttcgagtgaggtacccaagtcgcgattctccttcgaaggccattacgatgcctcccataagccaggtactatgcgtccgcctggaggcatgttcttggaaaacgtagacttgaccaaattcgacgcacctttcttcgagatgtctggagcagatgcggtctccatggacccgaaccagagacagatgcttgaggttgtattcgaaggactagagaatgctggtttgggactagagcgtctaagcggagagcagattgcatgctttgttggttcatttgctacagactatggcgatatacagaatcgagatccactggatcgggcccctaatcatgtcattggtattggcagggccagtatggcaaaccggctgagctacttcctgaatatcaaaggacctagcgttaccctcgatacggcgtgctcgggttcaatggtaggactgcatatggctgtacgcgccatacataacggggaagcaaacgcagcgatcgttgcaacgagcaacatctacctgaaccccgaacacgttcaggatgtcggcagtctgggacaggctcattcacccactggcctatgccacacatttgacgcatcggcggatgggtatatcaaatctgaagcggtgagcagtatcatcctgaaacggcttgacgaagcaatttgcgatagggatcccatccgggctgtgatccgaggaacggcctcaactagtaatgggcgaacaaatggtctcgccagtcccagctctgaggcgcaggccgccacgattaagcaagcatataggagcgctggcattaccgacctcaataggactggctatctagaatgtcacggtaccgggaccccagctggagatccaattgaggtgagcgggatcggctcagtcttctcgccaacgcgggtcgctggaaatccgcttataattggatcaatcaaaagcaacattggacactcggagccctcagctggcagctctggtgttatcaaaaccattatgtgcttagaaaggggtctcattccgggaactccgacattcataaacccgaacccaaacattgacttcacactgaataaagtgcgcgcctcgcgaacaactttggcatggccagatgaaaaaggtcttgtccggcgagcaagtgtgaactcgttcgggtacggcggctctaacgctcatgccatcctcgagcaggcagctccagagcagaggggtcactacgtctcatcttacgttgccgaagatgacatgacattcgattacgacgagtgcgatgtgcagcataacgagactaggccacacacactcgtactctcagcgaacgacgctacatctttgcaggccggcatccaggccctttgcaagcatctgatcaaccctcgcgtgcgagtggatgtcaaagatctcgcctataccttgtcagagcggcgcacgggcttctggcatcgagcctatgctgtggtccggagtactgacggattagagcctagcgactttgtgattggaaagaaaactcctgaagtacctcgcatagggttcatctttacgggccagggagcgcagtggccacagatgggaaaggctctagtacaacactttccactagcacggtccgtattagaagagctagattgtgttttacgaagcttgccagatccgccacagtggtcactcgtctctgagcttactgaaccccgaagtacagagcacctacggcagcctgagttttctcagccgctagtcaccgcgttgcaactcgctgtcattactgtgctggagtcatggggcattcgtgcgacccgtgtgattggtcactcatcaggagagatcgcggcggcgtgcgcggctgggcttatcagtcgcgcagatgcgatcaaggccgctttctaccgcggatgggccgcagtcaagtgcaagaccaagccaaagaaagacagtgtcggcatgcttgccgtcgggctgagtgtcgagggggttcatgatttcctggagccattcatcggaaaggtgtggatcgcgtgcttcaatagtcccaagagcttgactatctctggtgaaaaagatgctctcgaatccttggcggttcacattaaagccgctggccattttgcccgattattacatgtaattatcctctccagtagaaaagccactgagtcgttgagaattcttcttactcatcctgtgatcggattccaggtcgatttagcatatcatacagagctcatgactccaatcggagagttatatgaggggctcctttccgatacagcatttcgtccagcaagcttgtcgactcaaaactgtgaattgttctccacggtgtccggatctagaatgagcgtacatgctgacgcccagtattggaaggcgaatatggtatcgcctgtcctcttcagcagcgcccttacagcaatggtatcggactcgcaagcgccagatgttctcattgaaatcggtccttcgggggcactagctggtccagtgtcgcaaattctgaagtctttacctacgtccaccaatatcacgtatatccattcatggtctcgggatatcaaccagtctaaagcgctttttggagtggccggtcatcttttcaatgtgggattgccgattgacttcgacatagtcaatcaaggctaccaggacagccgagtcatcactgatctccctaactattcttggaatcattcgaacacatactggtttgagagcgccgcgagtgccgactggcgctttaaaccatttataacacacgatctcattggaagcaagattctcagcataccgtgggaagcacctagctggcgaaagcggcttaacatcgctgatgtaccatggctgcgcgaccacgcaatgggttcgaatgtactaatgccagccgccggttacatttccatggcattggaggccatgtatcaaaagtatgtcacactagatccggcgcttcgaggtgctcttccatgtgacttcgcattccgattccgcaatgttcgatttcagcgggcgctgataattgaggagaacgccgcaattccacttgtcttatcgctcatgccagtaacgggtagtaggccatggaacgcattcaccatctcctcggaggtcggtggctccatggttgaacactgcagtggctgggtccgcgtgcaagatcaccaatccgaatatctgacaggcactatgctgctacccctcagaaacccgacaccaggaaaactgtggtataagagtcagagtgacattggtatgaagtttggccctgcttttcagaagattcacgagattgaatcaacttgtgggcaacgtaattgtcgaggtcatatatcactggcacctccgccatccaagtgggatcctcaatcgtactatcccatccacccagccgcactggatgcctgcttccagagcgccaatccggctctcgtggcaggtgaccgcagcagagtcgaagatatcatgattcccgctcttctcgacgacatcttgatcaacaagatgcccaagaatatggaaaacggcttgtcgatagctgagtcggtattcactggccgcggacggcaagaccagctcaacaactattatgcagatatcagcgtgcataatccggaaagcggcgcgctgttcgtacggatacgtggtcttcatatcactaagctggatgcaggccgaagaccagattcgcacactctccatagagtggtttggaagcccgacattactttcttaaaccaggaccaaatggcccctgttctagctgatgggaagacatttgcgtccaaactgagcatgatccttgatttggtagctcataagaagcctggacttaaggttttggagctcaatctcgacgacaaagacacatcaatgctgtggcttcagaaagcaggctatggaagagcggcctactatagatatgatttcgcctcgacaaatgccaacaccttggtgactgtgcaaagagagtatgagcatctaaggaagacatcgtttttcctcgcgagcgtcgaaaagagtaagctacatcttccaacggatacaacctatgacatggccattatcaagataccgcaggtgtggaacaagatgcaagtggagaatatcatgcaaaacctggcacccctcctacagccaaaagcattcacgctgctagtcaccctcagaaacggagtagcagagatggcgcagccagaagattttgactcgcagatatctgaggatgattttcaggccagtctcccaccttcagaggatttcaattcgacgaacggtagttctagcatagatcatttatccgacacgactaccagctcttcgaaccctatcgacgaaggtgtcaagtcggacgaagaaatgagtccgttgagtgctgttggatgctgtctaggtgtaggcactggacatatcaggcaggtttttgaatccctaatttgggttaaccgaacggatgagagcgagatgtctgtcattctcgggaagcttgcgggtaacgacgatgcggctgttgagaagtccgcaaatagcggcccctggagactcgttgttgtccatctagacgctaatacgcccgacctcaccgcatcgctcaaggctttgttaaagtcctccggctggatcgttgtggagcgcagtacacagctctctccatccgatcatgctgagaaaacggtagtgctaatcctagatgaactgtcgaaacctctcttgacgtgtatcaaccacgaccagtgggacacgctcaagaacctcgtcagttctggaatgccacttctctgggtcacgaagggctcgcagcacgatcgtgtaacagatccagaaagggcgctcgcgcacgggctgttccgcgttgcgcgccgggagaatccagccgctgcaccgatggtccttgatgttcagtccgcatcgagcccagccacgccttgggcaatccaacaagttctagcggcggtacgcgaagggagtaccatggccgagacggaatacgccgagcgcgatggcatcatatacgtgcagagagtggtgccagacgaagccctgaacgattttaaacgggccgaaatctcaggccatgacccaatcgtaaaggggttacatggaacagatgttcaagtccacattcatggcgagcgcattggcactttagatctttgctggtgtgaagaagagctggaagaggccgagctcgaagctgggtttgtcgaagttgaagtgataacagtgggtgttaatttcaaggatgttgccacaataatgggaattgtgcccgaaaacgagttcaccatcggctgcgaatgtgccggctatgtgaaaaggctgggatcggaggttaccaaattccaaattggcgatcgagtagctatcatgagtaaaggcacttatgcgaatcgcgttcgcattcctgttggccgcgcgcatgtcattccgtcgtggatgagcttcgaagatgctgcaaccattccaattgcatacatgacagctctctattcgctatatcacttagcgcacatgcaaaagggacagtcagttctgatccactctgctgctggaggtgttggtatcgccgcaatccagctcgcacagcataagaacgcagagatcttcgtgaccgtcggcaccgacgagaaacgcaaatttctcactgacacgttcggcatagcacccgatcacattttctcctcccgtacaaccgagttcgcggaacagatcttgcgcgctacgggtgggcgcggggttgatatcattctgaactccttgattggggagctcctagatgcatcgtggaggatttgtgccgatggcggtaacatggtggagattggtaagagagatatagtcgagcgcaactcgctggccatggagcccttcgatagaaattgttcgttccgcgcagtggatctctcctatacgaaacacttcactcctgaggtgtcagctaggcttttccgcgagatcttcgaccttatcgagggtcggcatgtgaagcctattcaccccatcacaacttttggcttcgacaatgtaccaaatgcgctggccatgattcggcgcggtcaacatataggcaagatcgtaatcactaacggatgtgagccggatgttcaattaccaattagaccagctctgcgccgcctccaacttcccgctaaaaattcatatcttatcgttggaggtctcaaaggtctctgtggaagcctagccgtccatatggcataccacggagcccgtcatataatctcctgtagcagaagtggcttgcgcgatgaagcatcggccaatattgtcgaaacctgccgcgccttgggatgcgaggtgactgacgcttgcgatgatgcaactgacgagaggtttgtacaacgcttgttcaagtcagcacggcctcccatcggcgggctcattcaaggagccatggtgcttagggaccggccgtatgaaatgatgactgtggaggagtaccacagcgccatcagcgcaaaggtgcatgggacattaaacctccaccacgcatccataaatgcagaagtccaacagagaccgttggacttcttcaccatgctctctagcgtttcaggtgtcataggaaataagggacaagcgaactatgccgcggccaacacgttcctcgacgccttcgctagctatcgcaatcgacttggcctagcggcaaacacggtcgaccttggcgccgttcacgacgttgggtacgtcgcaaacgtgggcgcggcattggagtcgcggttcgatagtcgacaatggacaccaatcaatgaagggatgttacgccgcatcctgacatactcggtcctacagcagacctggcgtcgaccactcaatgccaacagcaacgcccagctcatcacgggtatcacttacccgctgcaggcgtcatcttccgacctcactaacgagccgcgctttgcttatcttttcgatgggggcagtgctgacgacgatggagacaacgaacccttgctgaacggcgaccgcgacccgatagatcaggagacacgcgcgttccgcatgatggtgaagcactcgcgggataaaacgggcggagaggcacgcgatgcagagcagctttcggcgccgctagttccggtggcgttaactctgctgtcggcccagattaccaaggtgctccggctcgatgctgaggtcgaagctgggaagccactcgcggcgtacggcctggattccctgtcggctgtggaaatacggagctgggtgcgggacaagttgggtgcagagctgagtactctagacattatcaatgcgacctctgtactcatattgtgcgagaaggtggtgggaattcttttggcggcggtttga

SEQ ID NO: 20179 - protein, 2478 aa, Muscodor strobelii
  misc_feature: SGI Peptide ID NO. 566804
  misc_feature (548)..(908): Pfam Id: PF00698 Pfam Desc: Acyl transferase domain
  misc_feature (1766)..(1843): Pfam Id: PF08240 Pfam Desc: Alcohol dehydrogenase GroES-like domain
  misc_feature (2086)..(2255): Pfam Id: PF00106 Pfam Desc: short chain dehydrogenase
  misc_feature (1874)..(2022): Pfam Id: PF00107 Pfam Desc: Zinc-binding dehydrogenase
  misc_feature (6)..(257): Pfam Id: PF00109 Pfam Desc: Beta-ketoacyl synthase, N-terminal domain
  misc_feature (265)..(384): Pfam Id: PF02801 Pfam Desc: Beta-ketoacyl synthase, C-terminal domain
  misc_feature (2086)..(2268): Pfam Id: PF08659 Pfam Desc: KR domain
  misc_feature (2405)..(2470): Pfam Id: PF00550 Pfam Desc: Phosphopantetheine attachment site
  misc_feature (549)..(745): Pfam Id: PF00698 Pfam Desc: Acyl transferase domain
  misc_feature (2087)..(2268): Pfam Id: PF08659 Pfam Desc: KR domain
  misc_feature (2)..(2474): NCBI GI: 154315475 Blast Desc: BC1G_04310 [Botryotinia fuckeliana B05.10] gi|150847250|gb|EDN22443.1| BC1G_04310 [Botryotinia fuckeliana B05.10]
  misc_feature (2)..(2474): NCBI GI: 40787344 Blast Desc: polyketide synthase [Botryotinia fuckeliana]
  misc_feature (136)..(2471): NCBI GI: 169625387 Blast Desc: SNOG_15965 [Phaeosphaeria nodorum SN15] gi|160705645|gb|EAT76544.2| SNOG_15965 [Phaeosphaeria nodorum SN15]
  misc_feature (1)..(1923): NCBI GI: 156060145 Blast Desc: SS1G_02211 [Sclerotinia sclerotiorum 1980] gi|154699619|gb|EDN99357.1| SS1G_02211 [Sclerotinia sclerotiorum 1980]
  misc_feature (5)..(1391): NCBI GI: 169782500 Blast Desc: [Aspergillus oryzae RIB40] gi|83774456|dbj|BAE64579.1| protein product [Aspergillus oryzae]
  misc_feature (1569)..(2471): NCBI GI: 169782500 Blast Desc: [Aspergillus oryzae RIB40] gi|83774456|dbj|BAE64579.1| protein product [Aspergillus oryzae]
  misc_feature (1)..(1531): NCBI GI: 63099704 Blast Desc: PKSKA1 [Xylaria sp. BCC 1067]
  misc_feature (1555)..(2476): NCBI GI: 63099704 Blast Desc: PKSKA1 [Xylaria sp. BCC 1067]
  misc_feature (5)..(1392): NCBI GI: 115396514 Blast Desc: [Aspergillus terreus NIH2624] gi|114193465|gb|EAU35165.1| [Aspergillus terreus NIH2624]
  misc_feature (1551)..(2474): NCBI GI: 115396514 Blast Desc: [Aspergillus terreus NIH2624] gi|114193465|gb|EAU35165.1| [Aspergillus terreus NIH2624]
  misc_feature (3)..(1245): SWISSPROT Homolog: EC 2.3.1.161 Lovastatin nonaketide synthase
  misc_feature: Useful for fungicidal and/or biocontrol applications
MHHQQEPVAVVGFACRLPGNNNSPERLWEFLEQGNIASSEVPKSRFSFEGHYDASHKPGTMRPPGGMFLENVDLTKFDAPFFEMSGADAVSMDPNQRQMLEVVFEGLENAGLGLERLSGEQIACFVGSFATDYGDIQNRDPLDRAPNHVIGIGRASMANRLSYFLNIKGPSVTLDTACSGSMVGLHMAVRAIHNGEANAAIVATSNIYLNPEHVQDVGSLGQAHSPTGLCHTFDASADGYIKSEAVSSIILKRLDEAICDRDPIRAVIRGTASTSNGRTNGLASPSSEAQAATIKQAYRSAGITDLNRTGYLECHGTGTPAGDPIEVSGIGSVFSPTRVAGNPLIIGSIKSNIGHSEPSAGSSGVIKTIMCLERGLIPGTPTFINPNPNIDFTLNKVRASRTTLAWPDEKGLVRRASVNSFGYGGSNAHAILEQAAPEQRGHYVSSYVAEDDMTFDYDECDVQHNETRPHTLVLSANDATSLQAGIQALCKHLINPRVRVDVKDLAYTLSERRTGFWHRAYAVVRSTDGLEPSDFVIGKKTPEVPRIGFIFTGQGAQWPQMGKALVQHFPLARSVLEELDCVLRSLPDPPQWSLVSELTEPRSTEHLRQPEFSQPLVTALQLAVITVLESWGIRATRVIGHSSGEIAAACAAGLISRADAIKAAFYRGWAAVKCKTKPKKDSVGMLAVGLSVEGVHDFLEPFIGKVWIACFNSPKSLTISGEKDALESLAVHIKAAGHFARLLHVIILSSRKATESLRILLTHPVIGFQVDLAYHTELMTPIGELYEGLLSDTAFRPASLSTQNCELFSTVSGSRMSVHADAQYWKANMVSPVLFSSALTAMVSDSQAPDVLIEIGPSGALAGPVSQILKSLPTSTNITYIHSWSRDINQSKALFGVAGHLFNVGLPIDFDIVNQGYQDSRVITDLPNYSWNHSNTYWFESAASADWRFKPFITHDLIGSKILSIPWEAPSWRKRLNIADVPWLRDHAMGSNVLMPAAGYISMALEAMYQKYVTLDPALRGALPCDFAFRFRNVRFQRALIIEENAAIPLVLSLMPVTGSRPWNAFTISSEVGGSMVEHCSGWVRVQDHQSEYLTGTMLLPLRNPTPGKLWYKSQSDIGMKFGPAFQKIHEIESTCGQRNCRGHISLAPPPSKWDPQSYYPIHPAALDACFQSANPALVAGDRSRVEDIMIPALLDDILINKMPKNMENGLSIAESVFTGRGRQDQLNNYYADISVHNPESGALFVRIRGLHITKLDAGRRPDSHTLHRVVWKPDITFLNQDQMAPVLADGKTFASKLSMILDLVAHKKPGLKVLELNLDDKDTSMLWLQKAGYGRAAYYRYDFASTNANTLVTVQREYEHLRKTSFFLASVEKSKLHLPTDTTYDMAIIKIPQVWNKMQVENIMQNLAPLLQPKAFTLLVTLRNGVAEMAQPEDFDSQISEDDFQASLPPSEDFNSTNGSSSIDHLSDTTTSSSNPIDEGVKSDEEMSPLSAVGCCLGVGTGHIRQVFESLIWVNRTDESEMSVILGKLAGNDDAAVEKSANSGPWRLVVVHLDANTPDLTASLKALLKSSGWIVVERSTQLSPSDHAEKTVVLILDELSKPLLTCINHDQWDTLKNLVSSGMPLLWVTKGSQHDRVTDPERALAHGLFRVARRENPAAAPMVLDVQSASSPATPWAIQQVLAAVREGSTMAETEYAERDGIIYVQRVVPDEALNDFKRAEISGHDPIVKGLHGTDVQVHIHGERIGTLDLCWCEEELEEAELEAGFVEVEVITVGVNFKDVATIMGIVPENEFTIGCECAGYVKRLGSEVTKFQIGDRVAIMSKGTYANRVRIPVGRAHVIPSWMSFEDAATIPIAYMTALYSLYHLAHMQKGQSVLIHSAAGGVGIAAIQLAQHKNAEIFVTVGTDEKRKFLTDTFGIAPDHIFSSRTTEFAEQILRATGGRGVDIILNSLIGELLDASWRICADGGNMVEIGKRDIVERNSLAMEPFDRNCSFRAVDLSYTKHFTPEVSARLFREIFDLIEGRHVKPIHPITTFGFDNVPNALAMIRRGQHIGKIVITNGCEPDVQLPIRPALRRLQLPAKNSYLIVGGLKGLCGSLAVHMAYHGARHIISCSRSGLRDEASANIVETCRALGCEVTDACDDATDERFVQRLFKSARPPIGGLIQGAMVLRDRPYEMMTVEEYHSAISAKVHGTLNLHHASINAEVQQRPLDFFTMLSSVSGVIGNKGQANYAAANTFLDAFASYRNRLGLAANTVDLGAVHDVGYVANVGAALESRFDSRQWTPINEGMLRRILTYSVLQQTWRRPLNANSNAQLITGITYPLQASSSDLTNEPRFAYLFDGGSADDDGDNEPLLNGDRDPIDQETRAFRMMVKHSRDKTGGEARDAEQLSAPLVPVALTLLSAQITKVLRLDAEVEAGKPLAAYGLDSLSAVEIRSWVRDKLGAELSTLDIINATSVLILCEKVVGILLAAV

SEQ ID NO: 20180 - DNA, 4916 bp, Muscodor strobelii
  misc_feature: SGI EST ID NO. CUFF.47187.0
  misc_feature: Variant of the nucleotide sequence at SEQ ID NO 20178
ctcagcataccgtgggaagcacctagctggcgaaagcggcttaacatcgctgatgtaccatggctgcgcgaccacgcaatgggttcgaatgtactaatgccagccgccggttacatttccatggcattggaggccatgtatcaaaagtatgtcacactagatccggcgcttcgaggtgctcttccatgtgacttcgcattccgattccgcaatgttcgatttcagcgggcgctgataattgaggagaacgccgcaattccacttgtcttatcgctcatgccagtaacgggtagtaggccatggaacgcattcaccatctcctcggaggtcggtggctccatggttgaacactgcagtggctgggtccgcgtgcaagatcaccaatccgaatatctgacaggcactatgctgctacccctcagaaacccgacaccaggaaaactgtggtataagagtcagagtgacattggtatgaagtttggccctgcttttcagaagattcacgagattgaatcaacttgtgggcaacgtaattgtcgaggtcatatatcactggcacctccgccatccaagtgggatcctcaatcgtactatcccatccacccagccgcactggatgcctgcttccagagcgccaatccggctctcgtggcaggtgaccgcagcagagtcgaagatatcatgattcccgctcttctcgacgacatcttgatcaacaagatgcccaagaatatggaaaacggcttgtcgatagctgagtcggtattcactggccgcggacggcaagaccagctcaacaactattatgcagatatcagcgtgcataatccggaaagcggcgcgctgttcgtacggatacgtggtcttcatatcactaagctggatgcaggccgaagaccagattcgcacactctccatagagtggtttggaagcccgacattactttcttaaaccaggaccaaatggcccctgttctagctgatgggaagacatttgcgtccaaactgagcatgatccttgatttggtagctcataagaagcctggacttaaggttttggagctcaatctcgacgacaaagacacatcaatgctgtggcttcagaaagcaggctatggaagagcggcctactatagatatgatttcgcctcgacaaatgccaacaccttggtgactgtgcaaagagagtatgagcatctaaggaagacatcgtttttcctcgcgagcgtcgaaaagagtaagctacatcttccaacggatacaacctatgacatggccattatcaagataccgcaggtgtggaacaagatgcaagtggagaatatcatgcaaaacctggcacccctcctacagccaaaagcattcacgctgctagtcaccctcagaaacggagtagcagagatggcgcagccagaagattttgactcgcagatatctgaggatgattttcaggccagtctcccaccttcagaggatttcaattcgacgaacggtagttctagcatagatcatttatccgacacgactaccagctcttcgaaccctatcgacgaaggtgtcaagtcggacgaagaaatgagtccgttgagtgctgttggatgctgtctaggtgtaggcactggacatatcaggcaggtttttgaatccctaatttgggttaaccgaacggatgagagcgagatgtctgtcattctcgggaagcttgcgggtaacgacgatgcggctgttgagaagtccgcaaatagcggcccctggagactcgttgttgtccatctagacgctaatacgcccgacctcaccgcatcgctcaaggctttgttaaagtcctccggctggatcgttgtggagcgcagtacacagctctctccatccgatcatgctgagaaaacggtagtgctaatcctagatgaactgtcgaaacctctcttgacgtgtatcaaccacgaccagtgggacacgctcaagaacctcgtcagttctggaatgccacttctctgggtcacgaagggctcgcagcacgatcgtgtaacagatccagaaagggcgctcgcgcacgggctgttccgcgttgcgcgccgggagaatccagccgctgcaccgatggtccttgatgttcagtccgcatcgagcccagccacgccttgggcaatccaacaagttctagcggcggtacgcgaagggagtaccatggccgagacggaatacgccgagcgcgatggcatcatatacgtgcagagagtggtgccagacgaagccctgaacgattttaaacgggccgaaatctcaggccatgacccaatcgtaaaggggttacatggaacagatgttcaagtccacattcatggcgagcgcattggcactttagatctttgctggtgtgaagaagagctggaagaggccgagctcgaagctgggtttgtcgaagttgaagtgataacagtgggtgttaatttcaaggtaggaatattctccgtcagtcacctggcttaactctcatactaggtataccaaaaacaaccatgcagtgctaacggatatattaggatgttgccacaataatgggaattgtgcccgaaaacgagttcaccatcggctgcgaatgtgccggctatgtgaaaaggctgggatcggaggttaccaaattccaaattggcgatcgagtagctatcatgagtaaaggcacttatgcgaatcgcgttcgcattcctgttggccgcgcgcatgtcattccgtcgtggatgagcttcgaagatgctgcaaccattccaattgcatacatgacagctctctattcgctatatcacttagcgcacatgcaaaagggacaggtaagaaataagtcaaacttataaaatcgtagatcctcaagactgacaacttgatagtcagttctgatccactctgctgctggaggtgttggtatcgccgcaatccagctcgcacagcataagaacgcagaggtgagtctcatcctacagcatagtctcttagtgtgtgaatcactcgacattttcaatttaccggtagagcgaacgcagctaatgcagagcggatttgactagatcttcgtgaccgtcggcaccgacgagaaacgcaaatttctcactgacacgttcggcatagcacccgatcacattttctcctcccgtacaaccgagttcgcggaacagatcttgcgcgctacgggtgggcgcggggttgatatcattctgaactccttgattggggagctcctagatgcatcgtggaggatttgtgccgatggcggtaacatggtggagattggtaagagagatatagtcgagcgcaactcgctggccatggagcccttcgatagaaattgttcgttccgcgcagtggatctctcctatacgaaacacttcactcctgaggtgtcagctaggcttttccgcgagatcttcgaccttatcgagggtcggcatgtgaagcctattcaccccatcacaacttttggcttcgacaatgtaccaaatgcgctggccatgattcggcgcggtcaacatataggcaagatcgtaatcactaacggatgtgagccggatgttcaattaccaattagaccagctctgcgccgcctccaacttcccgctaaaaattcatatcttatcgttggaggtctcaaaggtctctgtggaagcctagccgtccatatggcataccacggagcccgtcatataatctcctgtagcagaagtggcttgcgcgatgaagcatcggccaatattgtcgaaacctgccgcgccttgggatgcgaggtgactgacgcttgcgatgatgcaactgacgagaggtttgtacaacgcttgttcaagtcagcacggcctcccatcggcgggctcattcaaggagccatggtgcttagggtatgtagttttccttagcattccctcccgtacaactttaactagtcggttgtggcaatagtcgcttcaacagtctatgactaatcttgcgtacaggaccggccgtatgaaatgatgactgtggaggagtaccacagcgccatcagcgcaaaggtgcatgggacattaaacctccaccacgcatccataaatgcagaagtccaacagagaccgttggacttcttcaccatgctctctagcgtttcaggtgtcataggaaataagggacaagcgaactatgccgcggccaacacgttcctcgacgccttcgctagctatcgcaatcgacttggcctagcggcaaacacggtcgaccttggcgccgttcacgacgttgggtacgtcgcaaacgtgggcgcggcattggagtcgcggttcgatagtcgacaatggacaccaatcaatgaagggatgttacgccgcatcctgacatactcggtcctacagcagacctggcgtcgaccactcaatgccaacagcaacgcccagctcatcacgggtatcacttacccgctgcaggcgtcatcttccgacctcactaacgagccgcgctttgcttatcttttcgatgggggcagtgctgacgacgatggagacaacgaacccttgctgaacggcgaccgcgacccgatagatcaggagacacgcgcgttccgcatgatggtgaagcactcgcgggataaaacgggcggagaggcacgcgatgcagagcagctttcggcgccgctagttccggtggcgttaactctgctgtcggcccagattaccaaggtgctccggctcgatgctgaggtcgaagctgggaagccactcgcggcgtacggcctggattccctgtcggctgtggaaatacggagctgggtgcgggacaagttgggtgcagagctgagtactctagacattatcaatgcgacctctgtactcatattgtgcgagaaggtggtgggaattcttttggcggcggtttgacaggcgtataaattagaatatttc

SEQ ID NO: 20181 - DNA, 528 bp, Muscodor strobelii
  misc_feature: SGI cDNA ID NO. 566805
  misc_feature: Encodes the peptide sequence at SEQ ID NO 20182
atggacgagagcggtctccctcaaggttgggaagtgcgccacagcaactccaagaacctcccgtactacttcaactctgtcgagaagatatcacgatgggagccaccttcaggaacagatacagaaaaactgaagaagtacatggccaccaatcattcctcatcccagggccccgccgtcggccgtcctgagggcaagatccgagccgcgcatcttctcgtcaagcaccgtgacagtcgtcgccccgcgagttggcgcgaaaacgagatcactagatccaaagaggaagctctgactatcatcaaaggccacgagcaaaagatcaagagcggcactacttcacttggcgagctggccaccactgagagcgactgtagttcggcgcgcaaacgtggtgatctgggatatttcggcaagggagacatgcaagctgagtttgaggaggccgcctttgcgctccagccgggacagatgagcagtgttgtcgagacagccagtggcctgcacctaattgagcggctagaataa

SEQ ID NO: 20182 - protein, 175 aa, Muscodor strobelii
  misc_feature: SGI Peptide ID NO. 566805
  misc_feature (71)..(175): Pfam Id: PF00639 Pfam Desc: PPIC-type PPIASE domain
  misc_feature (6)..(36): Pfam Id: PF00397 Pfam Desc: WW domain
  misc_feature (1)..(175): NCBI GI: 46124309 Blast Desc: FG06532.1 [Gibberella zeae PH-1]
  misc_feature (1)..(175): NCBI GI: 256726550 Blast Desc: [Nectria haematococca mpVI 77-13-4]
  misc_feature (3)..(175): NCBI GI: 171685376 Blast Desc: protein product [Podospora anserina] gi|170942649|emb|CAP68301.1| protein product [Podospora anserina]
  misc_feature (1)..(175): NCBI GI: 261353987 Blast Desc: peptidyl-prolyl cis-trans isomerase ssp-1 [Verticillium albo-atrum VaMs.102]
  misc_feature (3)..(173): NCBI GI: 242776498 Blast Desc: peptidyl-prolyl cis/trans isomerase [Talaromyces stipitatus ATCC 10500] gi|218722467|gb|EED21885.1| peptidyl-prolyl cis/trans isomerase [Talaromyces stipitatus ATCC
  misc_feature (3)..(175): NCBI GI: 116208446 Blast Desc: CHGG_03516 [Chaetomium globosum CBS 148.51] gi|88184113|gb|EAQ91581.1| CHGG_03516 [Chaetomium globosum CBS 148.51]
  misc_feature (1)..(173): NCBI GI: 146322860 Blast Desc: peptidyl-prolyl cis/trans isomerase [Aspergillus fumigatus Af293] gi|129558496|gb|EAL93151.2| peptidyl-prolyl cis/trans isomerase [Aspergillus fumigatus Af293]
  misc_feature (1)..(173): NCBI GI: 255935639 Blast Desc: Pc13g04100 [Penicillium chrysogenum Wisconsin 54-1255] gi|211583466|emb|CAP91479.1| Pc13g04100 [Penicillium chrysogenum Wisconsin 54-1255]
  misc_feature (1)..(173): NCBI GI: 212532779 Blast Desc: peptidyl-prolyl cis/trans isomerase [Penicillium marneffei ATCC 18224] gi|210071910|gb|EEA25999.1| peptidyl-prolyl cis/trans isomerase [Penicillium marneffei ATCC 18224]
  misc_feature (1)..(175): NCBI GI: 169783918 Blast Desc: [Aspergillus oryzae RIB40] gi|83775165|dbj|BAE65288.1| protein product [Aspergillus oryzae]
  misc_feature (3)..(175): SWISSPROT Homolog: EC 5.2.1.8 Peptidylprolyl isomerase
MDESGLPQGWEVRHSNSKNLPYYFNSVEKISRWEPPSGTDTEKLKKYMATNHSSSQGPAVGRPEGKIRAAHLLVKHRDSRRPASWRENEITRSKEEALTIIKGHEQKIKSGTTSLGELATTESDCSSARKRGDLGYFGKGDMQAEFEEAAFALQPGQMSSVVETASGLHLIERLE

SEQ ID NO: 20183 - DNA, 1111 bp, Muscodor strobelii
  misc_feature: SGI EST ID NO. CUFF.47324.1
  misc_feature: Variant of the nucleotide sequence at SEQ ID NO 20181
attcaagtgacctcacccagcttgcatcttttgccctcctcgtgatcccccaacttcgcccctgaagaaagtccaagatacctttggctgctaatacatcatcccgcttgcgtcttgcccgctgtgtcgacgctgttgattggaggatacgcgcttgactacctttttcggttgctctcccgaaaataaactcttctaggttcttctgcaagtcaacctcatccgtgtgatttcttgccatctgctaccttgcttcgcaacgctacatctccatagcctcttagatatcacatattacaagcacgtctcgcgcatcagcctagtatcaaccatggacgagagcggtctccctcaaggttgggaagtgcgccacagcaactccaagaacctcccgtactacttcaactctgtcgagaagatatcacgatgggagccaccttcaggaacagatacagaaaaactgaagaagtacatggccaccaatcattcctcatcccagggccccgccgtcggccgtcctgagggcaagatccgagccgcgcatcttctcgtcaagcaccgtgacagtcgtcgccccgcgagttggcgcgaaaacgagatcactagatccaaagaggaagctctgactatcatcaaaggccacgagcaaaagatcaagagcggcactacttcacttggcgagctggccaccactgagagcgactgtagttcggcgcgcaaacgtggtgatctgggatatttcggcaagggagacatgcaagctgagtttgaggaggccgcctttgcgctccagccgggacagatgagcagtgttgtcgagacagccagtggcctgcacctaattgagcggctagaataatgggccaataggtcatttcattcacatgttacaaaggcaaaataaagaggggaagcaagaaagaatcatcaaaaaggagctgtagtgcttcgagaatgggcatcgccgaagatattgtgtttctcacatatacaggtcggttgagtagcttgcagcatcttctcatggttgaagtagaaaagtaatagttttcattgttgagactcttttccccgccagtaacgtcttttcctcgtcacacgtacgccctgc

SEQ ID NO: 20184 - DNA, 1443 bp, Muscodor strobelii
  misc_feature: SGI cDNA ID NO. 566806
  misc_feature: Encodes the peptide sequence at SEQ ID NO 20185
atgtcctcttcaaatccctcacccgagatgcttcttcatcagatgatggatcacaaccaattccttgaagacaaagtagacaaattcaatattcagtcgatgcgcagccactctactgttcaagactttgcaaaatcggaggccgacttgactctgctgcaagaaaagataactgaattaaaatcacgcagagacgagctgatagaaaaaacgaataatattcagagcatctgtagtaacggcacgtcaattcaagactttgatcagctgtcccaagcagtgtttctcagcttgatattttccgataaggcgagatcagcaacaagcagtgcagacttggatttgtggctcggatgtgacgacattcttcagaaccttcagaaatggggaaagcttattacaccggaggattccgaggcttcaaaatcggtagaggacatccaagacttcgttaatgagcttgtttttgccatcacgcagcactgtcagattcaactgtccatacagtttcaagagtcactcgaaaagcactaccacaagccggccactcatatctcagagcgctcacgagcactacaacaagaaagagaatcaatatcaaatgagattgattggctctgggaggagattatccccgtcgcaaatatgtgcgtcgttggccagtttcagaagcctgtcctcaatcatcataaggcatctacaagacaacataactttcagaatgccaccgttacaaaatacgtcttgggagtgttcaggtatttggacgcccggctaaggcgtgttaccgagaggactcagactctcgtccatcatcagcaagctttacgcaacggtcagaaatcaatgacttccaataagagcaatattttgttgcaaacacaaaagctcgcaccattgggaacaaagcatgcagatcgtcagcgtagaatggtgttggagaacattaaatctcaggtggaactttatggaacaattcctattgacgacagtactatatcaactagccagacagccgccgtcctgagtgaatatacacgcagtcgcgcgcaaaagaacgatcatcttctccaagacatgcagtcactttttgagcgtgccaccaaagggggcatcggcagttttgggcatagtgttgagcttctttgggaatctctaacgtcggagattccatctggtcaagatgttcacgccgatccagaactcgagcagttgattcgaacgctcagagaccaagctgagcagattgagaaaatgtttcaagagttgtcctgcggcgaaatgacggcatcggagttcattgcgcatgctggctcgcaagtagctacacagctcactatcaatggaggcaagggcgcgaaccaagaaaagactggtttggcttcacgcgcatctataaggggcccaaactttgatgatttcctgcggagatggggtgaatga

SEQ ID NO: 20185 - protein, 480 aa, Muscodor strobelii
  misc_feature: SGI Peptide ID NO. 566806
  misc_feature (115)..(422): NCBI GI: 171685372 Blast Desc: protein product [Podospora anserina] gi|170942647|emb|CAP68299.1| protein product [Podospora anserina]
  misc_feature (113)..(479): NCBI GI: 39972171 Blast Desc: MGG_07387 [Magnaporthe grisea 70-15] gi|145016563|gb|EDK00993.1| MGG_07387 [Magnaporthe grisea 70-15]
  misc_feature (115)..(426): NCBI GI: 116208442 Blast Desc: CHGG_03514 [Chaetomium globosum CBS 148.51] gi|88184111|gb|EAQ91579.1| CHGG_03514 [Chaetomium globosum CBS 148.51]
MSSSNPSPEMLLHQMMDHNQFLEDKVDKFNIQSMRSHSTVQDFAKSEADLTLLQEKITELKSRRDELIEKTNNIQSICSNGTSIQDFDQLSQAVFLSLIFSDKARSATSSADLDLWLGCDDILQNLQKWGKLITPEDSEASKSVEDIQDFVNELVFAITQHCQIQLSIQFQESLEKHYHKPATHISERSRALQQERESISNEIDWLWEEIIPVANMCVVGQFQKPVLNHHKASTRQHNFQNATVTKYVLGVFRYLDARLRRVTERTQTLVHHQQALRNGQKSMTSNKSNILLQTQKLAPLGTKHADRQRRMVLENIKSQVELYGTIPIDDSTISTSQTAAVLSEYTRSRAQKNDHLLQDMQSLFERATKGGIGSFGHSVELLWESLTSEIPSGQDVHADPELEQLIRTLRDQAEQIEKMFQELSCGEMTASEFIAHAGSQVATQLTINGGKGANQEKTGLASRASIRGPNFDDFLRRWGE

SEQ ID NO: 20186 - DNA, 2092 bp, Muscodor strobelii
  misc_feature: SGI EST ID NO. CUFF.47206.0
  misc_feature: Variant of the nucleotide sequence at SEQ ID NO 20184
cactgagcctatgatgcctgtcctaagagccagctcagccgacctcgggccggacatgcagcagatattcaatgaattaaagttgaacatagggtttagggaagggtctgaaactgatcgcatgattcgagatggtcttcagcatgaaatgcctatccgtagcgccttcatcaacgcattggtatcggaatatggccagctgcaatcatggcctctagctcagcaaaactacctaaatactactatgtcctcttcaaatccctcacccgagatgcttcttcatcagatgatggatcacaaccaattccttgaagacaaagtagacaaattcaatattcagtcgatgcgcagccactctactgttcaagactttgcaaaatcggaggccgacttgactctgctgcaagaaaagataactgaattaaaatcacgcagagacgagctgatagaaaaaacgaataatattcagagcatctgtagtaacggcacgtcaattcaagactttgatcagctgtcccaagcagtgtttctcagcttgatattttccgataaggcgagatcagcaacaagcagtgcagacttggatttgtggctcggatgtgacgacattcttcagaaccttcagaaatggggaaagcttattacaccggaggattccgaggcttcaaaatcggtagaggacatccaagacttcgttaatgagcttgtttttgccatcacgcagcactgtcagattcaactgtccatacagtttcaagagtcactcgaaaagcactaccacaagccggccactcatatctcagagcgctcacgagcactacaacaagaaagagaatcaatatcaaatgagattgattggctctgggaggagattatccccgtcgcaaatatgtgcgtcgttggccagtttcagaagcctgtcctcaatcatcataaggcatctacaagacaacataactttcagaatgccaccgttacaaaatacgtcttgggagtgttcaggtatttggacgcccggctaaggcgtgttaccgagaggactcagactctcgtccatcatcagcaagctttacgcaacggtcagaaatcaatgacttccaataagagcaatattttgttgcaaacacaaaagctcgcaccattgggaacaaagcatgcagatcgtcagcgtagaatggtgttggagaacattaaatctcaggtggaactttatggaacaattcctattgacgacagtactatatcaactagccagacagccgccgtcctgagtgaatatacacgcagtcgcgcgcaaaagaacgatcatcttctccaagacatgcagtcactttttgagcgtgccaccaaagggggcatcggcagttttgggcatagtgttgagcttctttgggaatctctaacgtcggagattccatctggtcaagatgttcacgccgatccagaactcgagcagttgattcgaacgctcagagaccaagctgagcagattgagaaaatgtttcaagagttgtcctgcggcgaaatgacggcatcggagttcattgcgcatgctggctcgcaagtagctacacagctcactatcaatggaggcaagggcgcgaaccaagaaaagactggtttggcttcacgcgcatctataaggggcccaaactttgatgatttcctgcggagatggggtgaatgaccgtagtcagctgtaagtctagtttggcttgcgtttttgcagcaggcagccggcatttggtgggcataacggattcactactactatagtggactacgcatttgttttctcaataatacccttgacgtagtcctccaccgagtctatgaagcataggctccagacatatacgtctattacggcgccccttcgtgcccatctaatatcatttctcagataactttactccttattatatcgcaatagctcaattgcgcatggctccaattaatattgggttgtcgctctgtactgtcgcactcaagcttcgcagactctcactttggtaaattaaaggcatgtttacccggagaccattcctctcctcatcgatcatctgtttctagtcaatcatacaaaatctgc

SEQ ID NO: 20187 - DNA, 1623 bp, Muscodor strobelii
  misc_feature: SGI cDNA ID NO. 566807
  misc_feature: Encodes the peptide sequence at SEQ ID NO 20188
atggatccctattttcaggaccgaaacggccaatcgtcggagtcgcctccagacctgtatgccgcaataccaccaggctatcctcatctaccaacagcacaggcggcgccgacaatctcgcctcccgactctggtgatacgcgtaccgcctcccagaccgttcccgcagcttgccttgcttgtggcccaagaaagaaaagacatgcatcagactcgccgtcagaagtcggcggcgagagttgcccaatgctgctcggcgcgcatgctgggacaaccgtcgctcccaacatgacgtctttcagtccggccattactgttcataacacgccgttgtcttttccagcagttactgatccgaatatcctacaattataccgtgcaccatatctcccaaacacggacggagctgtggtgccaaccaacgcgcatccagtccaaagatctattcccgagcagtgtcttgatgcattctatttctacttctatcctgggcaccctgccgttcttcctaagatccatttgctcaaaatgtcccgagagcgaaacatagaggttctactgtctgccatcagatgggtcggctctgctaacgcagcacctttcttgctattagatgccacaacacacggtggcggaaatccgagactcgaggaaagctggcgacggacgtggtgggatcttttcgtcgtcgacggcatgattgctggggttcacagacagacgaatttccccttgttcgacatagtagcagacgtcggcttaccttgtgaagagcaggaattcctttcagggaaaattcctcgaccgatgtatttagaagattttgatgaccaactcttcactgacgaggagcgggagttttcttcatttgcttatcgcgtggcgtctattcggaatttaggccgaatgatgagattaccgaacagtgcccagggcatcacgccggaggaaagtgttgataaaatcgagacgctgctatccaattggagacttcacctaccgcgatcaaaacgagacagtctaaacaaggatggccagcttgatgagatgatgtttcaagcccacatgataaaccatgcttgctccataatattgcatcaaccactgtcgcagctggactcgtctccagctcgtgatatacaagcctgcgcaccgtatcgagccgtagaaagcagaaataacttcaaccagcacacaagacatatcataacggcggcttgcgaaatcagcaagatggtcacctacaatgtgccaataacaagtcatacccacttctttacttgcgtactaacgctatcttctatcgtacacttgagcaaatgggccctatactgtatacaggacgaagacgatcttcgacaacaggttcgcctcaacattggcgcgctcaataagcttagtagcgtttggaaagctgccgaaaatgccggagcgcaagtcaggggtgttgcacaggagatttatcgttcccgcaaggtgcaacagggcaatccatccttttgggttggactcacccaacacgaaataatcagcagtatgtcggttgacgatggcattatgtctgagctcagcttactccctactcttccggagactacaatgcctatgtcacaatcgcagtga

SEQ ID NO: 20188 - protein, 540 aa, Muscodor strobelii
  misc_feature: SGI Peptide ID NO. 566807
  misc_feature (206)..(535): NCBI GI: 39954390 Blast Desc: MGG_08917 [Magnaporthe grisea 70-15] gi|145021139|gb|EDK05268.1| MGG_08917 [Magnaporthe grisea 70-15]
  misc_feature (206)..(523): NCBI GI: 85086814 Blast Desc: NCU00289 [Neurospora crassa OR74A] gi|28918855|gb|EAA28524.1| conserved [Neurospora crassa OR74A]
  misc_feature (206)..(521): NCBI GI: 116207916 Blast Desc: CHGG_03251 [Chaetomium globosum CBS 148.51] gi|88183848|gb|EAQ91316.1| CHGG_03251 [Chaetomium globosum CBS 148.51]
  misc_feature (206)..(528): NCBI GI: 171686340 Blast Desc: protein product [Podospora anserina] gi|170943131|emb|CAP68784.1| protein product [Podospora anserina]
  misc_feature (197)..(530): NCBI GI: 256729855 Blast Desc: NECHADRAFT_46703 [Nectria haematococca mpVI 77-13-4]
  misc_feature (206)..(526): NCBI GI: 156060493 Blast Desc: SS1G_02385 [Sclerotinia sclerotiorum 1980] gi|154699793|gb|EDN99531.1| SS1G_02385 [Sclerotinia sclerotiorum 1980]
  misc_feature (78)..(528): NCBI GI: 261358300 Blast Desc: C6 zinc finger domain-containing protein [Verticillium albo-atrum VaMs.102]
  misc_feature (204)..(512): NCBI GI: 256725467 Blast Desc: NECHADRAFT_45635 [Nectria haematococca mpVI 77-13-4]
  misc_feature (216)..(523): NCBI GI: 46122421 Blast Desc: FG05588.1 [Gibberella zeae PH-1]
  misc_feature (177)..(494): NCBI GI: 46118084 Blast Desc: FG04683.1 [Gibberella zeae PH-1]
MDPYFQDRNGQSSESPPDLYAAIPPGYPHLPTAQAAPTISPPDSGDTRTASQTVPAACLACGPRKKRHASDSPSEVGGESCPMLLGAHAGTTVAPNMTSFSPAITVHNTPLSFPAVTDPNILQLYRAPYLPNTDGAVVPTNAHPVQRSIPEQCLDAFYFYFYPGHPAVLPKIHLLKMSRERNIEVLLSAIRWVGSANAAPFLLLDATTHGGGNPRLEESWRRTWWDLFVVDGMIAGVHRQTNFPLFDIVADVGLPCEEQEFLSGKIPRPMYLEDFDDQLFTDEEREFSSFAYRVASIRNLGRMMRLPNSAQGITPEESVDKIETLLSNWRLHLPRSKRDSLNKDGQLDEMMFQAHMINHACSIILHQPLSQLDSSPARDIQACAPYRAVESRNNFNQHTRHIITAACEISKMVTYNVPITSHTHFFTCVLTLSSIVHLSKWALYCIQDEDDLRQQVRLNIGALNKLSSVWKAAENAGAQVRGVAQEIYRSRKVQQGNPSFWVGLTQHEIISSMSVDDGIMSELSLLPTLPETTMPMSQSQ

SEQ ID NO: 20189 - DNA, 1347 bp, Muscodor strobelii
  misc_feature: SGI EST ID NO. CUFF.47221.0
  misc_feature: Variant of the nucleotide sequence at SEQ ID NO 20187
ccacaacacacggtggcggaaatccgagactcgaggaaagctggcgacggacgtggtgggatcttttcgtcgtcgacggcatgattgctggggttcacagacagacgaatttccccttgttcgacatagtagcagacgtcggcttaccttgtgaagagcaggaattcctttcagggaaaattcctcgaccgatgtatttagaagattttgatgaccaactcttcactgacgaggagcgggagttttcttcatttgcttatcgcgtggcgtctattcggaatttaggccgaatgatgagattaccgaacagtgcccagggcatcacgccggaggaaagtgttgataaaatcgagacgctgctatccaattggagacttcacctaccgcgatcaaaacgagacagtctaaacaaggatggccagcttgatgagatgatgtttcaagcccacatgataaaccatgcttgctccataatattgcatcaaccactgtcgcagctggactcgtctccagctcgtgatatacaagcctgcgcaccgtatcgagccgtagaaagcagaaataacttcaaccagcacacaagacatatcataacggcggcttgcgaaatcagcaagatggtcacctacaatgtgccaataacaagtcatacccacttctttacttgcgtactaacgctatcttctatcgtacacttgagcaaatgggccctatactgtatacaggacgaagacgatcttcgacaacaggttcgcctcaacattggcgcgctcaataagcttagtagcgtttggaaagctgccgaaaatgccggagcgcaagtcaggggtgttgcacaggagatttatcgttcccgcaaggtgcaacagggcaatccatccttttgggttggactcacccaacacgaaataatcagcagtatgtcggttgacgatggcattatgtctgagctcagcttactccctactcttccggagactacaatgcctatgtcacaatcgcagtgataagaggaaagagctatgatgtgatttaagagcagtacttgagatgctctgtgtgtgtggttcgttagctggtttagtgatcccctgctctcttatttataatgctttaatgaaccagatagacgattattctttttttttacccaccagagtagagggaatgatgggcgactttgatgtagatcattttgtatgatactgaagcgattacttcggattttcttcagcaacatatatcaaactcggcgcattgtgctggggtgtagaactcggctcttagtgtcaggatgatacatcatgaccttccttctcatttgaatatagaaacatgtgtgtgaga

SEQ ID NO: 20190 - DNA, 531 bp, Muscodor strobelii
  misc_feature: SGI cDNA ID NO. 566808
  misc_feature: Elevated expression when VOC is produced
  misc_feature: Encodes the peptide sequence at SEQ ID NO 20191
atgcgtcgctctgccaggccaaacccaagcatcacgaattcggctgctcggtcatatagaacagctcagctagaccgcaacgccattgctcagcagcttcaaattcaccgtgtcagggtcactcagcccctcgtcttaggaacagatgtctctcgcttctctctgaccgccgaggcagttgccggtatgggacggctcgctctgctgcccaacgaaatcatcatcttggtcctcgccaactgcaccttgccaacacttctcagattcctgagggtgaacagggcggcccgccagtatgtagacggcgttcccgactttcatttagtcaagaacgacatcaaactccagctggaacgctctcagcccctttatcagcgtttgatgctcagaatccttaagtttcatacctttgggggcatgcgctttttcgtcatggctcgtaactgcgagaggtgtggcgattccctagcccagttccgactcacgcgcgtcaaggtcctctgcgactcttgtttcaggcctctccattag

SEQ ID NO: 20191 - protein, 176 aa, Muscodor strobelii
  misc_feature: SGI Peptide ID NO. 566808
  misc_feature: Useful for introducing or modulating the production of volatile compounds
MRRSARPNPSITNSAARSYRTAQLDRNAIAQQLQIHRVRVTQPLVLGTDVSRFSLTAEAVAGMGRLALLPNEIIILVLANCTLPTLLRFLRVNRAARQYVDGVPDFHLVKNDIKLQLERSQPLYQRLMLRILKFHTFGGMRFFVMARNCERCGDSLAQFRLTRVKVLCDSCFRPLH

SEQ ID NO: 20192 - DNA, 2062 bp, Muscodor strobelii
  misc_feature: SGI EST ID NO. CUFF.47248.1
  misc_feature: Variant of the nucleotide sequence at SEQ ID NO 20190
tttctttttcttttttcccttcagacgatgagctactcgcccacgatacttccattaaggttttcataccttaagcatacgctgcaccccgtttcgacctcgccttcggtggcatgcaccttcacacccaccgtctgctggcaggtgtaggtgcctagcattcctcggctagagtttacaagttggacacaaattgtaagtagcaaacaagtcgcaagagtattttcgtatcccgcatcgctgggtatcctgttcggcaagtttgagcaaacttgccgttatgccctacagctagtgagttgccttacatccgatgttagtctcccgaggcaaagtaggctcctatgaatacccaggcagtcaatttgaagccatctagatcacgagaggtattgaaatgtccaaccccgctcagcctgcgatcgtgactcttgaccatagacctcgtacctcatacctctgctctcgacgtgggtctagtaacttacatctctcacattgacgacttataacatcaggctgagtaccgcaagctagccagccgggcttcggcctgctcatcccccgcgcctcgctttgcgctgcttctgtaagacggtctgtcattggcgcagtacctgcctctttttcctgctcctgtttctttggccgcatggtgccctgacctcgagacggctttgtctctggcatacaataaaatgcgtcgctctgccaggccaaacccaagcatcacgaattcggctgctcggtcatatagaacagctcagctagaccgcaacgccattgctcagcagcttcaaattcaccgtgtcagggtcactcagcccctcgtcttaggaacagatgtctctcgcttctctctgaccgccgaggcagttgccggtatgggacggctcgctctgctgcccaacgaaatcatcatcttggtcctcgccaactgcaccttgccaacacttctcagattcctgagggtgaacagggcggcccgccagtatgtagacggcgttcccgactttcatttagtcaagaacgacatcaaactccagctggaacgctctcagcccctttatcagcgtttgatgctcagaatccttaagtttcatacctttgggggcatgcgctttttcgtcatggctcgtaactgcgagaggtgtggcgattccctagcccagttccgactcacgcgcgtcaaggtcctctgcgactcttgtttcaggcctctccattagtctagctagggcggacagacacgcatggctgtatgtcagtatgataatccggttatcctatgagcactctgtgtacgttcaagttgtaccgtcaactagggtcaaggcaaatacggcggaagatgtcgaagaacatctttgtcaccaatcttggcgatttgactcgggagcttaggtactactcgcttctcgaccggtgttttcagcatcgatagcgccaaagcaaccaaccaggcaaaactatcgcgaattcagctcaggcatcaggtattccattgatcaccacatctttaagagaacatcgttggacggtatagttacgacacgactgatcacgagagaatgacaattgtagcgtcgtatgtctcaatttattttctcgggtttcttttaatacggaatcggcgcggctatggtcttatttggaccttgagtctgtcatctacacaatgacctcggctcgtcaaatttacgatgacccatagactactatgaagtcttgtggtcctagcctacgaggacgtcagtctggagaagccgaaacacatgctattaagatcatattgggccccaacctttcactctcgatctgtggtgaaccatcgcaatggacgtgtagtaagggatatttgatagacaataagcgatatggggtctggactccgtagtacttttgtttcctataataagagctcacatgatcggatggatgcaaatttgcctactgcttttgctgcgtagtgacgtacgagtatttcatctcttattctcctcgaatccctcagcctagacgttagacaagactgcgcatcacgattacgctctatatcttg

SEQ ID NO: 20193 - DNA, 370 bp, Muscodor strobelii
  misc_feature: SGI cDNA ID NO. 566809
  misc_feature: Encodes the peptide sequence at SEQ ID NO 20194
atgaagttctcgcacagcatccagttcaacgcggtgcccgactggagcagccactacatcgcctacagcaacctcaagaagctcatctaccagctcgagaaggcccaccaccagggccacccccaggcccccgccgccgccgacgtcgagacccgcccgctgctgcgccacgaggaccccgagaccgtcttcacccgcgccctcgacgtcgagctcgagaaggtctcgtccttcttcggcgtcaaggagcgcgagctgctcgacgacgtcgacgacctgctacgggatgtcgccgccttcgaggagcacgacggcaacgagcccaacagcaatagcaacaacaacaataacaacaatcatctgcatgtga

SEQ ID NO: 20194 - protein, 123 aa, Muscodor strobelii
  misc_feature: SGI Peptide ID NO. 566809
  misc_feature (1)..(120): Pfam Id: PF03105 Pfam Desc: SPX domain
  misc_feature (1)..(117): Pfam Id: PF03105 Pfam Desc: SPX domain
  misc_feature (1)..(106): NCBI GI: 18376151 Blast Desc: related to PHO87 protein [Neurospora crassa]
  misc_feature (1)..(109): NCBI GI: 145610613 Blast Desc: MGG_01050 [Magnaporthe grisea 70-15] gi|145017994|gb|EDK02273.1| MGG_01050 [Magnaporthe grisea 70-15]
  misc_feature (1)..(106): NCBI GI: 164427999 Blast Desc: NCU01540 [Neurospora crassa OR74A] gi|157071968|gb|EAA27007.2| NCU01540 [Neurospora crassa OR74A]
  misc_feature (1)..(102): NCBI GI: 171688746 Blast Desc: protein product [Podospora anserina] gi|170944335|emb|CAP70445.1| protein product [Podospora anserina]
  misc_feature (1)..(104): NCBI GI: 261354514 Blast Desc: inorganic phosphate transporter PHO87 [Verticillium albo-atrum VaMs.102]
  misc_feature (1)..(105): NCBI GI: 116199663 Blast Desc: CHGG_07987 [Chaetomium globosum CBS 148.51] gi|88179266|gb|EAQ86734.1| CHGG_07987 [Chaetomium globosum CBS 148.51]
  misc_feature (1)..(98): NCBI GI: 256729225 Blast Desc: NECHADRAFT_63039 [Nectria haematococca mpVI 77-13-4]
  misc_feature (1)..(101): NCBI GI: 156059770 Blast Desc: SS1G_03898 [Sclerotinia sclerotiorum 1980] gi|154701684|gb|EDO01423.1| SS1G_03898 [Sclerotinia sclerotiorum 1980]
  misc_feature (1)..(98): NCBI GI: 46116990 Blast Desc: FG04337.1 [Gibberella zeae PH-1]
  misc_feature (1)..(113): NCBI GI: 121702923 Blast Desc: SPX domain protein [Aspergillus clavatus NRRL 1] gi|119397869|gb|EAW08300.1| SPX domain protein [Aspergillus clavatus NRRL 1]
MKFSHSIQFNAVPDWSSHYIAYSNLKKLIYQLEKAHHQGHPQAPAAADVETRPLLRHEDPETVFTRALDVELEKVSSFFGVKERELLDDVDDLLRDVAAFEEHDGNEPNSNSNNNNNNNHLHV

SEQ ID NO: 20195 - DNA, 934 bp, Muscodor strobelii
  misc_feature: SGI EST ID NO. CUFF.47252.0
  misc_feature: Variant of the nucleotide sequence at SEQ ID NO 20193
gtgccgggtaagcgacgtcgcccaggtacctcctgccggccgaagctggtgggatccaatgtccaggcacagagtccacactactgaccatggacgaatcgtcgtggcccatagctccacgttgacgcagtgccgctacaccagcgtctgcaaatccgacgctagtccgaccagagccaaaagctacctacatttttgcccagccaagacgtgggacgctcaacgtcgtcacctgatgcaatcatctcccgcgagataccaccgcacacaaccaatccgagctgcgcgagagaggacatgaccattctacgtgtgtgaccggcctgccctctcgaccgccatcacgattcccgcccgccgcggcccccccgatccctcctctgcgcgcgacgctgcgagccagccgggccgcccgacagacgccctcgaccgaggggagggtctcgaagaagccatcgagctccaagcattcacttccgatcaacacacacaacatcaacagcggcagggacgacgacgtgaagagaaacgagagcggaagcgccggtggctcgaggcccgcgacgacatgaagttctcgcacagcatccagttcaacgcggtgcccgactggagcagccactacatcgcctacagcaacctcaagaagctcatctaccagctcgagaaggcccaccaccagggccacccccaggcccccgccgccgccgacgtcgagacccgcccgctgctgcgccacgaggaccccgagaccgtcttcacccgcgccctcgacgtcgagctcgagaaggtctcgtccttcttcggcgtcaaggagcgcgagctgctcgacgacgtcgacgacctgctacgggatgtcgccgccttcgaggagcacgacggcaacgagcccaacagcaatagcaacaacaacaataacaacaatcatctgcat

SEQ ID NO: 20196 - DNA, 1584 bp, Muscodor strobelii
  misc_feature: SGI cDNA ID NO. 566810
  misc_feature: Encodes the peptide sequence at SEQ ID NO 20197
atgtctacgcctcctcaatctgtccatgtgctcgtggtcggcagtggtaacgctggtttctccgctgccgtctctgccgtgcagaacggtgccaagagtgtcctcctcatcgatcgatgcccagaaaattgggtgggaggtaatacttatttcacggcgggcgcttaccgcacggcacattcaggtctacacgacctcttgccacttgtgaacaacgtggatgcgactctcgcagagaaaatcgacctcgacccttacacccagaatgacttcgcgagcgatatggcacgcgtctgcatgggccgctctaatcctctactcagtaaaaccttgattgaagattccaacgatgcaatcaagtggctagcgcgtcaaggcatccgcttccaactctcctttaaccgacaagcatatctaatagatggacgttataagttttggggtggtcttcacctcaagactgaggacggtggaaaagggttgatcaaggaccatctcgctaacgcaaagcgccacggcgtcaagactatgtggaatacagcactcaccgggataaacgtgaagtccgacggctcgggggtttcggtggccgttgacttcaacgggaagccttatgtcatccaggccagtgcccttattttggccggcgggggcttcgaggctaacccacagctgcgttgccagttcctcggtcccaactgggacatggcactagtacgtggcacgccctataatacgggaagctgcctcgagatagcgatgcgtgacatcagcgccaaacccgctggaaactggtctggctgccactcggttgcgtgggacgccaatgccgatcctaacacaggagatcgcgatgcctccaacgagtatacgaagtccgggtacccgctaggtttgatgataaacgttgacggcaagcgctttgttgacgagggtattgatatgagaaactacacttacgcaaaattcggccgcgcgatattggcccagcccgaatgtatcgccttccaggtttgggattctcgtacgatcccgctattacggtctgaagaataccgcgaagagcgcgtacagcgcatcacggctaccacgctcgaggagcttgccgacaagtgcgctagtaatggcctacacaaccgcgcctcgtttattgccaccataaaagactataacgtggccgtgtatgcccatcagcaggaattccccagcaagatgatgaatccagcagtcaaagatggcctatcaacacagtcatcgagcaggcagctcccgctcgccaagtccaactgggcgcaacccatcgatcagggtcctttcttggcggtgaaggtcgcttgcggtatcaccttcaccttcggcggccttgccgtcatgcatgaaaatgcccaggctatgagcgcaatcactggccgggctatacctaacgtcttctgctgcggcgagatgatgggtggtctcttctacgctaactaccccggcggctctggcctgacctccggtactgtcttcggccttcgcgcgggcaaggcagcggcggggctcgcgttgcaggacccttctggcgtctcacagtcaaggctctag

SEQ ID NO: 20197 - protein, 527 aa, Muscodor strobelii
  misc_feature: SGI Peptide ID NO. 566810
  misc_feature (9)..(497): Pfam Id: PF00890 Pfam Desc: FAD binding domain
  misc_feature (433)..(497): Pfam Id: PF00890 Pfam Desc: FAD binding domain
  misc_feature (9)..(51): Pfam Id: PF00890 Pfam Desc: FAD binding domain
  misc_feature (9)..(50): Pfam Id: PF07992 Pfam Desc: Pyridine nucleotide-disulphide oxidoreductase
  misc_feature (1)..(515): NCBI GI: 256728419 Blast Desc: NECHADRAFT_73047 [Nectria haematococca mpVI 77-13-4]
  misc_feature (1)..(503): NCBI GI: 46117884 Blast Desc: FG04665.1 [Gibberella zeae PH-1]
  misc_feature (5)..(527): NCBI GI: 258576299 Blast Desc: conserved [Uncinocarpus reesii 1704] gi|237902597|gb|EEP76998.1| conserved [Uncinocarpus reesii 1704]
  misc_feature (5)..(503): NCBI GI: 225677926 Blast Desc: fumarate reductase flavoprotein subunit [Paracoccidioides brasiliensis Pb03]
  misc_feature (5)..(503): NCBI GI: 119189205 Blast Desc: CIMG_04650 [Coccidioides immitis RS]
  misc_feature (10)..(503): NCBI GI: 240111328 Blast Desc: FAD binding domain containing protein [Coccidioides posadasii C735 delta SOWgp]
  misc_feature (3)..(527): NCBI GI: 242798311 Blast Desc: conserved [Talaromyces stipitatus ATCC 10500] gi|218716488|gb|EED15909.1| conserved [Talaromyces stipitatus ATCC 10500]
  misc_feature (1)..(503): NCBI GI: 67539926 Blast Desc: AN6133.2 [Aspergillus nidulans FGSC A4] gi|40738729|gb|EAA57919.1| AN6133.2 [Aspergillus nidulans FGSC A4] gi|259479675|tpe|CBF70114.1| TPA: conserved [Aspergillus FGSC
  misc_feature (5)..(512): NCBI GI: 169774441 Blast Desc: [Aspergillus oryzae RIB40] gi|83769551|dbj|BAE59686.1| protein product [Aspergillus oryzae]
  misc_feature (5)..(503): NCBI GI: 145232464 Blast Desc: An02g05410 [Aspergillus niger] gi|134056593|emb|CAK37647.1| protein product [Aspergillus niger]
  misc_feature (4)..(503): SWISSPROT Homolog: EC 1.3.99.1 Succinate dehydrogenase
MSTPPQSVHVLVVGSGNAGFSAAVSAVQNGAKSVLLIDRCPENWVGGNTYFTAGAYRTAHSGLHDLLPLVNNVDATLAEKIDLDPYTQNDFASDMARVCMGRSNPLLSKTLIEDSNDAIKWLARQGIRFQLSFNRQAYLIDGRYKFWGGLHLKTEDGGKGLIKDHLANAKRHGVKTMWNTALTGINVKSDGSGVSVAVDFNGKPYVIQASALILAGGGFEANPQLRCQFLGPNWDMALVRGTPYNTGSCLEIAMRDISAKPAGNWSGCHSVAWDANADPNTGDRDASNEYTKSGYPLGLMINVDGKRFVDEGIDMRNYTYAKFGRAILAQPECIAFQVWDSRTIPLLRSEEYREERVQRITATTLEELADKCASNGLHNRASFIATIKDYNVAVYAHQQEFPSKMMNPAVKDGLSTQSSSRQLPLAKSNWAQPIDQGPFLAVKVACGITFTFGGLAVMHENAQAMSAITGRAIPNVFCCGEMMGGLFYANYPGGSGLTSGTVFGLRAGKAAAGLALQDPSGVSQSRL

SEQ ID NO: 20198 - DNA, 3192 bp, Muscodor strobelii
  misc_feature: SGI EST ID NO. CUFF.47245.0
  misc_feature: Variant of the nucleotide sequence at SEQ ID NO 20196
gtacggaacatgagtattgtattgtattggagagatgtttcaaaagtcaaaatcatataatttaaaaacatgacaacacgcactttttacatctccgtctcctttgcttagatcgcgcagatttcggcagccaattttttttccttatgttaacattcgcagatcattcaatgcaggcggcgaatgagtttacgggccggaattgtcgaaaccatagtgcagaacctttatataaacagcgctcgtaaccaggatggcatatcgaatgcgcatattgatttgaggcgaattgcttcggacatttaccgtccgctttcagctgcttagtaatctgtactagatctatgatggatgtgggcagggatcagcactgatatactggaggagacccggtgtctctggtgatatagtgcaattcttgaccccaccgctacaacctgacccggacattcacaacccgttttcaccacacatgctgctagtctggccttcaactcgtactgtttcgcgtgatcattgaaactatgatgtagccagaggctcagtcatttcaatgtcaattgacagggcgtccagggcgtggtgggagatcgttcggtgatcgtgctatttcctgcgataccaatgttcaaatctccagactcatacatacctggtaggtcgcgtgtgattgtcctccgatagatcgttctgacatttccacccttacttccactcactcttttcatcgcatataatatcacgccatgtctacgcctcctcaatctgtccatgtgctcgtggtcggcagtggtaacgctggtttctccgctgccgtctctgccgtgcagaacggtgccaagagtgtcctcctcatcgatcgatgcccagaaaattgggtgggaggtaatacttatttcacggcgggcgcttaccgcacggcacattcaggtctacacgacctcttgccacttgtgaacaacgtggatgcgactctcgcagagaaaatcgacctcgacccttacacccagaatgacttcgcgagcgatatggcacgcgtctgcatgggccgctctaatcctctactcagtaaaaccttgattgaagattccaacgatgcaatcaagtggctagcgcgtcaaggcatccgcttccaactctcctttaaccgacaagcatatctaatagatggacgttataagttttggggtggtcttcacctcaagactgaggacggtggaaaagggttgatcaaggaccatctcgctaacgcaaagcgccacggcgtcaagactatgtggaatacagcactcaccgggataaacgtgaagtccgacggctcgggggtttcggtggccgttgacttcaacgggaagccttatgtcatccaggccagtgcccttattttggccggcgggggcttcgaggctaacccacagctgcgttgccagttcctcggtcccaactgggacatggcactagtacgtggcacgccctataatacgggaagctgcctcgagatagcgatgcgtgacatcagcgccaaacccgctggaaactggtctggctgccactcggttgcgtgggacgccaatgccgatcctaacacaggagatcgcgatgcctccaacgagtatacgaagtccgggtacccgctaggtttgatgataaacgttgacggcaagcgctttgttgacgagggtattgatatgagaaactacacttacgcaaaattcggccgcgcgatattggcccagcccgaatgtatcgccttccaggtttgggattctcgtacgatcccgctattacggtctgaagaataccgcgaagagcgcgtacagcgcatcacggctaccacgctcgaggagcttgccgacaagtgcgctagtaatggcctacacaaccgcgcctcgtttattgccaccataaaagactataacgtggccgtgtatgcccatcagcaggaattccccagcaagatgatgaatccagcagtcaaagatggcctatcaacacagtcatcgagcaggcagctcccgctcgccaagtccaactgggcgcaacccatcgatcagggtcctttcttggcggtgaaggtcgcttgcggtatcaccttcaccttcggcggccttgccgtcatgcatgaaaatgcccaggctatgagcgcaatcactggccgggctatacctaacgtcttctgctgcggcgagatgatgggtggtctcttctacgctaactaccccggcggctctggcctgacctccggtactgtcttcggccttcgcgcgggcaaggcagcggcggggctcgcgttgcaggacccttctggcgtctcacagtcaaggctctagactttagcgatatgagaagtcggaagagagagtagactgggaaattgtgagattgtggcggagatattctattcaaatgtcattctcctgcgcatgccgtggcagagctctaataatagaattgacggagtgcattacccgctacttgaaagatcgactcccttctgtcgaacatcgaatgatagcacgtgtctgtttatttgctcggctcttccttcaattgagcaactcttcaagcgcgaaacgggtttttctccacctttttcgcttttgttgtcgcttttctaattttattctgtttcgttcacatcctcttgttcaatcgcaaatctgggtcatgagcggactcgattaatgatcatttaaacattctgcttgtacgaaccagggccctttggcttggtgatatgcaatgtgtatttaagtagagcctgatcaataaacctcgaaaatatcgatacgatgacccaagatctcatagtctgcagcactgtaacaatctagataccaatggtagtactctcgagttttaagatactcgtccggaataaagatgtagccgagaagatgaaattgaatggctaagcggtcgcgtcgctggccggaacggcccgtgacgcgctgaaacaatctgagaaagtatagatgtcttagatagcacatatggaggcacctctatcgtcgacgacacctccagcgcatatgcctaaagcacctccttcggtaatggcgatagcctcaattgcagaagcacctctgacggcattagcacccactggcacctccaatagcactagcaccaccgctgtacagcaccttgagcagtacccctgaaaagcattgccagtggcaattgtagcgt

SEQ ID NO: 20199 - DNA, 372 bp, Muscodor strobelii
  misc_feature: SGI cDNA ID NO. 566811
  misc_feature: Reduced expression when VOC is produced
  misc_feature: Encodes the peptide sequence at SEQ ID NO 20200
atgatgaatccagcagtcaaagatggcctatcaacacagtcatcgagcaggcagctcccgctcgccaagtccaactgggcgcaacccatcgatcagggtcctttcttggcggtgaaggtcgcttgcggtatcaccttcaccttcggcggccttgccgtcatgcatgaaaatgcccaggctatgagcgcaatcactggccgggctatacctaacgtcttctgctgcggcgagatgatgggtggtctcttctacgctaactaccccggcggctctggcctgacctccggtactgtcttcggccttcgcgcgggcaaggcagcggcggggctcgcgttgcaggacccttctggcgtctcacagtcaaggctctag

SEQ ID NO: 20200 - protein, 123 aa, Muscodor strobelii
  misc_feature: SGI Peptide ID NO. 566811
  misc_feature (29)..(93): Pfam Id: PF00890 Pfam Desc: FAD binding domain
  misc_feature (3)..(113): NCBI GI: 115492475 Blast Desc: conserved [Aspergillus terreus NIH2624] gi|114197725|gb|EAU39425.1| conserved [Aspergillus terreus NIH2624]
  misc_feature (3)..(111): NCBI GI: 256728419 Blast Desc: NECHADRAFT_73047 [Nectria haematococca mpVI 77-13-4]
  misc_feature (3)..(123): NCBI GI: 242798311 Blast Desc: conserved [Talaromyces stipitatus ATCC 10500] gi|218716488|gb|EED15909.1| conserved [Talaromyces stipitatus ATCC 10500]
  misc_feature (3)..(99): NCBI GI: 226287329 Blast Desc: fumarate reductase flavoprotein subunit [Paracoccidioides brasiliensis Pb18]
  misc_feature (3)..(108): NCBI GI: 169774441 Blast Desc: [Aspergillus oryzae RIB40] gi|83769551|dbj|BAE59686.1| protein product [Aspergillus oryzae]
  misc_feature (3)..(99): NCBI GI: 225677926 Blast Desc: fumarate reductase flavoprotein subunit [Paracoccidioides brasiliensis Pb03]
  misc_feature (3)..(99): NCBI GI: 226279112 Blast Desc: tricarballylate dehydrogenase [Paracoccidioides brasiliensis Pb01]
  misc_feature (3)..(99): NCBI GI: 46117884 Blast Desc: FG04665.1 [Gibberella zeae PH-1]
  misc_feature (3)..(123): NCBI GI: 258576299 Blast Desc: conserved [Uncinocarpus reesii 1704] gi|237902597|gb|EEP76998.1| conserved [Uncinocarpus reesii 1704]
  misc_feature (3)..(99): NCBI GI: 261352773 Blast Desc: tricarballylate dehydrogenase [Verticillium albo-atrum VaMs.102]
  misc_feature: Useful for introducing or modulating the production of volatile compounds
MMNPAVKDGLSTQSSSRQLPLAKSNWAQPIDQGPFLAVKVACGITFTFGGLAVMHENAQAMSAITGRAIPNVFCCGEMMGGLFYANYPGGSGLTSGTVFGLRAGKAAAGLALQDPSGVSQSRL

SEQ ID NO: 20201 - DNA, 3192 bp, Muscodor strobelii; identical to SEQ ID NO: 20198
  misc_feature: SGI EST ID NO. CUFF.47245.0
  misc_feature: Variant of the nucleotide sequence at SEQ ID NO 20199

SEQ ID NO: 20202 - DNA, 1200 bp, Muscodor strobelii
  misc_feature: SGI cDNA ID NO. 566812
  misc_feature: Reduced expression when VOC is produced
  misc_feature: Encodes the peptide sequence at SEQ ID NO 20203
atggaggagcttccgcggctgctgccaacccccctccaatccgtccaggactacctctcgaatgtcaacaatttcaagatcattgagagtacgctccgtgagggcgagcagttcgccaacgccttctttgataccgagattaagctcaagattgcccaagccctggacaacttcggggttgattatattgaggttacgtccccggtttcgtcgccacaatcgtttgaagactgcaaacggatctgccagcttggattgaaggccaaggtcttgacgcatgtccgatgtaacatggaagacgcccgcagggctatagaatgcggtgtcgatggtgtcgatctcgttatcgggacctcgagcttcctccgtgagtacagccacggaaagagcatggagatgatccagaaagtagctctcgaagtcatcgaatacgtcaagagtcagaatgtcgaagtccggttctcctccgaggacagtttccgttcggatctcgtcgacatccttgccctgtacaaggccgtcgataaggccggtgtcgatcgtgtgggcgttgcagacaccgtcggaggtgcgacccctagaatggtatatgacttggttcgcactttaaggggggtggtgtcctgcgatatcgagtgtcatttccatgacgattgtggctgcgctgttgcgaattctcttcaagccctggaggcaggggcaagttttatcgatacctcagtcctcggaattggcgagcgtaacggcattaccccgctcggtgccctcatggcccgcatggttgtgattgctcccgactatgttaccaagaagtacaatctcaaggccctcaaaagtctggaagagctggttgccgatgccgtgcaaatcaacatccctttcaacaacccaattactggcttctgcgcgtttacacacaaggcgggcattcacgccaaggccattctcgcgaacccttcaacttatgaaatcatcgaccctagcttgtttggacttacccgatacgtctcgatcaactcaagagtcacggggtggcatgcagtagcaagccgcgtatctcagcttggtctcaagatgaccgacgagcaggttaaagaggtgacggctaagatcaagcaaatggcagatatccgaccgctagccatcgacgataccgacagtattatccgctcataccatttagacactgtacagcaatag

SEQ ID NO: 20203 - protein, 399 aa, Muscodor strobelii
  misc_feature: SGI Peptide ID NO. 566812
  misc_feature (33)..(290): Pfam Id: PF00682 Pfam Desc: HMGL-like
  misc_feature (11)..(395): NCBI GI: 171681604 Blast Desc: protein product [Podospora anserina] gi|170940761|emb|CAP66410.1| protein product [Podospora anserina]
  misc_feature (11)..(395): NCBI GI: 46116302 Blast Desc: FG03993.1 [Gibberella zeae PH-1]
  misc_feature (10)..(393): NCBI GI: 189206345 Blast Desc: homocitrate synthase [Pyrenophora tritici-repentis Pt-1C-BFP] gi|187975600|gb|EDU42226.1| homocitrate synthase [Pyrenophora tritici-repentis Pt-1C-BFP]
  misc_feature (9)..(393): NCBI GI: 50291105 Blast Desc: protein product [Candida glabrata] gi|49527296|emb|CAG60936.1| protein product [Candida glabrata]
  misc_feature (11)..(393): NCBI GI: 39973523 Blast Desc: MGG_01092 [Magnaporthe grisea 70-15] gi|145017945|gb|EDK02224.1| MGG_01092 [Magnaporthe grisea 70-15]
  misc_feature (9)..(393): NCBI GI: 6320071 Blast Desc: Homocitrate synthase isozyme, catalyzes the condensation of acetyl-CoA and alpha-ketoglutarate to form homocitrate, which is the first step in the lysine biosynthesis
  misc_feature (9)..(393): NCBI GI: 207347106 Blast Desc: YDL182Wp-like protein [Saccharomyces cerevisiae AWRI1631]
  misc_feature (9)..(393): NCBI GI: 51013333 Blast Desc: YDL131W [Saccharomyces cerevisiae]
  misc_feature (9)..(395): NCBI GI: 50291357 Blast Desc: protein product [Candida glabrata] gi|49527422|emb|CAG61062.1| protein product [Candida glabrata]
  misc_feature (9)..(393): NCBI GI: 6320019 Blast Desc: Homocitrate synthase isozyme, catalyzes the condensation of acetyl-CoA and alpha-ketoglutarate to form homocitrate, which is the first step in the lysine biosynthesis
  misc_feature (9)..(393): SWISSPROT Homolog: EC 2.3.3.14 Homocitrate synthase
  misc_feature: Useful for introducing or modulating the production of volatile compounds
MEELPRLLPTPLQSVQDYLSNVNNFKIIESTLREGEQFANAFFDTEIKLKIAQALDNFGVDYIEVTSPVSSPQSFEDCKRICQLGLKAKVLTHVRCNMEDARRAIECGVDGVDLVIGTSSFLREYSHGKSMEMIQKVALEVIEYVKSQNVEVRFSSEDSFRSDLVDILALYKAVDKAGVDRVGVADTVGGATPRMVYDLVRTLRGVVSCDIECHFHDDCGCAVANSLQALEAGASFIDTSVLGIGERNGITPLGALMARMVVIAPDYVTKKYNLKALKSLEELVADAVQINIPFNNPITGFCAFTHKAGIHAKAILANPSTYEIIDPSLFGLTRYVSINSRVTGWHAVASRVSQLGLKMTDEQVKEVTAKIKQMADIRPLAIDDTDSIIRSYHLDTVQQ

SEQ ID NO: 20204 - DNA, 1919 bp, Muscodor strobelii
  misc_feature: SGI EST ID NO. CUFF.47318.1
  misc_feature: Variant of the nucleotide sequence at SEQ ID NO 20202
ggagaatcgtactttgcaacgtccttagaggggttacacagggtgactaacaccgcaaccgcaggaatatttgtgcacgaaaattcgtccccacaccatcaccacgaaacaaagtccacgattcatctgccaattacccattttgtcttgttctttatggtcaattgaattctgaaaagcttactatgtgcggcacttgcaactgtgacacgaatggaggagcttccgcggctgctgccaacccccctccaagtccactgccaacggagtctaccctacccaaggacaacccaagagctctccgtaccagtccgtccaggactacctctcgaatgtcaacaatttcaagatcattgagagtacgctccgtgagggcgagcagttcgccaacgccttctttgataccgagattaagctcaagattgcccaagccctggacaacttcggggttgattatattgaggttacgtccccggtttcgtcgccacaatcgtttgaagactgcaaacggatctgccagcttggattgaaggccaaggtcttgacgcatgtccgatgtaacatggaagacgcccgcagggctatagaatgcggtgtcgatggtgtcgatctcgttatcgggacctcgagcttcctccgtgagtacagccacggaaagagcatggagatgatccagaaagtagctctcgaagtcatcgaatacgtcaagagtcagaatgtcgaagtccggttctcctccgaggacagtttccgttcggatctcgtcgacatccttgccctgtacaaggccgtcgataaggccggtgtcgatcgtgtgggcgttgcagacaccgtcggaggtgcgacccctagaatggtatatgacttggttcgcactttaaggggggtggtgtcctgcgatatcgagtgtcatttccatgacgattgtggctgcgctgttgcgaattctcttcaagccctggaggcaggggcaagttttatcgatacctcagtcctcggaattggcgagcgtaacggcattaccccgctcggtgccctcatggcccgcatggttgtgattgctcccgactatgttaccaagaagtacaatctcaaggccctcaaaagtctggaagagctggttgccgatgccgtgcaaatcaacatccctttcaacaacccaattactggcttctgcgcgtttacacacaaggcgggcattcacgccaaggccattctcgcgaacccttcaacttatgaaatcatcgaccctagcttgtttggacttacccgatacgtctcgatcaactcaagagtcacggggtggcatgcagtagcaagccgcgtatctcagcttggtctcaagatgaccgacgagcaggttaaagaggtgacggctaagatcaagcaaatggcagatatccgaccgctagccatcgacgataccgacagtattatccgctcataccatttagacactgtacagcaatagaattgcgatgataatgtgatgcgatgtgatgtgttgggcgtttggggcgctttgggacattgggagaggtgtattgcatttgcgcaaaagcttcgatataccaaaatgaatttaacatttatcttgaggatttcggcacagacgtacggacggccgggtgggttgagctggggccctcaccgatgccttggcggtcatctcaaaggtccataattgggcaattgcactgtagattccgtctgcttctgcttcttcttcttatcatcccctaatcaatgctgacgttgctcttcgcttgaggtgtagaggatctttgggaactcggcctggatgctgccaagccgaaagggagattcagcaaatgatcttctcttgataccatctgccatatctagtacttgggtgacttaattcccaaggcaacgagttacggagctgaaaagcacca

SEQ ID NO: 20205 - DNA, 966 bp, Muscodor strobelii
  misc_feature: SGI cDNA ID NO. 566813
  misc_feature: Encodes the peptide sequence at SEQ ID NO 20206
atggatcgtctattccaggctactgaggctctgcttgcagcctctcaaatgattcacaatcatcaaactcgagaaaataccagagctatcgaaactccgagctcggtcaagaacaccatcgccttttcttttgacattgatggtgtgctcgtgaaaggtaaggagccgctgcccggtgctcgggaaacaatcgaaatgcttcagcgtgagaatatccctttcatcttcctaacaaacggtggcggcatgactgaacaagctcatacggaacgacttggaatgcgtttaggtttgacgctcgatcccgcacagtttgtgcaatcgcatagtccatatcatgacctcgtcccattgtataaagataagacaattcttgtactgggcggtcatggccagcagattcgccaagtagccctggcttatggcttcaccaaagtcgttacctcgtcggatcttatggttcagtggcctcatattcatccattcccggagttgacccaagagcatcatcgacagcacggtcagttgcccgaagaagggacggatgtgcaggttgcagctatacttatctggtccagtccgcgcgattggatcctcgatctgcagataacactggacctcttgctatcgagtggaggcaagctagcatgcggcaagccaactgggaccacttacgcgtacggtgagaaagttctcctttcgtacaacaagaaactcaatcagagaatagatggtgagcgcaagattcgagcagtatatatggttggtgacaaccctgctagcgatatttgtggcgctaatgaatttagatcgcctacaagtgttgaatggaaaagcattttggtggagagtggagtgtatgaggcaggcaccacgcctcagcatacacccactttcattgcaaagaatgtcgaggaagccgttgcaaaggcactgatacttgagggcattgaagtagacatatga

SEQ ID NO: 20206 - protein, 321 aa, Muscodor strobelii
  misc_feature: SGI Peptide ID NO. 566813
  misc_feature (21)..(316): NCBI GI: 156060827 Blast Desc: SS1G_02556 [Sclerotinia sclerotiorum 1980] gi|154699960|gb|EDN99698.1| SS1G_02556 [Sclerotinia sclerotiorum 1980]
  misc_feature (32)..(308): NCBI GI: 171677444 Blast Desc: protein product [Podospora anserina] gi|170936790|emb|CAP61448.1| protein product [Podospora anserina]
  misc_feature (26)..(312): NCBI GI: 255942493 Blast Desc: Pc18g01710 [Penicillium chrysogenum Wisconsin 54-1255] gi|211586748|emb|CAP94395.1| Pc18g01710 [Penicillium chrysogenum Wisconsin 54-1255]
  misc_feature (6)..(317): NCBI GI: 213405529 Blast Desc: conserved [Schizosaccharomyces japonicus yFS275] gi|212001583|gb|EEB07243.1| conserved [Schizosaccharomyces japonicus yFS275]
  misc_feature (36)..(315): NCBI GI: 39975509 Blast Desc: MGG_00099 [Magnaporthe grisea 70-15] gi|145019062|gb|EDK03341.1| MGG_00099 [Magnaporthe grisea 70-15]
  misc_feature (36)..(308): NCBI GI: 116201051 Blast Desc: CHGG_08410 [Chaetomium globosum CBS 148.51] gi|88176928|gb|EAQ84396.1| CHGG_08410 [Chaetomium globosum CBS 148.51]
  misc_feature (32)..(308): NCBI GI: 212545434 Blast Desc: phosphatidyl synthase [Penicillium marneffei ATCC 18224] gi|210065840|gb|EEA19934.1| phosphatidyl synthase [Penicillium marneffei ATCC 18224]
  misc_feature (36)..(315): NCBI GI: 46136731 Blast Desc: FG09881.1 [Gibberella zeae PH-1]
  misc_feature (36)..(315): NCBI GI: 256732024 Blast Desc: [Nectria haematococca mpVI 77-13-4]
  misc_feature (32)..(312): NCBI GI: 154305534 Blast Desc: BC1G_08536 [Botryotinia fuckeliana B05.10] gi|150853323|gb|EDN28515.1| BC1G_08536 [Botryotinia fuckeliana B05.10]
MDRLFQATEALLAASQMIHNHQTRENTRAIETPSSVKNTIAFSFDIDGVLVKGKEPLPGARETIEMLQRENIPFIFLTNGGGMTEQAHTERLGMRLGLTLDPAQFVQSHSPYHDLVPLYKDKTILVLGGHGQQIRQVALAYGFTKVVTSSDLMVQWPHIHPFPELTQEHHRQHGQLPEEGTDVQVAAILIWSSPRDWILDLQITLDLLLSSGGKLACGKPTGTTYAYGEKVLLSYNKKLNQRIDGERKIRAVYMVGDNPASDICGANEFRSPTSVEWKSILVESGVYEAGTTPQHTPTFIAKNVEEAVAKALILEGIEVDI

SEQ ID NO: 20207 - DNA, 1107 bp, Muscodor strobelii
  misc_feature: SGI cDNA ID NO. 566814
  misc_feature: Encodes the peptide sequence at SEQ ID NO 20208
atgccctcttcaacgccggcggatcgaacaatgcgccgtcgtgctcagaatgcggtggcgcagcgagcatatcgtgccaaacagagagatcgagtaagaaggctcgaagaattgaccgtcgcagcctttgtagatgctcatgccccatcaaatactgtggctgagctgcaaagtcttgatacacaggatgcatgcgcatcaatctgtgcaggcccggtgcaagcggcttcagcgttacattcggcggtcccgtctgtcgtcccagattcatatgaccttgccataaccttctcggcaatacacaggctggtctattcatgcacggaaaaggaacgccaaactctccagataattttgatgcgagagcgaatgggattccgcgacatcgtaaaatatggacttgttcgactgggattctcaatggatccggtgcttttcgagtatgcccaccatatgtctacacgagcatggatagggacggtctgggcaagcttgggtgacgtcaatatgggagctgtcattgccgctggcatcaacttcttagctaacctcccgctttcgcctgagctgcttgccgatagggacgaagacgcattcggacgcatcgtcttcccggtaccagatttacttacgaatcatatcacgttgactgtacaatccttcgcttctgccatctatgcaaacgcaatgctattgcaaattccactgagtctgttaatggacgaagaactcgaaagagtgttagaagcacgtccagatactaaaccggacttaacaccaactttagctcagcagacagtcccgcatcatccaagttttgacctcatcccttggccaacttttcgctcaaacatatgctttgcacttcaacatgatcctcctttgatcgacgatgccgagctttgtcttgatctcatgaatgatggcgtacgatgctggggttctgcggccggagactccctccacggccggggcaagggccaaccttgggactcacgtagctgggaagcagcgccgtggtttctacaaaagtgggaaattctgactggcggaagggacagtgatatatggagaaacagtgaatggtggagggcgatgcgcaactga

SEQ ID NO: 20208 - protein, 368 aa, Muscodor strobelii
  misc_feature: SGI Peptide ID NO. 566814
  misc_feature (4)..(366): NCBI GI: 256727251 Blast Desc: NECHADRAFT_75926 [Nectria haematococca mpVI 77-13-4]
  misc_feature (104)..(364): NCBI GI: 256723194 Blast Desc: NECHADRAFT_81298 [Nectria haematococca mpVI 77-13-4]
  misc_feature (137)..(367): NCBI GI: 169782155 Blast Desc: [Aspergillus oryzae RIB40] gi|83774283|dbj|BAE64407.1| protein product [Aspergillus oryzae]
  misc_feature (220)..(367): NCBI GI: 256720859 Blast Desc: NECHADRAFT_101803 [Nectria haematococca mpVI 77-13-4]
  misc_feature (256)..(367): NCBI GI: 46124893 Blast Desc: FG06824.1 [Gibberella zeae PH-1]
  misc_feature (206)..(368): NCBI GI: 212543381 Blast Desc: conserved [Penicillium marneffei ATCC 18224] gi|210066752|gb|EEA20845.1| conserved [Penicillium marneffei ATCC 18224]
  misc_feature (267)..(367): NCBI GI: 238500596 Blast Desc: AFLA_123380 [Aspergillus flavus NRRL3357] gi|220691769|gb|EED48116.1| AFLA_123380 [Aspergillus flavus NRRL3357]
  misc_feature (253)..(365): NCBI GI: 256733093 Blast Desc: NECHADRAFT_79051 [Nectria haematococca mpVI 77-13-4]
  misc_feature (12)..(368): NCBI GI: 240106735 Blast Desc: CPC735_015200 [Coccidioides posadasii C735 delta SOWgp]
  misc_feature (6)..(368): NCBI GI: 261202830 Blast Desc: conserved [Ajellomyces dermatitidis SLH14081] gi|239590726|gb|EEQ73307.1| conserved [Ajellomyces dermatitidis SLH14081]
MPSSTPADRTMRRRAQNAVAQRAYRAKQRDRVRRLEELTVAAFVDAHAPSNTVAELQSLDTQDACASICAGPVQAASALHSAVPSVVPDSYDLAITFSAIHRLVYSCTEKERQTLQIILMRERMGFRDIVKYGLVRLGFSMDPVLFEYAHHMSTRAWIGTVWASLGDVNMGAVIAAGINFLANLPLSPELLADRDEDAFGRIVFPVPDLLTNHITLTVQSFASAIYANAMLLQIPLSLLMDEELERVLEARPDTKPDLTPTLAQQTVPHHPSFDLIPWPTFRSNICFALQHDPPLIDDAELCLDLMNDGVRCWGSAAGDSLHGRGKGQPWDSRSWEAAPWFLQKWEILTGGRDSDIWRNSEWWRAMRN

SEQ ID NO: 20209 - DNA, 2568 bp, Muscodor strobelii
  misc_feature: SGI cDNA ID NO. 566815
  misc_feature: Elevated expression when VOC is produced
  misc_feature: Encodes the peptide sequence at SEQ ID NO 20210
atggcgaggaatgattcggtgttgcactcaccagagaaacgaataaagctaacatcactcatcggacaattgaccgagcagcttcattcgctaaacaattatctgatcgctgctcacagtgacagtagatggcttcggatgaaggccgcagtcaagcgtccaaataaggcagtgaacgaaaaggtgcaaaagcttacagccagtatcgacatattaaagctatatttactagagtgtagcttggcactgaacgaggagtctgttaccgcttctcgagcagcaaagaaatctaagttacgagacattctcaatcccaacgagcatgatttcatccaccccaaactcgatggtacatttaactggattgtttcaaatatggctattgcttcttggttggaaaaggcaaaaaccccgtttgtggtcgatgcgcaatcgttatcgtctagattgctcataattcacggatccaagggaatcgggaagacagtcttgtcttcacacatttcggaccacctcagagcggcttcttcgctgtgtgcctttttcgccttcttttacggcagcgacagacagagaaagtgcaaatcaatgcttgctacacttctttggcaagtcctcaacttcgatgttgtttctcaaacgacactagacgagatacatggcatagtcatcggctctaacgacctgtcaatgtccgtactaaccaaggcgtttgaacatgtcatatccagtctcagtactactactgtgcacatagtaattgacgggatcgatgagtcagatgaggattgggactcggcagagctcacctttcgaacactcgaaagttggctggtacggttccctcagcttcgaatcctcttgtcggggcgtcactctaccctccatagcatattgagccgctatccccagtgcggtatcgaattgacagagagcgataccaaggccgatatttcgaagttcatcgcgcacaaaatacaagtatcaggccttcttagaagcatgtcggatgacttaaaggctcatgtccagcaaacgcttgaaggaagatcaactggcatgttcctctgggtcgaacttgtattcaaggaacttcgatattgctacagcccaaacgcgatccgtgactgccttcgagatttaccccgcgaccttgagactgagtacgcacgtttgttctcgagactcatgagccgcctcggaagcgagacacaacgaccgagcccgccgttgaacatagcgcgcacgctgctagcgctcataataggagctttcgagtcgttaacagtggacgatcttcgatatgcttacgcagcaacatgttgtagtggccctagctggtatcaaaacctaatcaccgcagatgccatacttgatttgatcggcgattttgtcagcttcactggcaaaggagttccaattgttcgtttgtgccacgcctctctagaggatcttttgcttctctcagaggatcattgggtcggcaacctggaaaaaatcaagtattttcggcttgagtcgtcagaatgttacgagcttaccaccaacgcttgcttggagtatatcgcgaacacagatttcagacacacattgaccgacaattcctactatgaattactggttgctaggccatttctgctttatgccgctaagcatggactcgcacacatgttcactcaccatgatgacagggtcaggatgccagagagccaggtcgacttgatcaaggcttatatagctggtccgcagtttggcggtttccttgaatttgtcgctatgacgtcagtcgagaacgagagttttgtgatggattatgctggcactttgattccgttgctagatctttcggaggccttaccagcagtagagcgcgttatagcagaaagcgagatccgcatttgccaatttggccccgaccaccccaacacccaagcatgggtccagcttcagaacgctataactacctctttcatcgatgaagtccaagtctcatcctcaggcaatgaaagttcccaccaagacataatcactactacaagcccaggtctagatgctttcgactcaaagcaagagacagatttatacagggatgatgcacaagaggtgaaagagttgaaatatatggtagactcaaacactcaaaagcttctacgctcgcacactcttggaaaagcgctgcaattttatttggatcctaagagcgtattatctgaggttgccgagcaattcgcaatgtcattaccgattcacatacatctggcttatgcggttacgatggtgaaagatcagaatttgcaggcagtactcttggatctagcgaggaaacgaaccaacggccagagaacagtgtatcgtgcatgggcattaattgaatgtgctatcaaatgcgatgactgtgaaaccgaagcgttatatcggaaggagacacaggacatcttaatggggcttgaagataatcctatcaccagacgttcgccacttcttttctgttatctacaggagccgttcctggaggaccttcgaaatctcgacttgggcctatattggcaagcagctattatcctataa

SEQ ID NO: 20210 - protein, 855 aa, Muscodor strobelii
  misc_feature: SGI Peptide ID NO. 566815
  misc_feature (114)..(433): NCBI GI: 119182269 Blast Desc: CIMG_06174 [Coccidioides immitis RS]
  misc_feature (114)..(396): NCBI GI: 240109219 Blast Desc: CPC735_027240 [Coccidioides posadasii C735 delta SOWgp]
  misc_feature (117)..(527): NCBI GI: 261188197 Blast Desc: ankyrin repeat protein [Ajellomyces dermatitidis SLH14081] gi|239593390|gb|EEQ75971.1| ankyrin repeat protein [Ajellomyces dermatitidis SLH14081]
  misc_feature (117)..(527): NCBI GI: 239609132 Blast Desc: ankyrin repeat protein [Ajellomyces dermatitidis ER-3]
  misc_feature (81)..(558): NCBI GI: 159127877 Blast Desc: AFUB_041630 [Aspergillus fumigatus A1163]
  misc_feature (81)..(558): NCBI GI: 146323333 Blast Desc: NACHT and WD domain protein [Aspergillus fumigatus Af293] gi|129558342|gb|EAL92825.2| NACHT and WD domain protein [Aspergillus fumigatus Af293]
  misc_feature (106)..(556): NCBI GI: 256724663 Blast Desc: NECHADRAFT_48126 [Nectria haematococca mpVI 77-13-4]
  misc_feature (97)..(597): NCBI GI: 170111436 Blast Desc: ectomycorrhiza-induced ankyrin-domain/NACHT-domain containing protein [Laccaria bicolor S238N-H82] gi|164638280|gb|EDR02559.1| ectomycorrhiza-induced containing
  misc_feature (82)..(558): NCBI GI: 119492756 Blast Desc: WD domain protein [Neosartorya fischeri NRRL 181] gi|119411857|gb|EAW21800.1| WD domain protein [Neosartorya fischeri NRRL 181]
  misc_feature (117)..(433): NCBI GI: 145605956 Blast Desc: MGG_11860 [Magnaporthe grisea 70-15] gi|145013693|gb|EDJ98334.1| MGG_11860 [Magnaporthe grisea 70-15]
  misc_feature: Useful for introducing or modulating the production of volatile compounds
MARNDSVLHSPEKRIKLTSLIGQLTEQLHSLNNYLIAAHSDSRWLRMKAAVKRPNKAVNEKVQKLTASIDILKLYLLECSLALNEESVTASRAAKKSKLRDILNPNEHDFIHPKLDGTFNWIVSNMAIASWLEKAKTPFVVDAQSLSSRLLIIHGSKGIGKTVLSSHISDHLRAASSLCAFFAFFYGSDRQRKCKSMLATLLWQVLNFDVVSQTTLDEIHGIVIGSNDLSMSVLTKAFEHVISSLSTTTVHIVIDGIDESDEDWDSAELTFRTLESWLVRFPQLRILLSGRHSTLHSILSRYPQCGIELTESDTKADISKFIAHKIQVSGLLRSMSDDLKAHVQQTLEGRSTGMFLWVELVFKELRYCYSPNAIRDCLRDLPRDLETEYARLFSRLMSRLGSETQRPSPPLNIARTLLALIIGAFESLTVDDLRYAYAATCCSGPSWYQNLITADAILDLIGDFVSFTGKGVPIVRLCHASLEDLLLLSEDHWVGNLEKIKYFRLESSECYELTTNACLEYIANTDFRHTLTDNSYYELLVARPFLLYAAKHGLAHMFTHHDDRVRMPESQVDLIKAYIAGPQFGGFLEFVAMTSVENESFVMDYAGTLIPLLDLSEALPAVERVIAESEIRICQFGPDHPNTQAWVQLQNAITTSFIDEVQVSSSGNESSHQDIITTTSPGLDAFDSKQETDLYRDDAQEVKELKYMVDSNTQKLLRSHTLGKALQFYLDPKSVLSEVAEQFAMSLPIHIHLAYAVTMVKDQNLQAVLLDLARKRTNGQRTVYRAWALIECAIKCDDCETEALYRKETQDILMGLEDNPITRRSPLLFCYLQEPFLEDLRNLDLGLYWQAAIIL

SEQ ID NO: 20211 - DNA, 1173 bp, Muscodor strobelii
  misc_feature: SGI cDNA ID NO. 566816
  misc_feature: Encodes the peptide sequence at SEQ ID NO 20212
atggccccttcgctcatccagatcggcgctgccgccgccgccctcgctggctctgccaatgccaacatctttggccgccatgtcttcgctgagagggctcctaataactacccggtctatgcttacccgacctatgttcctaccacgagcagcagcaccgccaagatctacccgaccttctcgtacaccaacggaacgacctcaaccagcgctccttaccagagctctagccccgttccgacgacaagcactgacgtctcccctggctccagcagcactcccgccacttctgctcctggtggaggatacccgactggcggagagtatccctcaagcagcgcctccgagactgccccaactggtggatcgtatccttccggcagcgcttctgagacttctcccggtaacggcggatatcctaccacgagtgcttcggagactgcccctaccggcggatatccatctggaggcgtgacttcatacactacctcaaccatctactcgaccacttgctacgagaccggtggaaccaccactactgtcagcattcccatcaccactacggtctgccccgtgaccgagactgcgcctgcgcctgctggtggatatcccacaactcactacaccacctcgacaatctactcgacctcgacttacgttaccggtggcaccaccaccactgtcaccatcccggtcactacgactgtctgccccgtcactgagaccgagacgtatcctgcaggcggcccgaccaccacaaccacttccactcaatggctccctaccaccgtctatgtctctccctcgcaatcttacccggcagagacccctagctccagcgctgaggagactacatcttacccagttgaaacttacccagttggaacaccttctgaatcaagccctgccggttatcccacgtctactcctgtctacgtcactcagactgccaccgtcattcctgtgaccagcgttcccagctctgctcccggctacccaactcaaggttatccatccagctatcctgccggcaatgccactttgaccacctctgttgttcccagtggctctggatacccaactggaacccctgttcctactgccggtgccatgaaggctggcgtcagcttcgttgctgtcgctcttgccggtgtcttcgctttcgccttgtaa

SEQ ID NO: 20212 - protein, 390 aa, Muscodor strobelii
  misc_feature: SGI Peptide ID NO. 566816
  misc_feature (160)..(390): NCBI GI: 256730549 Blast Desc: NECHADRAFT_98537 [Nectria haematococca mpVI 77-13-4]
  misc_feature (104)..(241): NCBI GI: 46109412 Blast Desc: FG01588.1 [Gibberella zeae PH-1]
MAPSLIQIGAAAAALAGSANANIFGRHVFAERAPNNYPVYAYPTYVPTTSSSTAKIYPTFSYTNGTTSTSAPYQSSSPVPTTSTDVSPGSSSTPATSAPGGGYPTGGEYPSSSASETAPTGGSYPSGSASETSPGNGGYPTTSASETAPTGGYPSGGVTSYTTSTIYSTTCYETGGTTTTVSIPITTTVCPVTETAPAPAGGYPTTHYTTSTIYSTSTYVTGGTTTTVTIPVTTTVCPVTETETYPAGGPTTTTTSTQWLPTTVYVSPSQSYPAETPSSSAEETTSYPVETYPVGTPSESSPAGYPTSTPVYVTQTATVIPVTSVPSSAPGYPTQGYPSSYPAGNATLTTSVVPSGSGYPTGTPVPTAGAMKAGVSFVAVALAGVFAFAL

SEQ ID NO: 20213 - DNA, 1907 bp, Muscodor strobelii
  misc_feature: SGI EST ID NO. CUFF.47315.0
  misc_feature: Variant of the nucleotide sequence at SEQ ID NO 20211
tggcagcctcttaatcacagcctgccatcggatgccagatagcgcttccacatctctgcggcccaactgcctggcgtggcagcgagcaacatgggctgagcagacgagcaggattgagaaagaggagctgtgccgagtcattaataagatgggctgcccaccatgattctcgcctcttggtcttttctccccttacaccgtttgtcaagttcaagattatacatcttcaacacccgacgtatcgcacgtcatccactcgttataaattcagtcactcttttaaatactgaaataatctaataccgcagcaatggccccttcgctcatccagatcggcgctgccgccgccgccctcgctggctctgccaatgccaacatctttggccgccatgtcttcgctgagagggctcctaataactacccggtctatgcttacccgacctatgttcctaccacgagcagcagcaccgccaagatctacccgaccttctcgtacaccaacggaacgacctcaaccagcgctccttaccagagctctagccccgttccgacgacaagcactgacgtctcccctggctccagcagcactcccgccacttctgctcctggtggaggatacccgactggcggagagtatccctcaagcagcgcctccgagactgccccaactggtggatcgtatccttccggcagcgcttctgagacttctcccggtaacggcggatatcctaccacgagtgcttcggagactgcccctaccggcggatatccatctggaggcgtgacttcatacactacctcaaccatctactcgaccacttgctacgagaccggtggaaccaccactactgtcagcattcccatcaccactacggtctgccccgtgaccgagactgcgcctgcgcctgctggtggatatcccacaactcactacaccacctcgacaatctactcgacctcgacttacgttaccggtggcaccaccaccactgtcaccatcccggtcactacgactgtctgccccgtcactgagaccgagacgtatcctgcaggcggcccgaccaccacaaccacttccactcaatggctccctaccaccgtctatgtctctccctcgcaatcttacccggcagagacccctagctccagcgctgaggagactacatcttacccagttgaaacttacccagttggaacaccttctgaatcaagccctgccggttatcccacgtctactcctgtctacgtcactcagactgccaccgtcattcctgtgaccagcgttcccagctctgctcccggctacccaactcaaggttatccatccagctatcctgccggcaatgccactttgaccacctctgttgttcccagtggctctggatacccaactggaacccctgttcctactgccggtgccatgaaggctggcgtcagcttcgttgctgtcgctcttgccggtgtcttcgctttcgccttgtaagcttcgcattgaagtttcaagggtgatgttcagatagaatttgggaacgatgacgaccaagcgcatgcatgggtggcttttcccggtgtttttggagagatagacggtcaatggttgggaatctcatcatgagcctggtttttgtgattttacattttaatctttacattattcgggattttatataccaagtaccattttgtatataaacatccgcttcttcgaactggtgatgattatttatcgtggctgtatgtagacgctgtgtacagttgtttggtgtattacccttcgctgctacgttttcactttctctatgaataatgtgattatgacgttaccctgactttgggacgaggtcggtctcgctctatcacgtgtaatatgtcttaaaaatcaaggtgcctgctgttgagacatgtcg

SEQ ID NO: 20214 - DNA, 1137 bp, Muscodor strobelii
  misc_feature: SGI cDNA ID NO. 566817
  misc_feature: Encodes the peptide sequence at SEQ ID NO 20215
atgcgcgctttctgtttgcgctcgcctgcgcgggctgctgtgcagtctctgacatcacgtgcagcttatcaatctacggtctctagtaatgcttgcctcgtccgtccgtccccgatcgtgaaactggcgcaacccccacgcttcttctcgcactcagcgcagcggtcgaacgactggcgccctcgtcgtagacatgacccatacgaagagctatcgcgcgcgaaacctctcctgccgaaagatagcttagcacgagccgcgcggtcgcccagtacccatgtaataatattgcttgcagcagggggcgcgttgggtttttggtacttcaacctcgagaccgttccggtgtccgggcgtacgcgcttcaatttctacagtagagagcgcgtagaggcagccagcagagaacaagtgaagatgctagagtccgaaatcttaaggcaaggcgggagattcctagatgactgggatccgagaacgaggttggttaagcgggtaatgaaacggttgataccgtatagtggaatgccggacgcagcatgggagattcgagttattgacgatgatcgcactgctaatgcaatggttctgcctggtggcaaggtctttgtgttcagtggcttgatcccgatcgcggggggtgaagacgggatggccgctgtgctcggccacgaaattgctcacgacgtcgctgaacacgccggagagcagatgtcatcacaagttggcgtcaacgttctcctttggtctctgctcttcctgaccggtggcatcgcaaacaatctcgttggcgggactctgcttgatcttgttttctctcgtccgatgggacgccgccaagagagcgaagctgattttatcggcctcatgatgatggctgaggcatgttatgatcctcgaaaagcactcaccttctggcagcgaatggagcaggcacagcagcacgcgccaccagaatggatgagtacgcatccttcaaacgaatcgaggataagcaagattgcggagtggatgcctcaagctctcgaaaagatgcatgcttccgattgtcaagacggtggttatggtgcattcgccgatgctttccgttcagcactacgaggacacaatatgatggaacgacggagcgatatctag

SEQ ID NO: 20215 - protein, 378 aa, Muscodor strobelii
  misc_feature: SGI Peptide ID NO. 566817
  misc_feature (170)..(344): Pfam Id: PF01435 Pfam Desc: Peptidase family M48
  misc_feature (45)..(366): NCBI GI: 7635747 Blast Desc: conserved [Neurospora crassa]
  misc_feature (66)..(367): NCBI GI: 46137353 Blast Desc: FG10192.1 [Gibberella zeae PH-1]
  misc_feature (66)..(367): NCBI GI: 256732138 Blast Desc: NECHADRAFT_16073 [Nectria haematococca mpVI 77-13-4]
  misc_feature (64)..(367): NCBI GI: 145612325 Blast Desc: MGG_07052 [Magnaporthe grisea 70-15] gi|145019512|gb|EDK03740.1| MGG_07052 [Magnaporthe grisea 70-15]
  misc_feature (45)..(331): NCBI GI: 164426212 Blast Desc: NCU01041 [Neurospora crassa OR74A] gi|157071243|gb|EAA32417.2| conserved [Neurospora crassa OR74A]
  misc_feature (35)..(367): NCBI GI: 116180038 Blast Desc: CHGG_00647 [Chaetomium globosum CBS 148.51] gi|88184944|gb|EAQ92412.1| CHGG_00647 [Chaetomium globosum CBS 148.51]
  misc_feature (54)..(314): NCBI GI: 171691921 Blast Desc: protein product [Podospora anserina] gi|170945909|emb|CAP72710.1| protein product [Podospora anserina]
  misc_feature (110)..(365): NCBI GI: 67522787 Blast Desc: AN1850.2 [Aspergillus nidulans FGSC A4] gi|40745859|gb|EAA65015.1| AN1850.2 [Aspergillus nidulans FGSC A4] gi|259487200|tpe|CBF85685.1| TPA: mitochondrial inner Oma1,
  misc_feature (107)..(365): NCBI GI: 121707486 Blast Desc: peptidase, [Aspergillus clavatus NRRL 1] gi|119400000|gb|EAW10426.1| peptidase, [Aspergillus clavatus NRRL 1]
  misc_feature (81)..(366): NCBI GI: 189206688 Blast Desc: mitochondrial metalloendopeptidase OMA1 [Pyrenophora tritici-repentis Pt-1C-BFP] gi|187975771|gb|EDU42397.1| mitochondrial metalloendopeptidase OMA1 [Pyrenophora Pt-1C-BFP]
MRAFCLRSPARAAVQSLTSRAAYQSTVSSNACLVRPSPIVKLAQPPRFFSHSAQRSNDWRPRRRHDPYEELSRAKPLLPKDSLARAARSPSTHVIILLAAGGALGFWYFNLETVPVSGRTRFNFYSRERVEAASREQVKMLESEILRQGGRFLDDWDPRTRLVKRVMKRLIPYSGMPDAAWEIRVIDDDRTANAMVLPGGKVFVFSGLIPIAGGEDGMAAVLGHEIAHDVAEHAGEQMSSQVGVNVLLWSLLFLTGGIANNLVGGTLLDLVFSRPMGRRQESEADFIGLMMMAEACYDPRKALTFWQRMEQAQQHAPPEWMSTHPSNESRISKIAEWMPQALEKMHASDCQDGGYGAFADAFRSALRGHNMMERRSDI

SEQ ID NO: 20216 - DNA, 1663 bp, Muscodor strobelii
  misc_feature: SGI EST ID NO. CUFF.47285.0
  misc_feature: Variant of the nucleotide sequence at SEQ ID NO 20214
cccgccagcagtctcccttgcttaaatcgattgcgcagtgctactataatgattcattgtctttttctatgagaaggcgatactgctaagactacctagttgaagatttgataattggaccataagattcgcaccgttgtcttagctgatgtaatcagatagagcttgctagggctggaatcttggctctctggactcgggcttttggcctcgtcccttcctaatcctttgggaccacaaacccacggtcgcgatgcgcgctttctgtttgcgctcgcctgcgcgggctgctgtgcagtctctgacatcacgtgcagcttatcaatctacggtctctagtaatgcttgcctcgtccgtccgtccccgatcgtgaaactggcgcaacccccacgcttcttctcgcactcagcgcagcggtcgaacgactggcgccctcgtcgtagacatgacccatacgaagagctatcgcgcgcgaaacctctcctgccgaaagatagcttagcacgagccgcgcggtcgcccagtacccatgtaataatattgcttgcagcagggggcgcgttgggtttttggtacttcaacctcgagaccgttccggtgtccgggcgtacgcgcttcaatttctacagtagagagcgcgtagaggcagccagcagagaacaagtgaagatgctagagtccgaaatcttaaggcaaggcgggagattcctagatgactgggatccgagaacgaggttggttaagcgggtaatgaaacggttgataccgtatagtggaatgccggacgcagcatgggagattcgagttattgacgatgatcgcactgctaatgcaatggttctgcctggtggcaaggtctttgtgttcagtggcttgatcccgatcgcggggggtgaagacgggatggccgctgtgctcggccacgaaattgctcacgacgtcgctgaacacgccggagagcagatgtcatcacaagttggcgtcaacgttctcctttggtctctgctcttcctgaccggtggcatcgcaaacaatctcgttggcgggactctgcttgatcttgttttctctcgtccgatgggacgccgccaagagagcgaagctgattttatcggcctcatgatgatggctgaggcatgttatgatcctcgaaaagcactcaccttctggcagcgaatggagcaggcacagcagcacgcgccaccagaatggatgagtacgcatccttcaaacgaatcgaggataagcaagattgcggagtggatgcctcaagctctcgaaaagatgcatgcttccgattgtcaagacggtggttatggtgcattcgccgatgctttccgttcagcactacgaggacacaatatgatggaacgacggagcgatatctagatttagacgtcaaaacgaattcatggtaatacctagacatcttgtggcgaaacgttgcatcactgtatactggcatttcccatcttgatcctttttcatcaatacttcaacattgtaagcgatgccccagattgaaagatctgtctcatcatatatcttctacgacattcgagcgcacagtccttccgcttgcagtcctcgattgtctgtggtgctttggtgccagcctgtctccccatgatgttgaattcgcctgcgttggtctgctagcag

SEQ ID NO: 20217 - DNA, 2652 bp, Muscodor strobelii
  misc_feature: SGI cDNA ID NO. 566818
  misc_feature: Encodes the peptide sequence at SEQ ID NO 20218
atggccgagaagccaaggaagaaacggcacctcaactacgacaaatgcaagtattgtcgcgctgcgaaaaagaagtgtgcgcccattgaccgtgcctggcccggcgagaattgcgaaagatgtaatgaagaagggctgccgtgctcgaaaaactcccgagctggtgattatcctgcaatacccccgagccccagtagtagtagaaatgacggagataatatgcaagtgatctatgatctgtctttgagggtcacatggagtagacgactgaagttctatgcaaagtctctgaaaacagtcatcaatgatcaagataagatgtttagccgttatcatcgatcaactgtgatgaacaacttcttgaacctcgttcacagtgaagaagtctctatcactagcgatatcagatctcttttagatgatactcttgcgtcgagtcactccttcacggcgatgtatttcagtctttcgttaaatatagatgtcgactcgttcgaaaacgatccaattttccgacagtttggtatgatcacaagagagatggtagactgcgcccgtcatgcaggtgacatcggcaccgctctggtcatgcaagaaattcttctcgcagaaccgcttcaggaattaagtgaagacttgatcatgcctgaagtccaaagataccttgagatgttcgaagagggagaacagcgactggcggctattggcaagcctaatattctgacaataacgcccctgtataacatcgtatctttcacccgagatcagcgactcctattgattgctttagaccatgccggtttagctcaacgaggtgagaaagatcttatcggaagatcattaatacatttagctcttgatctcgacatattgaagaatgtacgaactgaggacctgttatcagttgcgaaggatatgttcggccgtcatccgatccatatcgcatgttccaaaccaacgcccagcataattgaaacatgcatactcgataacggcgatgtggacattcgagacaattatggtcgtatgccaatccattacgcgagtgctaccggccgtgagaaagttgtcagtctccttctttcgaggggcgcgaacaccgaatcacaggacgatgataatcgaacgccactgttctacgcggctgcgaacggacatcagggtacagtcgagctcctattgagtgagggtatcgacgtcgatgtccaggataccaaaaagcaaagagccttgttctccgcaatcaataatggccatgcacgaatcgtgtcgttactacttgcggctggtgccgctgtcaatttgagggacgagaaatattggacgccgctacactatgcagcatcggatagtcgcgaggcgattgctttgctgttaatccagcatggggcagatattgaaaaccaaaaccaatacctcgagacgccgttgatcatcagctcctacaaaggtcataccgccatggtgaagctacttctcgaccaaggtgccgacgtgaacgcgagcggttctgatggacagacaccgctatggcttgcatcaaggcatggatatgtcgaggtcgtgaaacttttgctcagtaacggcgctagagttgatgctcaggatatcagcgggggtacagcattatcatatgcaagcaagaatgggttcacgacgatcgtggagatcctgcttgagcatattgctgggaccagtattgacttgggtttgccgctgtattttgcggccgagggcgggcacacgaacattgttgagctcttgttcaaatacggtgctgacgctaatacaatggggccttcgaagcgtacaccgctatcttatgcttgcgaacttggacatgcagacattgtcgaactactactcaggcatgaaggtaccgatatcaacgcaccaaatctgcgaggcgagacaccgttatggtatgcggctaggtctggcaatgcgagcgtcgttaaattgttgttggatgcaggcgccgatcgtcatcggaggcaggaatatgattctgccttcacacctttacagattgctcggcagaagagacacatggatgtttacacccagctacgtcaagcatggcacccggacgcgaatcaaactcatattcaaatcagctggaataacggcactatcgatgactacatagcagggacccaagctatgcaatcaagcggcggtgtctcctttcacgtgattcagcctgctttagtacattttccttcagtcaactcatcatttgcgtcgcctgcccccttgcgcgcggtatcagagtccccttgcgcaattcatatccgcttcaatttcccgaccaatagcagcgatttgagcacaacatacgatctcacctcgtatgcgcggcttgtctcgcgactcgagcgtgttcctgcatccgcaacgggtgagtggaagatcctaactctagaagcgatctatgtcgcggacgggatcgcagcggcattccccggaactggacagagcgtggtactgcctattgacccaaatgctcgagctgcatatagaggtgtcacttttgtgcttggtctttcgaatcataccatcaaccagaatctagcaggcgtcgatgtgccgggaagtggtgaggctctgatcgctggtcatttgacctggctcaatgggaacagctcctaa

SEQ ID NO: 20218 - protein, 883 aa, Muscodor strobelii
  misc_feature: SGI Peptide ID NO. 566818
  misc_feature (505)..(537): Pfam Id: PF00023 Pfam Desc: Ankyrin repeat
  misc_feature (635)..(667): Pfam Id: PF00023 Pfam Desc: Ankyrin repeat
  misc_feature (373)..(405): Pfam Id: PF00023 Pfam Desc: Ankyrin repeat
  misc_feature (340)..(372): Pfam Id: PF00023 Pfam Desc: Ankyrin repeat
  misc_feature (472)..(504): Pfam Id: PF00023 Pfam Desc: Ankyrin repeat
  misc_feature (601)..(634): Pfam Id: PF00023 Pfam Desc: Ankyrin repeat
  misc_feature (439)..(471): Pfam Id: PF00023 Pfam Desc: Ankyrin repeat
  misc_feature (406)..(438): Pfam Id: PF00023 Pfam Desc: Ankyrin repeat
  misc_feature (308)..(686): NCBI GI: 67517919 Blast Desc: AN1130.2 [Aspergillus nidulans FGSC A4] gi|40747092|gb|EAA66248.1| AN1130.2 [Aspergillus nidulans FGSC A4]
  misc_feature (308)..(686): NCBI GI: 259488555 Blast Desc: TPA: conserved [Aspergillus nidulans FGSC A4]
  misc_feature (278)..(678): NCBI GI: 67517919 Blast Desc: AN1130.2 [Aspergillus nidulans FGSC A4] gi|40747092|gb|EAA66248.1| AN1130.2 [Aspergillus nidulans FGSC A4]
  misc_feature (278)..(678): NCBI GI: 259488555 Blast Desc: TPA: conserved [Aspergillus nidulans FGSC A4]
  misc_feature (303)..(660): NCBI GI: 67517919 Blast Desc: AN1130.2 [Aspergillus nidulans FGSC A4] gi|40747092|gb|EAA66248.1| AN1130.2 [Aspergillus nidulans FGSC A4]
  misc_feature (303)..(660): NCBI GI: 259488555 Blast Desc: TPA: conserved [Aspergillus nidulans FGSC A4]
  misc_feature (308)..(686): NCBI GI: 157106389 Blast Desc: ankyrin 2,3/unc44 [Aedes aegypti] gi|108868849|gb|EAT33074.1| ankyrin 2,3/unc44 [Aedes aegypti]
  misc_feature (303)..(690): NCBI GI: 159123470 Blast Desc: Ankyrin repeat protein [Aspergillus fumigatus A1163]
  misc_feature (308)..(683): NCBI GI: 67517919 Blast Desc: AN1130.2 [Aspergillus nidulans FGSC A4] gi|40747092|gb|EAA66248.1| AN1130.2 [Aspergillus nidulans FGSC A4]
  misc_feature (303)..(660): NCBI GI: 67517919 Blast Desc: AN1130.2 [Aspergillus nidulans FGSC A4] gi|40747092|gb|EAA66248.1| AN1130.2 [Aspergillus nidulans FGSC A4]
MAEKPRKKRHLNYDKCKYCRAAKKKCAPIDRAWPGENCERCNEEGLPCSKNSRAGDYPAIPPSPSSSRNDGDNMQVIYDLSLRVTWSRRLKFYAKSLKTVINDQDKMFSRYHRSTVMNNFLNLVHSEEVSITSDIRSLLDDTLASSHSFTAMYFSLSLNIDVDSFENDPIFRQFGMITREMVDCARHAGDIGTALVMQEILLAEPLQELSEDLIMPEVQRYLEMFEEGEQRLAAIGKPNILTITPLYNIVSFTRDQRLLLIALDHAGLAQRGEKDLIGRSLIHLALDLDILKNVRTEDLLSVAKDMFGRHPIHIACSKPTPSIIETCILDNGDVDIRDNYGRMPIHYASATGREKVVSLLLSRGANTESQDDDNRTPLFYAAANGHQGTVELLLSEGIDVDVQDTKKQRALFSAINNGHARIVSLLLAAGAAVNLRDEKYWTPLHYAASDSREAIALLLIQHGADIENQNQYLETPLIISSYKGHTAMVKLLLDQGADVNASGSDGQTPLWLASRHGYVEVVKLLLSNGARVDAQDISGGTALSYASKNGFTTIVEILLEHIAGTSIDLGLPLYFAAEGGHTNIVELLFKYGADANTMGPSKRTPLSYACELGHADIVELLLRHEGTDINAPNLRGETPLWYAARSGNASVVKLLLDAGADRHRRQEYDSAFTPLQIARQKRHMDVYTQLRQAWHPDANQTHIQISWNNGTIDDYIAGTQAMQSSGGVSFHVIQPALVHFPSVNSSFASPAPLRAVSESPCAIHIRFNFPTNSSDLSTTYDLTSYARLVSRLERVPASATGEWKILTLEAIYVADGIAAAFPGTGQSVVLPIDPNARAAYRGVTFVLGLSNHTINQNLAGVDVPGSGEALIAGHLTWLNGNSS

SEQ ID NO: 20219 - DNA, 1140 bp, Muscodor strobelii
  misc_feature: SGI EST ID NO. CUFF.47294.0
  misc_feature: Variant of the nucleotide sequence at SEQ ID NO 20217
aaggcgatctactttcacgattttctgtgttgcgataatcctttcttgaccatattcatccttgcttcaactgatgcctttaacgcaagtcatggatttcactcatcctacacggttgtttcgaattgtctctttagcactgacagttttcattccgaatactctctgtttcgatggtaattcatttgacgagcttgatatcaagaatctaattgtgaaagagcgttactatcgtgactctgcacagtacacccagctacgtcaagcatggcacccggacgcgaatcaaactcatattcaaatcagctggaataacggcactatcgatgactacatagcagggacccaagctatgcaatcaagcggcggtgtctcctttcacgtgattcagcctgctttagtacattttccttcagtcaactcatcatttgcgtcgcctgcccccttgcgcgcggtatcagagtccccttgcgcaattcatatccgcttcaatttcccgaccaatagcagcgatttgagcacaacatacgatctcacctcgtatgcgcggcttgtctcgcgactcgagcgtgttcctgcatccgcaacgggtgagtggaagatcctaactctagaagcgatctatgtcgcggacgggatcgcagcggcattccccggaactggacagagcgtggtactgcctattgacccaaatgctcgagctgcatatagaggtgtcacttttgtgcttggtctttcgaatcataccatcaaccagaatctagcaggcgtcgatgtgccgggaagtggtgaggctctgatcgctggtcatttgacctggctcaatgggaacagctcctaaactacctagacggcaaatctcatattatttaacacctattgtcagagattaggatccaaatgacgcgaatgaaaatgaatgcgttataattgaagttaggactcgatcgcattcctcatggcgaaacctataactagccacaatacttgttgatcagatggaaccctgaatggtgggacctaccccaacgtcatctgtcgttgagcagagaattggtctggttgttgcaaacgtggccgccgacaactcctcgcctagagtcgacgttgttttaaaatgaaaatgaaagccattcaaga

SEQ ID NO: 20220 - DNA, 255 bp, Muscodor strobelii
  misc_feature: SGI cDNA ID NO. 566819
  misc_feature: Encodes the peptide sequence at SEQ ID NO 20221
atgtccaagcagttcacagccaaggaggtcgccgagcacaaggacgagcaaaacggtcttttcatcatcgtcgacagcggtgtatacgatgtcaccaacttcctagacgagcatccaggcggtgccaagatcctcaagcgcgtcgccgggaagaacgcaacgaagcagttctggaagtaccacggcaagaacgtcctcgagaagtacggcggaaagctaaaggtcggcgacctgaaggaggaggccaagctgtag

SEQ ID NO: 20221 - protein, 84 aa, Muscodor strobelii
  misc_feature: SGI Peptide ID NO. 566819
  misc_feature (4)..(79): Pfam Id: PF00173 Pfam Desc: Cytochrome b5-like Heme/Steroid binding domain
  misc_feature (1)..(84): NCBI GI: 116179984 Blast Desc: CHGG_00620 [Chaetomium globosum CBS 148.51] gi|88184917|gb|EAQ92385.1| CHGG_00620 [Chaetomium globosum CBS 148.51]
  misc_feature (1)..(84): NCBI GI: 119193122 Blast Desc: conserved [Coccidioides immitis RS]
  misc_feature (1)..(84): NCBI GI: 240105848 Blast Desc: Cytochrome b5-like Heme/Steroid binding domain containing protein [Coccidioides posadasii C735 delta SOWgp]
  misc_feature (1)..(84): NCBI GI: 238837723 Blast Desc: conserved [Microsporum canis CBS 113480]
  misc_feature (1)..(84): NCBI GI: 261190344 Blast Desc: cytochrome b5 [Ajellomyces dermatitidis SLH14081] gi|239591410|gb|EEQ73991.1| cytochrome b5 [Ajellomyces dermatitidis SLH14081] gi|239606462|gb|EEQ83449.1| cytochrome b5
  misc_feature (1)..(84): NCBI GI: 240272964 Blast Desc: cytochrome b5 [Ajellomyces capsulatus H143]
  misc_feature (1)..(84): NCBI GI: 154274303 Blast Desc: conserved [Ajellomyces capsulatus NAm1] gi|150415611|gb|EDN10964.1| conserved [Ajellomyces capsulatus NAm1] gi|225559494|gb|EEH07777.1| conserved [Ajellomyces G186AR]
  misc_feature (1)..(84): NCBI GI: 156055428 Blast Desc: SS1G_05066 [Sclerotinia sclerotiorum 1980] gi|154702850|gb|EDO02589.1| SS1G_05066 [Sclerotinia sclerotiorum 1980]
  misc_feature (1)..(84): NCBI GI: 85102456 Blast Desc: NCU03603 [Neurospora crassa OR74A] gi|30580355|sp|Q8X0J4.1|CYB5L_NEUCR RecName: Full= cytochrome b5 B11H24.095 gi|18376390|emb|CAD21279.1| cytochrome b5 [Neurospora
  misc_feature (1)..(84): NCBI GI: 225684171 Blast Desc: conserved [Paracoccidioides brasiliensis Pb03]
  misc_feature (9)..(69): SWISSPROT Homolog: EC 1.1.2.3 L-lactate dehydrogenase (cytochrome)
MSKQFTAKEVAEHKDEQNGLFIIVDSGVYDVTNFLDEHPGGAKILKRVAGKNATKQFWKYHGKNVLEKYGGKLKVGDLKEEAKL

SEQ ID NO: 20222 - DNA, 3620 bp, Muscodor strobelii
  misc_feature: SGI EST ID NO. CUFF.47506.0
  misc_feature: Variant of the nucleotide sequence at SEQ ID NO 20220
cgcattctttcctgaagtaagggcgacgatgctaaattgcgctgtcttttacatttagtccacagagacacctcatccactttgtgcgcttcgatttcgctgtttttacatttgcgatccgtctccccgtgctttaagacatctactcgcgagtctctccacttcatctacttgttttgacctgacgtcatctctccaatcatccctccatccgccaaaatgtccaagcagttcacagccaaggaggtcgccgagcacaaggacgagcaaaacggtcttttcatcatcgtcgacagcggtgtatacgatgtcaccaacttcctagacgagcatccaggcggtgccaagatcctcaagcgcgtcgccgggaagaacgcaacgaagcagttctggaagtaccacggcaagaacgtcctcgagaagtacggcggaaagctaaaggtcggcgacctgaaggaggaggccaagctgtagataaccccacatgcacgacaccttttgcgcgcgaattaccgtgttacattgccaccatgttaccacctttacgatgcgaagatgagcatttaaggcagcggaggatatctggaaaacagacatgctgatccgagcagagatagagaggagagagcgtaggctatagaatggtctggatcattgcatagacatacatgcatatacgagagcgagcattttgggtacgggcagagaatgaagacacggttcatgcaatcatatgtactattggtgactcaactattaacaacccgcagccatctgcacttggccctccgctatacttattcacggataatgaccctcagacctaaacttccggggtacggtgaaggcgcaatgtaatctgcgaacaagctgatatctctaatatccgtctcatacaactccagcgtcgggcccttcttttcattcgtcttatcataaacatcgtacttcctaaaaagcccggcggtgaaggtctgcagttcctgatacgccaagttaatccccaagcactgccgcgtgcctttggagaacgcgaactgatgtttcttcagacctggattgtcgagatatctctcgggacggaattcatcgggtcgctcatatagatcaggatgtctgttcactagaggcgccgtcatgccgattggtgttccttttggaatcgcaacggtctcgcctgagggcgccgtgtagaatagatcttcgtctggcgctacccggtcttgtcggaaggatgcgccggggtacaagcggatagattcctcgactaacaagcattccgttaacgctttcttcgatggaagaatcactagaatatatcacttactgatggcgttcaagagtggcagactatcaagttttgacgcctcaggcatggcattcggatccggcatggcgacctcgagctcggccttcaatcttgccagaagcgctgggtctgcgagtaagtggtacataatcacagcaagcgttgaagcggtcgtctctgagcctgccgtaacgagaatcatggcttcatcagcaagcctcaaagtctctttctcagactccgggatatcgctacgcatgatctcgtggaagatcgtcttgccttcgggtatttctttcgcgttacggatctcctcgatttgggcgatcaagccctgcgttatagacgttagatactacctcttgaattcagtaagaatgattctacgtacctccatgaactgagcgaagatcccaattcttggcaccaatcgcagcatgatgctcggaggtaatttactgaacatgagcataagccaatgaacatggacgcccacaacactgaacctattcggcgtaatgcagtcaaagaagtccttgttgcaatcctccatatcgagacatttcttgcttcgcccctcgccaaatgcatatgaatgaatgacatccttggtcgcagctctgaatcccatctgtatttgcacgggttttccctctttcgcccacccctccatgcgattcagtaggcttgctaaggtgtcgtttaaaattggttctaagcggcggacattcgccatcgagaagtacggatgcagcgttgcgcgccggcgacgatgcatatcgtgatctgctgatgaaatcatcgacccgggcgccatgaacgactggtaagatgtccagtagcgctcacgtcgttgcttgggagattggctgtatagcttgtccacaaacgtcgggtcattgacgtgtagagtatcaggtcggatacgaactacaggaccgtatttacggtgcatttcttcgacctcccaaatatactgcccgcctcgccaaatatcgtggtatgcagcgtaccatgttgtcaaagctgatcgcgattactcagtaaatggtataaacatatgcatttgaggatttcatcttggcataccagcaagtttgggacctgggaatttggctagaggactaagatacagtcgatctatacaaacggaaatgacatatcctaataggccggcgacaaggacttgcggccggagcaagcttgatagcgtgaagacctcagccatgatatcacgttagagcccaagctcgaaggtcggtatttaggcacgagtcacggttgaggagaaacaagtcacaaccaatgcggacaggtatgttgataataaggtcgctctctttcacccggtcaatccaacatttgaatatccgtgggggtttaccccgatctatgttgtattgacccgaatacggtcacctgccgggtcgcttatggttcgacacggatgttgagtgtaccgtattgctgcccggggtatcggccccgcgcgatgttttggagtgaggcttgagtggctcatgaggcaggtagaaacggcattagctaagcatatatccatttttgtgattggttggcgaccctgcgtcccgctatgattcgcgtacaaagcgatgacaagagccgatcagactgatatggaagttggtattgttattgctcagaaatcgtcttgtcaaacagacgagatgggatttagtcgccggacgagatcaacagagaagatactgccccgcgctggaacatcgccgagttggatacgacataccaatcgcgaagtgtgataaagataggcgaaatgaggatgatagcttcttggataacctctggtctcgatgcgcacacgtactaagacacttcctagaagccttggttttggttagttaaagagcaataacaagtggccacttgtacatgaccttgttggcgagcgccgtacaaaaataaatgaagtaatcggaaagttggatcaaagtacctacctgggaaatgaatgcttcatatagcttcttcagattcaaagacatctggtagacataagtgaggcgacctggcagtctagaaattactatgattgttccatgattggtctagaagatgctcacccaaagctgtcttccgactgccgacacatgatcactccagcggtgaagaattgaggtgttttttgtagtttgcgctccaaattcctcgtaaacatatgaatattcatccaatgaagcaatcgtgttgctagccgtagaacattctcacaattgttctagctcatgatctatgtctataatgctctaaccgaaccctagaatattcc

SEQ ID NO: 20223 - DNA, 1560 bp, Muscodor strobelii
  misc_feature: SGI cDNA ID NO. 566820
  misc_feature: Encodes the peptide sequence at SEQ ID NO 20224
atggctgaggtcttcacgctatcaagcttgctccggccgcaagtccttgtcgccggcctattaggatatgtcatttccgtttgtatagatcgactgtatcttagtcctctagccaaattcccaggtcccaaacttgctgctttgacaacatggtacgctgcataccacgatatttggcgaggcgggcagtatatttgggaggtcgaagaaatgcaccgtaaatacggtcctgtagttcgtatccgacctgatactctacacgtcaatgacccgacgtttgtggacaagctatacagccaatctcccaagcaacgacgtgagcgctactggacatcttaccagtcgttcatggcgcccgggtcgatgatttcatcagcagatcacgatatgcatcgtcgccggcgcgcaacgctgcatccgtacttctcgatggcgaatgtccgccgcttagaaccaattttaaacgacaccttagcaagcctactgaatcgcatggaggggtgggcgaaagagggaaaacccgtgcaaatacagatgggattcagagctgcgaccaaggatgtcattcattcatatgcatttggcgaggggcgaagcaagaaatgtctcgatatggaggattgcaacaaggacttctttgactgcattacgccgaataggttcagtgttgtgggcgtccatgttcattggcttatgctcatgttcagtaaattacctccgagcatcatgctgcgattggtgccaagaattgggatcttcgctcagttcatggagggcttgatcgcccaaatcgaggagatccgtaacgcgaaagaaatacccgaaggcaagacgatcttccacgagatcatgcgtagcgatatcccggagtctgagaaagagactttgaggcttgctgatgaagccatgattctcgttacggcaggctcagagacgaccgcttcaacgcttgctgtgattatgtaccacttactcgcagacccagcgcttctggcaagattgaaggccgagctcgaggtcgccatgccggatccgaatgccatgcctgaggcgtcaaaacttgatagtctgccactcttgaacgccatcatcgaggaatctatccgcttgtaccccggcgcatccttccgacaagaccgggtagcgccagacgaagatctattctacacggcgccctcaggcgagaccgttgcgattccaaaaggaacaccaatcggcatgacggcgcctctagtgaacagacatcctgatctatatgagcgacccgatgaattccgtcccgagagatatctcgacaatccaggtctgaagaaacatcagttcgcgttctccaaaggcacgcggcagtgcttggggattaacttggcgtatcaggaactgcagaccttcaccgccgggctttttaggaagtacgatgtttatgataagacgaatgaaaagaagggcccgacgctggagttgtatgagacggatattagagatatcagcttgttcgcagattacattgcgccttcaccgtaccccggaagtttaggtctgagggtcattatccgtgaataa

SEQ ID NO: 20224 - protein, 519 aa, Muscodor strobelii
  misc_feature: SGI Peptide ID NO. 566820
  misc_feature (45)..(498): Pfam Id: PF00067 Pfam Desc: Cytochrome P450
  misc_feature (298)..(473): Pfam Id: PF00067 Pfam Desc: Cytochrome P450
  misc_feature (17)..(519): NCBI GI: 256723227 Blast Desc: NECHADRAFT_97198 [Nectria haematococca mpVI 77-13-4]
  misc_feature (7)..(518): NCBI GI: 145234316 Blast Desc: An02g13980 [Aspergillus niger] gi|134057475|emb|CAK48829.1| protein product [Aspergillus niger]
  misc_feature (15)..(517): NCBI GI: 259484233 Blast Desc: TPA: cytochrome P450, (Eurofung) [Aspergillus nidulans FGSC A4]
  misc_feature (13)..(519): NCBI GI: 119178512 Blast Desc: CIMG_08088 [Coccidioides immitis RS]
  misc_feature (29)..(517): NCBI GI: 67902644 Blast Desc: AN8309.2 [Aspergillus nidulans FGSC A4] gi|40747776|gb|EAA66932.1| AN8309.2 [Aspergillus nidulans FGSC A4]
  misc_feature (13)..(519): NCBI GI: 240104883 Blast Desc: Cytochrome P450 family protein [Coccidioides posadasii C735 delta SOWgp]
  misc_feature (25)..(515): NCBI GI: 169782650 Blast Desc: [Aspergillus oryzae RIB40] gi|83774531|dbj|BAE64654.1| protein product [Aspergillus oryzae]
  misc_feature (11)..(518): NCBI GI: 259487140 Blast Desc: TPA: cytochrome P450, (Eurofung) [Aspergillus nidulans FGSC A4]
  misc_feature (23)..(518): NCBI GI: 119499275 Blast Desc: cytochrome P450, [Neosartorya fischeri NRRL 181] gi|119414559|gb|EAW24498.1| cytochrome P450, [Neosartorya fischeri NRRL 181]
  misc_feature (5)..(518): NCBI GI: 121717305 Blast Desc: cytochrome P450 monooxygenase, [Aspergillus clavatus NRRL 1] gi|119404226|gb|EAW14643.1| cytochrome P450 monooxygenase, [Aspergillus clavatus NRRL 1]
  misc_feature (41)..(469): SWISSPROT Homolog: EC 1.14.14.1 Unspecific monooxygenase
MAEVFTLSSLLRPQVLVAGLLGYVISVCIDRLYLSPLAKFPGPKLAALTTWYAAYHDIWRGGQYIWEVEEMHRKYGPVVRIRPDTLHVNDPTFVDKLYSQSPKQRRERYWTSYQSFMAPGSMISSADHDMHRRRRATLHPYFSMANVRRLEPILNDTLASLLNRMEGWAKEGKPVQIQMGFRAATKDVIHSYAFGEGRSKKCLDMEDCNKDFFDCITPNRFSVVGVHVHWLMLMFSKLPPSIMLRLVPRIGIFAQFMEGLIAQIEEIRNAKEIPEGKTIFHEIMRSDIPESEKETLRLADEAMILVTAGSETTASTLAVIMYHLLADPALLARLKAELEVAMPDPNAMPEASKLDSLPLLNAIIEESIRLYPGASFRQDRVAPDEDLFYTAPSGETVAIPKGTPIGMTAPLVNRHPDLYERPDEFRPERYLDNPGLKKHQFAFSKGTRQCLGINLAYQELQTFTAGLFRKYDVYDKTNEKKGPTLELYETDIRDISLFADYIAPSPYPGSLGLRVIIRE

SEQ ID NO: 20225 - DNA, 3509 bp, Muscodor strobelii
  misc_feature: SGI EST ID NO. CUFF.47507.1
  misc_feature: Variant of the nucleotide sequence at SEQ ID NO 20223
ggaatattctagggttcggttagagcattatagacatagatcatgagctagaacaattgtgagaatgttctacggctagcaacacgattgcttcattggatgaatattcatatgtttacgaggaatttggagcgcaaactacaaaaaacacctcaattcttcaccgctggagtgatcatgtgtcggcagtcggaagacagctttgggtcgcctcacttatgtctaccagatgtctttgaatctgaagaagctatatgaagcattcatttcccaggtaggtactttgatccaactttccgattacttcatttatttttgtacggcgctcgccaacaaggtcatgtacaagtggccacttgttattgctctttaactaaccaaaaccaaggcttctaggaagtgtcttagtacgtgtgcgcatcgagaccagaggttatccaagaagctatcatcctcatttcgcctatctttatcacacttcgcgattggtatgtcgtatccaactcggcgatgttccagcgcggggcagtatcttctctgttgatctcgtccggcgactaaatcccatctcgtctgtttgacaagacgatttctgagcaataacaataccaacttccatatcagtctgatcggctcttgtcatcgctttgtacgcgaatcatagcgggacgcagggtcgccaaccaatcacaaaaatggatatatgcttagctaatgccgtttctacctgcctcatgagccactcaagcctcactccaaaacatcgcgcggggccgataccccgggcagcaatacggtacactcaacatccgtgtcgaaccataagcgacccggcaggtgaccgtattcgggtcaatacaacatagatcggggtaaacccccacggatattcaaatgttggattgaccgggtgaaagagagcgaccttattatcaacatacctgtccgcattggttgtgacttgtttctcctcaaccgtgactcgtgcctaaataccgaccttcgagcttgggctctaacgtgatatcatggctgaggtcttcacgctatcaagcttgctccggccgcaagtccttgtcgccggcctattaggatatgtcatttccgtttgtatagatcgactgtatcttagtcctctagccaaattcccaggtcccaaacttgctgctttgacaacatggtacgctgcataccacgatatttggcgaggcgggcagtatatttgggaggtcgaagaaatgcaccgtaaatacggtcctgtagttcgtatccgacctgatactctacacgtcaatgacccgacgtttgtggacaagctatacagccaatctcccaagcaacgacgtgagcgctactggacatcttaccagtcgttcatggcgcccgggtcgatgatttcatcagcagatcacgatatgcatcgtcgccggcgcgcaacgctgcatccgtacttctcgatggcgaatgtccgccgcttagaaccaattttaaacgacaccttagcaagcctactgaatcgcatggaggggtgggcgaaagagggaaaacccgtgcaaatacagatgggattcagagctgcgaccaaggatgtcattcattcatatgcatttggcgaggggcgaagcaagaaatgtctcgatatggaggattgcaacaaggacttctttgactgcattacgccgaataggttcagtgttgtgggcgtccatgttcattggcttatgctcatgttcagtaaattacctccgagcatcatgctgcgattggtgccaagaattgggatcttcgctcagttcatggagggcttgatcgcccaaatcgaggagatccgtaacgcgaaagaaatacccgaaggcaagacgatcttccacgagatcatgcgtagcgatatcccggagtctgagaaagagactttgaggcttgctgatgaagccatgattctcgttacggcaggctcagagacgaccgcttcaacgcttgctgtgattatgtaccacttactcgcagacccagcgcttctggcaagattgaaggccgagctcgaggtcgccatgccggatccgaatgccatgcctgaggcgtcaaaacttgatagtctgccactcttgaacgccatcatcgaggaatctatccgcttgtaccccggcgcatccttccgacaagaccgggtagcgccagacgaagatctattctacacggcgccctcaggcgagaccgttgcgattccaaaaggaacaccaatcggcatgacggcgcctctagtgaacagacatcctgatctatatgagcgacccgatgaattccgtcccgagagatatctcgacaatccaggtctgaagaaacatcagttcgcgttctccaaaggcacgcggcagtgcttggggattaacttggcgtatcaggaactgcagaccttcaccgccgggctttttaggaagtacgatgtttatgataagacgaatgaaaagaagggcccgacgctggagttgtatgagacggatattagagatatcagcttgttcgcagattacattgcgccttcaccgtaccccggaagtttaggtctgagggtcattatccgtgaataagtatagcggagggccaagtgcagatggctgcgggttgttaatagttgagtcaccaatagtacatatgattgcatgaaccgtgtcttcattctctgcccgtacccaaaatgctcgctctcgtatatgcatgtatgtctatgcaatgatccagaccattctatagcctacgctctctcctctctatctctgctcggatcagcatgtctgttttccagatatcctccgctgccttaaatgctcatcttcgcatcgtaaaggtggtaacatggtggcaatgtaacacggtaattcgcgcgcaaaaggtgtcgtgcatgtggggttatctacagcttggcctcctccttcaggtcgccgacctttagctttccgccgtacttctcgaggacgttcttgccgtggtacttccagaactgcttcgttgcgttcttcccggcgacgcgcttgaggatcttggcaccgcctggatgctcgtctaggaagtctgttggaaagagttgagagattagtgatcatgctagaactggtggatgtctggactgagactgcgcagtgcattcgaaggtttgcatggcgcagaatcaggagtgtggcggtgtcgcgcttactggtgacatcgtatacaccgctgtcgacgatgatgaaaagaccgttttgctcgtccttgtgctcggcgacctccttggctgtgaactgcttggacattttggcggatggagggatgattggagagatgacgtcaggtcaaaacaagtagatgaagtggagagactcgcgagtagatgtcttaaagcacggggagacggatcgcaaatgtaaaaacagcgaaatcgaagcgcacaaagtggatgaggtgtctctgtggactaaatgtaaaagacagcgcaatttagcatcgtcgcccttacttcaggaaagaatgcg

SEQ ID NO: 20226 - DNA, 1317 bp, Muscodor strobelii
  misc_feature: SGI cDNA ID NO. 566821
  misc_feature: Encodes the peptide sequence at SEQ ID NO 20227
atgctgattggcatatgcggcgcaaaatgcgcgggcaaaaacaccgtagcccaatacctagtagagcaccataacttcaagaagctcaccatcacgacctcaacaccatcagaagtctcatccgttgttaataacaccccatcttccgccagcaccacggatgcggatgtcattctagatatcagtaatcttgctccagccctcaccgacgctgagttccaaaacgtattcaacaagctcgatggattcgaggccgcaaatctgagcctcagcgataatggaatattgaggggcaaagtccgcttccgcagcagtattttagccctagtagcacaggataagatgcatcgcttcaaactactagataagcccatgcgcatcgacatccagaagccaaagtcagattccgactcggattcaaaagcccctaccacatctttcgacattggctcagagcactcattcccctctacgacgtccctcctagacttcgtaacaaaacactggcgttcccgctgggtaacactcatcacctcagaatcagtcctcgacgctctaagccgtcgtcctttcttcatcctaatatcagtcgacgcgcccctgatggtccgatggaagcgttaccaaaccacatctgtctcttccttttcatcccctagtctagagtctttcatcacacaatcagactcagacctttactccccctcaaccggtgttcttcccctaatctctcgcgccgcaatcagattgctgaacacgtcgccctcgttggcacatttgtatgccaccctcggcaaactagatctcacgaatccagaccgtctgcggccaagttgggataactacttcatgtccctctcctccctcgcagcacaacgcagcaattgcatgaagcgcgccgtaggcgccgtcctcgtatcaaatagtcgcgtgatcagcacaggctacaacgggacaccacgccatctgacaaattgctccgagggcgggtgtcctcgttgtaattctggggactcgtcgggtgcgaacctcgctacttgcttatgccttcacgccgaagagaacgcgcttttggaagctggacgagaacgcatccgtgagggaagtgtgctgtattgtaatacgtgtccctgtttgacttgcagtattaagattgttcaggtgggaattagtgaggttgtttatagtcaggggtatagcatggatcaggatacggcgagggtgtttaagagtgctggtgttaagttgaggcagttttctcctccggcgaatggattgatacatctcgagaaactagagcatagccgcggcttctga

SEQ ID NO: 20227 - protein, 438 aa, Muscodor strobelii
  misc_feature: SGI Peptide ID NO. 566821
  misc_feature (277)..(397): Pfam Id: PF00383 Pfam Desc: Cytidine and deoxycytidylate deaminase zinc-binding region
  misc_feature (151)..(431): NCBI GI: 154302467 Blast Desc: BC1G_09810 [Botryotinia fuckeliana B05.10] gi|150855299|gb|EDN30491.1| BC1G_09810 [Botryotinia fuckeliana B05.10]
  misc_feature (1)..(429): NCBI GI: 46137423 Blast Desc: FG10227.1 [Gibberella zeae PH-1]
  misc_feature (151)..(431): NCBI GI: 156055334 Blast Desc: SS1G_05018 [Sclerotinia sclerotiorum 1980] gi|154702803|gb|EDO02542.1| SS1G_05018 [Sclerotinia sclerotiorum 1980]
  misc_feature (153)..(433): NCBI GI: 164424748 Blast Desc: NCU06673 [Neurospora crassa OR74A] gi|157070644|gb|EAA31684.2| NCU06673 [Neurospora crassa OR74A]
  misc_feature (153)..(429): NCBI GI: 28950120 Blast Desc: dCMP deaminase [Neurospora crassa]
  misc_feature (160)..(433): NCBI GI: 171691995 Blast Desc: protein product [Podospora anserina] gi|170945946|emb|CAP72747.1| protein product [Podospora anserina]
  misc_feature (150)..(421): NCBI GI: 39971965 Blast Desc: MGG_07298 [Magnaporthe grisea 70-15] gi|145019803|gb|EDK04031.1| MGG_07298 [Magnaporthe grisea 70-15]
  misc_feature (152)..(433): NCBI GI: 116180106 Blast Desc: CHGG_00681 [Chaetomium globosum CBS 148.51] gi|88184978|gb|EAQ92446.1| CHGG_00681 [Chaetomium globosum CBS 148.51]
  misc_feature (140)..(421): NCBI GI: 256732211 Blast Desc: [Nectria haematococca mpVI 77-13-4]
  misc_feature (88)..(430): NCBI GI: 119480441 Blast Desc: deoxycytidylate deaminase [Neosartorya fischeri NRRL 181] gi|119408403|gb|EAW18352.1| deoxycytidylate deaminase [Neosartorya fischeri NRRL 181]
  misc_feature (157)..(427): SWISSPROT Homolog: EC 3.5.4.12 dCMP deaminase
MLIGICGAKCAGKNTVAQYLVEHHNFKKLTITTSTPSEVSSVVNNTPSSASTTDADVILDISNLAPALTDAEFQNVFNKLDGFEAANLSLSDNGILRGKVRFRSSILALVAQDKMHRFKLLDKPMRIDIQKPKSDSDSDSKAPTTSFDIGSEHSFPSTTSLLDFVTKHWRSRWVTLITSESVLDALSRRPFFILISVDAPLMVRWKRYQTTSVSSFSSPSLESFITQSDSDLYSPSTGVLPLISRAAIRLLNTSPSLAHLYATLGKLDLTNPDRLRPSWDNYFMSLSSLAAQRSNCMKRAVGAVLVSNSRVISTGYNGTPRHLTNCSEGGCPRCNSGDSSGANLATCLCLHAEENALLEAGRERIREGSVLYCNTCPCLTCSIKIVQVGISEVVYSQGYSMDQDTARVFKSAGVKLRQFSPPANGLIHLEKLEHSRGF

SEQ ID NO: 20228 - DNA, 1832 bp, Muscodor strobelii
  misc_feature: SGI EST ID NO. CUFF.47322.0
  misc_feature: Variant of the nucleotide sequence at SEQ ID NO 20226
cgccaggggttttataggcacaaacagtcacactagagggcaacttaggtaatcgcatccgaccagtgctttccatttcaggcaatcccaaacctcattacggacttcaacggccatagcacttaaacgcgttatagtagcgcgtcgtgcacaggaacccacgatactgacgagttttccagtttgattttttacaagtcattgaacgtgcttttcagagtcttccatttagtttgaagtgagagttcgcaaggcattgaccagtcgaactcataacggcgaccctatttctcagtcaacatgctgattggcatatgcggcgcaaaatgcgcgggcaaaaacaccgtagcccaatacctagtagagcaccataacttcaagaagctcaccatcacgacctcaacaccatcagaagtctcatccgttgttaataacaccccatcttccgccagcaccacggatgcggatgtcattctagatatcagtaatcttgctccagccctcaccgacgctgagttccaaaacgtattcaacaagctcgatggattcgaggccgcaaatctgagcctcagcgataatggaatattgaggggcaaagtccgcttccgcagcagtattttagccctagtagcacaggataagatgcatcgcttcaaactactagataagcccatgcgcatcgacatccagaagccaaagtcagattccgactcggattcaaaagcccctaccacatctttcgacattggctcagagcactcattcccctctacgacgtccctcctagacttcgtaacaaaacactggcgttcccgctgggtaacactcatcacctcagaatcagtcctcgacgctctaagccgtcgtcctttcttcatcctaatatcagtcgacgcgcccctgatggtccgatggaagcgttaccaaaccacatctgtctcttccttttcatcccctagtctagagtctttcatcacacaatcagactcagacctttactccccctcaaccggtgttcttcccctaatctctcgcgccgcaatcagattgctgaacacgtcgccctcgttggcacatttgtatgccaccctcggcaaactagatctcacgaatccagaccgtctgcggccaagttgggataactacttcatgtccctctcctccctcgcagcacaacgcagcaattgcatgaagcgcgccgtaggcgccgtcctcgtatcaaatagtcgcgtgatcagcacaggctacaacgggacaccacgccatctgacaaattgctccgagggcgggtgtcctcgttgtaattctggggactcgtcgggtgcgaacctcgctacttgcttatgccttcacgccgaagagaacgcgcttttggaagctggacgagaacgcatccgtgagggaagtgtgctgtattgtaatacgtgtccctgtttgacttgcagtattaagattgttcaggtgggaattagtgaggttgtttatagtcaggggtatagcatggatcaggatacggcgagggtgtttaagagtgctggtgttaagttgaggcagttttctcctccggcgaatggattgatacatctcgagaaactagagcatagccgcggcttctgacctgcgacaagcagtgtcatgcattggacatcacgaaaagatgaacgcatagaaagcgagagtattatctcgtgcctaattcgcgaaatcgtccatattgttgaggtccgatacaggccgacctaggggcattgaatacccatgagatatatttcaatcaagtgtatctatgtagactgtagcgaagaatcacgtgaaggccgactggccaaatc

SEQ ID NO: 20229 - DNA, 2076 bp, Muscodor strobelii
  misc_feature: SGI cDNA ID NO. 566822
  misc_feature: Reduced expression when VOC is produced
  misc_feature: Encodes the peptide sequence at SEQ ID NO 20230
atggccactctcaagtttgcgcctttcgcatccgagatcgagctgcccttctactcggctctttttgcgtccaagcttgaccatgacaagctgagcgactcggcgcgccccatcttgggcttgtacgagcctcgccccggcgcagaccccgacagcagcgtcaagatgcaggtccaggccagcgccctcaccagcacaaatgtgccggcaaacgcagtgcgcgccgagggcatcctcagaaacacaaacaccatggatgccttcaagcaggtagacaaggtcgaggttctcaacaacgccgctcgccagatatgggacgcgatcaacgacggcaccatttactcagtcccctccctactctcgtcatacctcgtcctctcttacgccgacctaaagaaatatcgaatgacctactggtttgggttccctaccctcccttcagaccctgcttggaaaagatccggcgacatccaacatctagcctctggcgagagcacggccttggttgagcgagttggaacctggcgctactccgtcgacagccgagaatacggcttctttctcgccaagaaggtccgaggcagacgaacctcgatagacctcgatgacggctccgaagatatcggattcacctgggaagtcggctcattacgcgatttcgaaaaccatttcttcgttggtgtgcccaaagaagacagatacatcgcctttgtggacccctcgacgtacgaagagtaccccgcgtggccactcaggaatttgttgatgcttgtgcgacagcggtacaagatcaaggagatacaggttctgtgctaccgtgacatacagtcgcgcagacacgaggcacgctccatcatcatgcctcttaccttggagacagaggatgatctggtcttgaccgccatgcctaaggcgacaggatgggagcgaaatcaacacaataagctcacagctagatccgtcagtctggcggagtccatggatcccgcccgtcttgctgaccagtctgtcgatctcaacttgaagttgatgaaatggcggatatcacctgatctcaatctcgatataatcaagaacacaaaatgtctattattaggtgccggtacattaggaagttatgtctcgagaaacctcatgagctggggtgtacgtaaaatcacattcgtcgactatggagccgtgtccttttcgaaccccgtccgacaacctctttttgtgtatgatgattgccttaatgggggcgccccgaaggccctcaaggcggcagaagcattgaagcagatctatccgggtgtagagagccatggtgaggttttgtctgtcccgatgcttgggcatcccatcgtggagaagacccaaggcgaattcgaaaagctcaaatctctgatcgacgagcacgatgctatcttcctacttatggatagccgcgaatctaggtggctcccgactgtgatgggcaaagcggctggaaagattgtcatgaatgcggcacttggtttcgatacttatgtggtcatgagacatggcgccgagtccaagaaccaagacgaagcaactttaggttgctacttctgtaatgatgttgtcgcacctggcgactcgcagaaagacttgaccctcgaccaacagtgtaccgtcacccgaccgggtattgctgcgatcgcatctgctctcttggtcgagcttttgaccagtttattgcagcatccattgggacatcatgctcctgcacctgtcacagcaacgacatcagggcagagtatcgatacaagcgatgagcatgctcttggcattgttcctcaccagattcgaggatttttgaacagatttcaaaacctcgtgatcaaaggggagtcttatccctgctgtagcgcctgtagcccccctattatctctgcctaccgacatcagggctgggagtttgtcaagaaggccctagaggacaaagattatgtcgctgagcttagcgggttggccgaagtgcagcggaaagccgaggctgctgccggcgatgttgactgggaagaagaggaagaagacacaggggatggagatgacgaaggagtgttgttgtag

SEQ ID NO: 20230 - protein, 691 aa, Muscodor strobelii
  misc_feature: SGI Peptide ID NO. 566822
  misc_feature (358)..(508): Pfam Id: PF00899 Pfam Desc: ThiF family
  misc_feature (4)..(674): NCBI GI: 240247749 Blast Desc: E1-like activating enzyme [Sordaria macrospora]
  misc_feature (4)..(687): NCBI GI: 46137421 Blast Desc: FG10226.1 [Gibberella zeae PH-1]
  misc_feature (4)..(674): NCBI GI: 85100195 Blast Desc: NCU06672 [Neurospora crassa OR74A] gi|62899784|sp|Q871U2.1|ATG7_NEUCR RecName: Full=Autophagy-related protein 7; AltName: Full=Autophagy-related
  misc_feature (4)..(672): NCBI GI: 256731815 Blast Desc: [Nectria haematococca mpVI 77-13-4]
  misc_feature (1)..(674): NCBI GI: 171691997 Blast Desc: protein product [Podospora anserina] gi|170945947|emb|CAP72748.1| protein product [Podospora anserina]
  misc_feature (3)..(685): NCBI GI: 145612667 Blast Desc: MGG_07297 [Magnaporthe grisea 70-15] gi|148887341|sp|Q52CS0.2|ATG7_MAGGR RecName: Full=Autophagy-related protein 7; AltName: Full=Autophagy-related
  misc_feature (3)..(666): NCBI GI: 261351900 Blast Desc: Atg7p [Verticillium albo-atrum VaMs.102]
  misc_feature (4)..(675): NCBI GI: 156055332 Blast Desc: SS1G_05017 [Sclerotinia sclerotiorum 1980] gi|166990625|sp|A7EI75.1|ATG7_SCLS1 RecName: Full=Autophagy-related protein 7; AltName: Full=Autophagy-related
  misc_feature (4)..(685): NCBI GI: 226287510 Blast Desc: autophagy-related protein 7 [Paracoccidioides brasiliensis Pb18]
  misc_feature (4)..(685): NCBI GI: 225557685 Blast Desc: conserved [Ajellomyces capsulatus G186AR]
  misc_feature: Useful for introducing or modulating the production of volatile compounds
MATLKFAPFASEIELPFYSALFASKLDHDKLSDSARPILGLYEPRPGADPDSSVKMQVQASALTSTNVPANAVRAEGILRNTNTMDAFKQVDKVEVLNNAARQIWDAINDGTIYSVPSLLSSYLVLSYADLKKYRMTYWFGFPTLPSDPAWKRSGDIQHLASGESTALVERVGTWRYSVDSREYGFFLAKKVRGRRTSIDLDDGSEDIGFTWEVGSLRDFENHFFVGVPKEDRYIAFVDPSTYEEYPAWPLRNLLMLVRQRYKIKEIQVLCYRDIQSRRHEARSIIMPLTLETEDDLVLTAMPKATGWERNQHNKLTARSVSLAESMDPARLADQSVDLNLKLMKWRISPDLNLDIIKNTKCLLLGAGTLGSYVSRNLMSWGVRKITFVDYGAVSFSNPVRQPLFVYDDCLNGGAPKALKAAEALKQIYPGVESHGEVLSVPMLGHPIVEKTQGEFEKLKSLIDEHDAIFLLMDSRESRWLPTVMGKAAGKIVMNAALGFDTYVVMRHGAESKNQDEATLGCYFCNDVVAPGDSQKDLTLDQQCTVTRPGIAAIASALLVELLTSLLQHPLGHHAPAPVTATTSGQSIDTSDEHALGIVPHQIRGFLNRFQNLVIKGESYPCCSACSPPIISAYRHQGWEFVKKALEDKDYVAELSGLAEVQRKAEAAAGDVDWEEEEEDTGDGDDEGVLL

SEQ ID NO: 20231 - DNA, 4750 bp, Muscodor strobelii
  misc_feature: SGI EST ID NO. CUFF.47718.3
  misc_feature: Variant of the nucleotide sequence at SEQ ID NO 20229
gtgacctttgtctggtgagatcaggtgtcttgaaaatgcatgcgacaggtttcgtagatgtgagatggaatgctttgaaatacgatacttgccagttcgggatcagaggttgacgtatgtaatcttggataaattaaagcgccgaccctagatacatcatggtgtgcagcacttgacgcaggaccgcatacatcatcggtacttggagtttcacttgcagacagacagacgtttagcttgaaccgcccaccttcacacctcattctcatcgcgtcctgcatcctcaataacttcacctcgcgtattctatgccgaaattatctcctcgataatcttctttacttacttatctgtcttttcgaacatcctcaacggcatcaccactgcgtccaccacgaccggcgacctcggcgaccgatagcatcgcttccgtctgaccttttgtgacctgggaccttcggcgcaagcttgcgccgcctgctgggttaccatggccactctcaagtttgcgcctttcgcatccgagatcgagctgcccttctactcggctctttttgcgtccaagcttgaccatgacaagctgagcgactcggcgcgccccatcttgggcttgtacgagcctcgccccggcgcagaccccgacagcagcgtcaagatgcaggtccaggccagcgccctcaccagcacaaatgtgccggcaaacgcagtgcgcgccgagggcatcctcagaaacacaaacaccatggatgccttcaagcaggtagacaaggtcgaggttctcaacaacgccgctcgccagatatgggacgcgatcaacgacggcaccatttactcagtcccctccctactctcgtcatacctcgtcctctcttacgccgacctaaagaaatatcgaatgacctactggtttgggttccctaccctcccttcagaccctgcttggaaaagatccggcgacatccaacatctagcctctggcgagagcacggccttggttgagcgagttggaacctggcgctactccgtcgacagccgagaatacggcttctttctcgccaagaaggtccgaggcagacgaacctcgatagacctcgatgacggctccgaagatatcggattcacctgggaagtcggctcattacgcgatttcgaaaaccatttcttcgttggtgtgcccaaagaagacagatacatcgcctttgtggacccctcgacgtacgaagagtaccccgcgtggccactcaggaatttgttgatgcttgtgcgacagcggtacaagatcaaggagatacaggttctgtgctaccgtgacatacagtcgcgcagacacgaggcacgctccatcatcatgcctcttaccttggagacagaggatgatctggtcttgaccgccatgcctaaggcgacaggatgggagcgaaatcaacacaataagctcacagctagatccgtcagtctggcggagtccatggatcccgcccgtcttgctgaccagtctgtcgatctcaacttgaagttgatgaaatggcggatatcacctgatctcaatctcgatataatcaagaacacaaaatgtctattattaggtgccggtacattaggaagttatgtctcgagaaacctcatgagctggggtgtacgtaaaatcacattcgtcgactatggagccgtgtccttttcgaaccccgtccgacaacctctttttgtgtatgatgattgccttaatgggggcgccccgaaggccctcaaggcggcagaagcattgaagcagatctatccgggtgtagagagccatggtgaggttttgtctgtcccgatgcttgggcatcccatcgtggagaagacccaaggcgaattcgaaaagctcaaatctctgatcgacgagcacgatgctatcttcctacttatggatagccgcgaatctaggtggctcccgactgtgatgggcaaagcggctggaaagattgtcatgaatgcggcacttggtttcgatacttatgtggtcatgagacatggcgccgagtccaagaaccaagacgaagcaactttaggttgctacttctgtaatgatgttgtcgcacctggcgactcgcagaaagacttgaccctcgaccaacagtgtaccgtcacccgaccgggtattgctgcgatcgcatctgctctcttggtcgagcttttgaccagtttattgcagcatccattgggacatcatgctcctgcacctgtcacagcaacgacatcagggcagagtatcgatacaagcgatgagcatgctcttggcattgttcctcaccagattcgaggatttttgaacagatttcaaaacctcgtgatcaaaggggagtcttatccctgctgtagcgcctgtagcccccctattatctctgcctaccgacatcagggctgggagtttgtcaagaaggccctagaggacaaagattatgtcgctgagcttagcgggttggccgaagtgcagcggaaagccgaggctgctgccggcgatgttgactgggaagaagaggaagaagacacaggggatggagatgacgaaggagtgttgttgtagtggaagattctctccgaaagtcatcagatcaggcgacttcgtctgcagaaaagccgtggcatcataaagcggctcaagcactggaagcagcgacctaagtggacgcggatcaactggagcggacgagtcacgtcttcttctaatacgtcttccggatcatcgagccgcgtcgccccagacgtgaatactagcacaccaccaacgacgaccggtggttcgccatcatccacgggcgattcaacacctccaggccaagtggagacgtttggaccgagacccgttgagcttagtgtgacgcctggggaagaggtgcccgatatggacgctctgatctcaatttttgagatcttgaaacaggggccgcctactgcgcattgtgactgatgagctagaggcattcgcttttttagccaattctctcacggttcgtgttttatcaaacgagcttttgtatcgtggcaggcgttcaggttatgaagttgcacggtatctttacgcattggcctgacgagtatcaaggagcacgattggaacgatcgaatcaacatgaatatctggccggcgttcacaccgaactatcgaggcgacactttcggaaacaggcgttgatgaatggatagtcattattagcatagggtactgggtcaaatgcttgctttactgccgaatacctattcttacttcaaatttcttcaccttcctcatcgatttgcatttcaagtgtttcgctgtatcgatagtcatgtatcatagcgctgtaagtcgccatagctcttctatgagatgtgacaaattagcaagggattggacgacgtaagtcaagcccacaaagaagagacctaggaaagctcaacgattggcatgatgatcatcttggaaacgatggctatcacgcagactggacagaacggggagctacatgttgtggaggttcgtagctgatcgatcgtgatgacgccaagcattgcgttaatatcgatgtcgaggtatggggtagagactagtctcagatacgggccgattccaaggctactcaaatcaatgagaatagagagtggtttgtccggtcatgtaatgggaagtaattgccagccttgccatgagggaagcacggaagctgagcgatggccgttagaccaacgagattaaaagcgcgggtaggaaaaagtacactaagtattataggatttcttgacgtggagactcaccgtgaatgatgtccattgtcgcctatcccgaatacacggcacggcctggcacgacggtagtcaaatacgtacgaccaatagacaagtggatcctggtaacacgagctgccgataggcaacctgtcgtctcacggctcttaccaccagacgtagtaggtcttggctgattctccgccctgactttaggcccttggttggatagccgattacaatcaactacataacggcgcgcaacgcgagctggcatgttacttggacattggctcgtcgggcctctatgtcgtttgttttttgaggtaatcagacccgaagggataacctcaacccacaagacagccaaatagtcatcccaaataagcagagacgtcgaacctctcgcggcgccattgttgattcggatgccgagcattcaccggtatatagtagtggacgcggaggtcccgtcgacgcttgggggagcaccccacgcgggttgacactacgtacaatcgcgcatttgcctggcttgcaagcccgcgaccgcccttcgaccataccgagcacagtcagacggcaaaagcgatcgatcgacttctttcgcatgtcggtacttcttgggactcgatgaatgacgaccttaccctgttcgagcttgcgggaggcatggaggatgacgacaacgatgaggaccaggatacgaccatggatatgagaagtgtcgagaagtccctcgacaacgcagtggatagcgaccgcctcaatgaggccatggataggatggatttggactgaggaaggaacgatcgcacgtgatcttgcttatgtagttgggctagtcccgcctgacattagagacaattgacttgaactgtctggaagaagtgacctcgtaaattggagcctttaatcctgtatcagagacaagtaccagtactagcaacagtcaaaggtgccacaatcgtgttctcctctttggcctcaagcactgccatttcag

SEQ ID NO: 20232 - DNA, 942 bp, Muscodor strobelii
  misc_feature: SGI cDNA ID NO. 566823
  misc_feature: Encodes the peptide sequence at SEQ ID NO 20233
atgtctgcgaccaatatggaggagacatgtacgagattatctcaagcatcgctcggaaatattgaattcattttgaatcagaaactccccaccgagcagccgaaatgcacactccttaccctaccacccgagcttaggctcatgatctataagctcgtactgatccaagattccttcgatctctcgcagcaaatctgttacacaacggcacggaatgctcaattcctccgcgtctgtaaattgattcacgaagaagcaaagccagtattttatgaacagaacacgtgggcgttacgaatgtcctgtgattggccaggcatattcttctttcaaaacaaaaccggtcaagatcgagggaggaaacatcatggagacaagtggtctgttgctgcccgcagacgtcagttcaagataagcaagtggtttatcgagttgcaacccggtacaatgtggtattacacaaatgatttcttcaaatacatatttggggacgatactcgcatcgattcgctccatttatctatcgattggaacgcgcctctgagcggtaacgatacgagattaggggaagcgtgccgaaatttggctgagctcggaagcaaaggcaagaaggcgcggaaagttctactgacgggactccccaaggacattgcaaacgacatcatagacaagttatcgatttgtccggagaccgacaaggagaaccaggacacgtatctttacacagattgtttttacgggtcgaactacatggtgaaagacccctgggtgtatgatgctcagataagagccgacactcttcaacaacgacttgcacatgacagacggcaatggctggactggatagtgaaaaggaacgttatgtcatgggtattcgattacattgacctgcgcacgagagagattccaccaaggaggccatattttctcgaatccagttaa

SEQ ID NO: 20233 - protein, 313 aa, Muscodor strobelii
  misc_feature: SGI Peptide ID NO. 566823
MSATNMEETCTRLSQASLGNIEFILNQKLPTEQPKCTLLTLPPELRLMIYKLVLIQDSFDLSQQICYTTARNAQFLRVCKLIHEEAKPVFYEQNTWALRMSCDWPGIFFFQNKTGQDRGRKHHGDKWSVAARRRQFKISKWFIELQPGTMWYYTNDFFKYIFGDDTRIDSLHLSIDWNAPLSGNDTRLGEACRNLAELGSKGKKARKVLLTGLPKDIANDIIDKLSICPETDKENQDTYLYTDCFYGSNYMVKDPWVYDAQIRADTLQQRLAHDRRQWLDWIVKRNVMSWVFDYIDLRTREIPPRRPYFLESS

SEQ ID NO: 20234 - DNA, 220 bp, Muscodor strobelii
  misc_feature: SGI EST ID NO. CUFF.47339.0
  misc_feature: Variant of the nucleotide sequence at SEQ ID NO 20232
tgttgctgcccgcagacgtcagttcaagataagcaagtggtttatcgagttgcaacccggtacaatgtggtattacacaaatgatttcttcaaatacatatttggggacgatactcgcatcgattcgctccatttatctatcgattggaacgcgcctctgagcggtaacgatacgagattaggggaagcgtgccgaaatttggctgagctcggaagcaaa

SEQ ID NO: 20235 - DNA, 1362 bp, Muscodor strobelii
  misc_feature: SGI cDNA ID NO. 566824
  misc_feature: Encodes the peptide sequence at SEQ ID NO 20236
atgccgccgacattcgaggagttagagactgcttgctgtgatgtcatacagatcattaagcaggtccctgaactcgaacacacaaaactctccgtcataggtggactggcgctgtggtattatctacgcgacttcagaccgacaaacaatatcaacttcttgacaaatatctcgacgtcaccaagttcaatgaagaagaagctattagaacggccgaactcgcctttcttcctaagtcagcagattctgttctaccaaagccctagcgggtgggatgtccaaatcgatatcagtccggaatggctttcgccatattttcctcaatcagcacgttctattcacgacataccgtacggcgagataccctacatctccctaacagatctaattgtcttcaagctggactcaagcggtctccgttcaaaccccaccaaaaaggagcgtgatgctcgcgatgccgcagcactagtggaccacgagaccgcgcaacgatcaaccaatccatacacagctctagattcccaaacagaatccaagcctcatcccgacactgaatttgatgccgtcgttcagctttcccctcgacaagagcaagtcgtcgaagaagcactctgcgacgtatctcgctgcggccaccgagagaagagctggtgggaatcacgcctcggtctcacgcagtcgcactccagaaataccactgcacacagagcacacctagaagtcttagacgggaaccgaagcaggtcccactctcgcagtccaagccgtccacactcacgctcggaccccctccccctgacgcgatcaccaagcaacatggacgaccgcatcgccgaagatcccggctcagcatggtactacgagcgattagatcgcgcccacgtcggtctccggcagacgtggagcagtttaacaggatggggcagacgagaaagtaccacggctttgccgccgatcagcggcccttcacgacatggcatcgtgcgcagctcgacttacgctgggtatgaggcgcagaaacgctggtggtgcagcaacgagaatgagaatagactgcggggagaccctaatcatagatcttgcacgatgaatcagccgaagaccagcgcgaagcattactacgcgggcaatgtcatgagtgctactacttcgcccgtcatcgtcgatgcgcctgatagtcaagcgtataaagccgccatgggtctacaaaggggcaagggtaagagagggagtgggaggaggcgagcggggagtgacagtggctatagtagtaacgggaccggcgtcagtgatgaggaggcgttctattatcttgagcctgtgggcagtgcgccgattaatgggggagagggagcttgttga

SEQ ID NO: 20236 - protein, 453 aa, Muscodor strobelii
  misc_feature: SGI Peptide ID NO. 566824
  misc_feature (3)..(224): NCBI GI: 255939219 Blast Desc: Pc15g01590 [Penicillium chrysogenum Wisconsin 54-1255] gi|211585001|emb|CAP83045.1| Pc15g01590 [Penicillium chrysogenum Wisconsin 54-1255]
  misc_feature (3)..(224): NCBI GI: 240111645 Blast Desc: CPC735_021440 [Coccidioides posadasii C735 delta SOWgp]
  misc_feature (3)..(224): NCBI GI: 119180628 Blast Desc: CIMG_08933 [Coccidioides immitis RS]
  misc_feature (4)..(231): NCBI GI: 46111871 Blast Desc: FG02817.1 [Gibberella zeae PH-1]
  misc_feature (4)..(231): NCBI GI: 256721943 Blast Desc: NECHADRAFT_78306 [Nectria haematococca mpVI 77-13-4]
  misc_feature (3)..(224): NCBI GI: 238841850 Blast Desc: conserved [Microsporum canis CBS 113480]
  misc_feature (6)..(224): NCBI GI: 240276390 Blast Desc: conserved [Ajellomyces capsulatus H143]
  misc_feature (1)..(223): NCBI GI: 238841832 Blast Desc: conserved [Microsporum canis CBS 113480]
  misc_feature (72)..(224): NCBI GI: 261195088 Blast Desc: conserved [Ajellomyces dermatitidis SLH14081] gi|239587820|gb|EEQ70463.1| conserved [Ajellomyces dermatitidis SLH14081]
  misc_feature (45)..(156): NCBI GI: 119483942 Blast Desc: NFIA_095970 [Neosartorya fischeri NRRL 181] gi|119410030|gb|EAW19977.1| NFIA_095970 [Neosartorya fischeri NRRL 181]
MPPTFEELETACCDVIQIIKQVPELEHTKLSVIGGLALWYYLRDFRPTNNINFLTNISTSPSSMKKKLLERPNSPFFLSQQILFYQSPSGWDVQIDISPEWLSPYFPQSARSIHDIPYGEIPYISLTDLIVFKLDSSGLRSNPTKKERDARDAAALVDHETAQRSTNPYTALDSQTESKPHPDTEFDAVVQLSPRQEQVVEEALCDVSRCGHREKSWWESRLGLTQSHSRNTTAHRAHLEVLDGNRSRSHSRSPSRPHSRSDPLPLTRSPSNMDDRIAEDPGSAWYYERLDRAHVGLRQTWSSLTGWGRRESTTALPPISGPSRHGIVRSSTYAGYEAQKRWWCSNENENRLRGDPNHRSCTMNQPKTSAKHYYAGNVMSATTSPVIVDAPDSQAYKAAMGLQRGKGKRGSGRRRAGSDSGYSSNGTGVSDEEAFYYLEPVGSAPINGGEGAC

SEQ ID NO: 20237 - DNA, 1233 bp, Muscodor strobelii
  misc_feature: SGI cDNA ID NO. 566825
  misc_feature: Encodes the peptide sequence at SEQ ID NO 20238
atgcgtgtctccaactctgtcctcgccactgcgggcgccttggcctcgctggccactgctgctgagaactacctcggcttcaactcgggcgccatgaagacggacaactcggccaagttcaagtctgacttcttggccgagatgaagacggctcagggcttgaagggcgctcccggcaagttcgacgccgtccgcctctacaccaacatccaggcctactccgagaccgaccccatccaggccttcgacgccgctgtcgagaccaacacgaagctgttgctgggtatctgggcttcgggaactgacagcatcgacaatgagatgaccgccctgaacaacggactgaagaagttcggcaacgacctggccaagctcatcatcggtgtctccattggcagcgaggatctgtaccgtatctccgtcaccggcatcaagaacgaccccgatggagtcggtgccggccccgacgttatcgtcaacttcatcaagcaattcaagagcaagttcgccgactcagacatctctgacgtccccatcggccacgtcgacacctgggatgcctggaccaacggcaccaacaaggccgtcatcgacgcctgcgactggatcggcgtcgacgagtacccctactacgaagacggcaagggtaacgacatcaagaacgccggccacctcttcgacaaggcctacgacgctactatcgccgcggccggaggcaagcaggtctgggtcaccgagacgggctacccctacaccggcatcaagtggggcgatgctgtcgccagcgtcgacaacgccgagtactactggcaggaggtcggctgccgtcgcctcttcaacaagacccccaccttctggtacaacctgcgcgactccaacggtgccaacaagcagagcttcgccatcaccgacaacctctccaccaacgcccgcttcaacttgacctgccccaccaccttcgacaccgatgacaacacctccaccagctcggcgccttccagcactgagactagcactaagaccactggtggcactaccgtcgctacgcccactcccagtggtacttctggatcgagctctggctccggctccgactcgccttctggaacctctggctctggctcggctagcaacaccgcctctcctagtcctactggtgctgcctccaccctcaacactgtcggtggtggcttcttcgctgccctctttggtgctgccattgctctgttgtag

SEQ ID NO: 20238 - protein, 410 aa, Muscodor strobelii
  misc_feature: SGI Peptide ID NO. 566825
  misc_feature (1)..(322): NCBI GI: 171680944 Blast Desc: protein product [Podospora anserina] gi|170940430|emb|CAP65657.1| protein product [Podospora anserina]
  misc_feature (1)..(323): NCBI GI: 261361239 Blast Desc: glucan 1,3-beta-glucosidase [Verticillium albo-atrum VaMs.102]
  misc_feature (22)..(331): NCBI GI: 116191513 Blast Desc: CHGG_05474 [Chaetomium globosum CBS 148.51] gi|88181387|gb|EAQ88855.1| CHGG_05474 [Chaetomium globosum CBS 148.51]
  misc_feature (1)..(359): NCBI GI: 46135701 Blast Desc: FG09366.1 [Gibberella zeae PH-1]
  misc_feature (16)..(338): NCBI GI: 256732293 Blast Desc: NECHADRAFT_5675 [Nectria haematococca mpVI 77-13-4]
  misc_feature (19)..(322): NCBI GI: 85091812 Blast Desc: NCU09175 [Neurospora crassa OR74A] gi|28920483|gb|EAA29849.1| conserved [Neurospora crassa OR74A]
  misc_feature (22)..(323): NCBI GI: 39945414 Blast Desc: MGG_04689 [Magnaporthe grisea 70-15] gi|145011280|gb|EDJ95936.1| MGG_04689 [Magnaporthe grisea 70-15]
  misc_feature (22)..(318): NCBI GI: 209570316 Blast Desc: [Glomerella graminicola]
  misc_feature (25)..(317): NCBI GI: 169621430 Blast Desc: SNOG_13924 [Phaeosphaeria nodorum SN15] gi|160704251|gb|EAT78549.2| SNOG_13924 [Phaeosphaeria nodorum SN15]
  misc_feature (25)..(321): NCBI GI: 189206383 Blast Desc: GPI-anchored cell wall beta-1,3-endoglucanase EglC [Pyrenophora tritici-repentis Pt-1C-BFP] gi|187975619|gb|EDU42245.1| GPI-anchored cell wall EglC
  misc_feature (25)..(275): SWISSPROT Homolog: EC 3.2.1.58 Glucan 1,3-beta-glucosidase
MRVSNSVLATAGALASLATAAENYLGFNSGAMKTDNSAKFKSDFLAEMKTAQGLKGAPGKFDAVRLYTNIQAYSETDPIQAFDAAVETNTKLLLGIWASGTDSIDNEMTALNNGLKKFGNDLAKLIIGVSIGSEDLYRISVTGIKNDPDGVGAGPDVIVNFIKQFKSKFADSDISDVPIGHVDTWDAWTNGTNKAVIDACDWIGVDEYPYYEDGKGNDIKNAGHLFDKAYDATIAAAGGKQVWVTETGYPYTGIKWGDAVASVDNAEYYWQEVGCRRLFNKTPTFWYNLRDSNGANKQSFAITDNLSTNARFNLTCPTTFDTDDNTSTSSAPSSTETSTKTTGGTTVATPTPSGTSGSSSGSGSDSPSGTSGSGSASNTASPSPTGAASTLNTVGGGFFAALFGAAIALL

SEQ ID NO: 20239 - DNA, 732 bp, Muscodor strobelii
  misc_feature: SGI cDNA ID NO. 566826
  misc_feature: Reduced expression when VOC is produced
  misc_feature: Encodes the peptide sequence at SEQ ID NO 20240
atgccgcctagctttatcccgctcgattcatacacaacgaacaacatgcagaacaagatcaagctgcaggtcggagaacgacagttcatcaccacgaaagatactctcatcggggaaagtacctacttcgctgccatgctctcagaccgatggaatgatgctgatgctgatgctaatggtgtctacttcattgactctgaccctgatttattcgtcgaagtacttcgataccttcggtcggggaattaccctctatatttcgatcccgcctcccagacttacgactacgccaaatacacgtcgcttcttggtgaagctcagtacttcggtataaagaaactcgaaacatggataagacaacagtgttatgtcaatgccgtatccattcgatattggatgaaggacataaacctccccaccgagaattttggtctcacgcactgcaagcaggaagccctgttgaaatctacgccaacataccccgcggacagaaagcttcgaataaaagatgatgagtgtgaggtgaactacaaacgacagaagagctggcaaccggggcatattcgacaatataatgtgttgtgcacgcaatatgttttcaatcctgatgtgtgcgtgggcgttatcgctgatgatgatgctcgtgctcgggcggaagaattggccatcgagagaatgaaggcagacattagaaagggacttggcaattttgctgatcatgttcagaagtaa

SEQ ID NO: 20240 - protein, 243 aa, Muscodor strobelii
  misc_feature: SGI Peptide ID NO. 566826
  misc_feature (20)..(117): Pfam Id: PF02214 Pfam Desc: K+ channel tetramerisation domain
  misc_feature (20)..(81): Pfam Id: PF02214 Pfam Desc: K+ channel tetramerisation domain
  misc_feature (2)..(228): NCBI GI: 116200826 Blast Desc: CHGG_10958 [Chaetomium globosum CBS 148.51] gi|88175672|gb|EAQ83140.1| CHGG_10958 [Chaetomium globosum CBS 148.51]
  misc_feature (20)..(127): NCBI GI: 154292565 Blast Desc: BC1G_14806 [Botryotinia fuckeliana B05.10] gi|150845887|gb|EDN21080.1| BC1G_14806 [Botryotinia fuckeliana B05.10]
  misc_feature (3)..(149): NCBI GI: 115437716 Blast Desc: [Aspergillus terreus NIH2624] gi|114188696|gb|EAU30396.1| [Aspergillus terreus NIH2624]
  misc_feature (13)..(139): NCBI GI: 238502757 Blast Desc: conserved [Aspergillus flavus NRRL3357] gi|220691422|gb|EED47770.1| conserved [Aspergillus flavus NRRL3357]
  misc_feature (1)..(130): NCBI GI: 238844541 Blast Desc: conserved [Microsporum canis CBS 113480]
  misc_feature (12)..(130): NCBI GI: 169610922 Blast Desc: SNOG_08570 [Phaeosphaeria nodorum SN15] gi|160702183|gb|EAT83738.2| SNOG_08570 [Phaeosphaeria nodorum SN15]
  misc_feature (18)..(130): NCBI GI: 119176975 Blast Desc: [Coccidioides immitis RS]
  misc_feature (20)..(130): NCBI GI: 39948661 Blast Desc: [Magnaporthe grisea 70-15] gi|145009245|gb|EDJ93956.1| [Magnaporthe grisea 70-15]
  misc_feature (2)..(128): NCBI GI: 171691542 Blast Desc: protein product [Podospora anserina] gi|170945719|emb|CAP71832.1| protein product [Podospora anserina]
  misc_feature (15)..(130): NCBI GI: 119196615 Blast Desc: CIMG_02682 [Coccidioides immitis RS]
  misc_feature: Useful for introducing or modulating the production of volatile compounds
MPPSFIPLDSYTTNNMQNKIKLQVGERQFITTKDTLIGESTYFAAMLSDRWNDADADANGVYFIDSDPDLFVEVLRYLRSGNYPLYFDPASQTYDYAKYTSLLGEAQYFGIKKLETWIRQQCYVNAVSIRYWMKDINLPTENFGLTHCKQEALLKSTPTYPADRKLRIKDDECEVNYKRQKSWQPGHIRQYNVLCTQYVFNPDVCVGVIADDDARARAEELAIERMKADIRKGLGNFADHVQK

SEQ ID NO: 20241 - DNA, 1521 bp, Muscodor strobelii
  misc_feature: SGI cDNA ID NO. 566827
  misc_feature: Elevated expression when VOC is produced
  misc_feature: Encodes the peptide sequence at SEQ ID NO 20242
atggacttcaacaccatttttcgtttcttaggctacgttgtaggcgctttgttggcggcaatcatcgtcaatctactacatcaacaattaccacgcagcaagtccgaaccccctttagttttccactggatacccttcgtcggcaatgcgatccagtacggtctcgatccctgtaaattctacatgcaatgtcgagagaaacacggcgacatattcacattcgttctgttcggacgcaaaatgaccgtgttcttgggtatcaaaggaaacgaattcatccttgatgggaaattacaagatgtcaatgccgaagagatctactcacctttgacaacaccggtcttcggtccaaatattatctatgactgccccaatgctcaattgatggaacagaagaaatttgtcaagttcggcttgagtcaaagtgcactcgagtcctacgttcagttaattgaaaaggaggtcgtcgaatacatcaacactgctcctgccttccaggccgaatcaggaacaatcgatatttccgccataatggcagaaatcaccatctacacagcaagtcgatcgcttcaaggcgccgaagttcgaagcaaaatgaatgcagaattcgccgatttgtaccacgacctcgactatggctttcgacccataaacttcctcatcccatgggcgccactcccgcgaaaccgtagtcgagacatcgcgcgagcaaagatgcacgcggtgtaccgcaacatcatcagcgaccgtcggaagagaggcaagaaggatggggaagcgcctgatatgatatggaacttgatggattgcgtttataagaacggaaacccgctatctgacgctgaaatcgctgatatgatgatcacattgcttatggctggtcaacattcatcttcgtcctcgagtgcttggaccatgttgcggttggcgtcacgtcctgatatcgcggagaaactataccaggagcgattaagtgtgtgcggcaagaaagaactcgagtatatcgacactgagagcctttccctggcgcaaaacgtcattaaagagacgctgcgcgtcaactcttcgatccactccatcatgcgcaaagtcaagaaccctatgccagtgccgagcagcgacttcgtcatcacacctgacaaagtcctcctcgcatcgccgatcgtaacgcacttgagcgaagaatatttcccgaatgcgacgacatgggatccaatgcggtgggaaagagaggcccgttctgagggaagtgatgagacggtcgattatggatatggtgccatctcaaaagctacgcgaagtccttatctgccgttcggggcgggtcgtcatcgttgtattggcgagaaattcgcatatactaatctggtcactattgtctctacgctgaatcatcatttgaagtttgggacggttgatgggaaggagtgggttccgcctacggattacacgtcgttgttctcgagacctagtcagcctgctttgatacggtgggagcgacggtcgccgcgaaagttgtag

SEQ ID NO: 20242 - protein, 506 aa, Muscodor strobelii
  misc_feature: SGI Peptide ID NO. 566827
  misc_feature (38)..(498): Pfam Id: PF00067 Pfam Desc: Cytochrome P450
  misc_feature (12)..(504): NCBI GI: 39945292 Blast Desc: MGG_04628 [Magnaporthe grisea 70-15] gi|145011314|gb|EDJ95970.1| MGG_04628 [Magnaporthe grisea 70-15]
  misc_feature (12)..(501): NCBI GI: 220961900 Blast Desc: cytochrome P450 51A [Gibberella zeae]
  misc_feature (12)..(501): NCBI GI: 220961902 Blast Desc: cytochrome P450 51A [Gibberella zeae]
  misc_feature (12)..(501): NCBI GI: 220961904 Blast Desc: cytochrome P450 51A [Gibberella zeae]
  misc_feature (14)..(501): NCBI GI: 256726129 Blast Desc: [Nectria haematococca mpVI 77-13-4]
  misc_feature (11)..(505): NCBI GI: 238487770 Blast Desc: 14-alpha sterol demethylase Cyp51A [Aspergillus flavus NRRL3357] gi|220700002|gb|EED56341.1| 14-alpha sterol demethylase Cyp51A [Aspergillus flavus NRRL3357]
  misc_feature (12)..(502): NCBI GI: 121706635 Blast Desc: 14-alpha sterol demethylase Cyp51A [Aspergillus clavatus NRRL 1] gi|119399727|gb|EAW10153.1| 14-alpha sterol demethylase Cyp51A [Aspergillus clavatus NRRL 1]
  misc_feature (12)..(501): NCBI GI: 220961908 Blast Desc: cytochrome P450 51A [Gibberella zeae]
  misc_feature (12)..(501): NCBI GI: 220961906 Blast Desc: cytochrome P450 51A [Gibberella zeae]
  misc_feature (11)..(505): NCBI GI: 169769899 Blast Desc: [Aspergillus oryzae RIB40] gi|83767278|dbj|BAE57417.1| protein product [Aspergillus oryzae]
  misc_feature (12)..(502): SWISSPROT Homolog: EC 1.14.13.70 Sterol 14-demethylase
  misc_feature: Useful for introducing or modulating the production of volatile compounds
MDFNTIFRFLGYVVGALLAAIIVNLLHQQLPRSKSEPPLVFHWIPFVGNAIQYGLDPCKFYMQCREKHGDIFTFVLFGRKMTVFLGIKGNEFILDGKLQDVNAEEIYSPLTTPVFGPNIIYDCPNAQLMEQKKFVKFGLSQSALESYVQLIEKEVVEYINTAPAFQAESGTIDISAIMAEITIYTASRSLQGAEVRSKMNAEFADLYHDLDYGFRPINFLIPWAPLPRNRSRDIARAKMHAVYRNIISDRRKRGKKDGEAPDMIWNLMDCVYKNGNPLSDAEIADMMITLLMAGQHSSSSSSAWTMLRLASRPDIAEKLYQERLSVCGKKELEYIDTESLSLAQNVIKETLRVNSSIHSIMRKVKNPMPVPSSDFVITPDKVLLASPIVTHLSEEYFPNATTWDPMRWEREARSEGSDETVDYGYGAISKATRSPYLPFGAGRHRCIGEKFAYTNLVTIVSTLNHHLKFGTVDGKEWVPPTDYTSLFSRPSQPALIRWERRSPRKL

SEQ ID NO: 20243 - DNA, 2841 bp, Muscodor strobelii
  misc_feature: SGI cDNA ID NO. 566828
  misc_feature: Encodes the peptide sequence at SEQ ID NO 20244
atggaaccgaagcttttcagatatcacaagttgcgctacgacaaactgcattttcgccttctacgtctcggtccagagcttagtggtcctatcaaatgcgagctagtcgacgcatttttctacgacgatagtggaacccgacagaccgatcaattgatgccttatgtggccatatctcacagatgggacgcaaagtctacctcgaaaagcaaacacattatgatcggcgacttaacacttcaggtcacagatggaatttattctttgcttatgcatctgcgtgccgccgataataaagacttatggtttggtgccggcggttttttgtggattgatgctttatgtattaatcaagatgatgaaacagaaaaaggacaccagataggactcatgaagaagatatattctcgtgccactaatgttgttgtttggcttggtagcggggttgagggaattgatctttttattgaaattctgggtagagtcaagggacgacttctccctcagacgcgcatggacgtggaacaggcggaaagagagctcaacgtagctatcgattcgataaagacgaacctactggtcaatacgataaatcccgagccattcggtgctggttctcgaactctagaaatgcttctgcgacatgattggttccaaagagtttgggttctgcaagaggttgctaacgcaaagtcggcatttatcctatacggacacagatcaatatcaactcgatattttacattggcagtccgatcaatgctcgataaaatgctacctccacatcagccgaaggtttctgaattgtcccgagcggtcttgaacctgatgcccgggccatttagacaacagacgagcagtactagcctaagcgatctgctagaaatctacgggtctgcgcaggcgactgaggataaggaccgcatttttgctctatttggtttatgtgcagaatccagagaccttcagcagctggcttcttactacgacaagccaacacctgagataattcgggccgtcctcggacatatatactcagcgaagctcgaatctgtgccaccgaagctatgcgactacgcagatatcagatcctttctgaagggtttcaagtccattcgtgaccaacacttcatacagctattcactgaacaagatcactcgctctttgaaattgttttagcttctcgaggatctcgttggcgttttcgagatatctttgaaagagaatcatggatctttgaacagggaggttcagaagtggcagagtccgttgacatcgttttcaaacattgcgtcaactggcctgatcacatatctgacgacttcgctagggccttgaccacagaccaaatactttcgtctattgctacaaataagatcggtggtcttctgatcatgcaagtgctgtgcaagagatgctcaaaacatatctacatcaacaagagatttataagcaacttggctcagaacacgggatgtggagcacaaattatcaagaaagttgcatcgtacatcacagacgaaatttatagtctgattattcgagcgcgatgggacaggccggcgcttattcgaactattccggctgagaaaatgactcgaaccgagagaattatgatcgagattatccgacagaataatctggaattactggatgtcattccatcatcagaactggtattattgacggaaagactaatgcaggagatcatcttttcgcgacgattagatctactgaaggcaattccatctgaaaggttgatctgtaacaagtctatcatgctagcattgataatcaatcaaggcgttggagtcaacatgctcgatataatccctcgggcaatatggccgttgccacgagaatctatggttgctatggtcggaggctgtgccgaagagatccaaattttcatgtcatccactaaagacatggatattgcccttccaggtgtactatcgttaaagacttgggccacaaaccgttacagccgggacataattcaaacgatactccgcttcccaaatgtcactctgcactttgatcctggagaattagcgtcatgcggctcatctcttgcaggcctgggttacatgagttcatgctcacaacgaatgtgtattgtgaaaaagtttgcccctcctagttgcaattgtacagggaccagactcgagtggaataagatcaagctcagcaaaagtgacaacctgctttcatttggcgacctcagccctacaatcagcgacgtttttgatatcgcaagaacgattctggattccgatgagatttcctccgaaaacacgctttctcaggagcagactgtacctgatcttcttacatacttggagcaagatgataggtggatatcttcagactctcctatcgtctcgcgacaggaccactggaacatggctgaagaactgtcgatatcctgccctcgaccaatctccgcgttaacattgggatggacacccctgcacttagcagccggacatggagatcacgagattgtaaacatattgacgaggcacggtatgcatagctgtagagcctggtttggatggacaccattgcacgttgcggccatgagaggacattcgagagttatagcagagctagtaacgttaggggcggagtctgaatcaacaaccatttttggacaaacgcccctgtatctggcagccgccgcagatcaagtcgctgcagttcaaaccctgcttgacttcaaagccaacctcaaagctcgatgtattcatgcattgttaccagaggacatagcgatgatgacaaattcctggaatgcttatcgctttttgaaacagtggcgatttgagcacaagtaa

SEQ ID NO: 20244 - protein, 946 aa, Muscodor strobelii
  misc_feature: SGI Peptide ID NO. 566828
  misc_feature (852)..(884): Pfam Id: PF00023 Pfam Desc: Ankyrin repeat
  misc_feature (55)..(226): Pfam Id: PF06985 Pfam Desc: Heterokaryon incompatibility protein (HET)
  misc_feature (820)..(844): Pfam Id: PF00023 Pfam Desc: Ankyrin repeat
  misc_feature (885)..(917): Pfam Id: PF00023 Pfam Desc: Ankyrin repeat
  misc_feature (5)..(397): NCBI GI: 189198515 Blast Desc: ankyrin repeat and SAM domain containing protein 6 [Pyrenophora tritici-repentis Pt-1C-BFP] gi|187981543|gb|EDU48169.1| ankyrin repeat and SAM domain protein
  misc_feature (6)..(348): NCBI GI: 169781862 Blast Desc: [Aspergillus oryzae RIB40] gi|83774136|dbj|BAE64261.1| protein product [Aspergillus oryzae]
  misc_feature (6)..(353): NCBI GI: 171688850 Blast Desc: protein product [Podospora anserina] gi|170944387|emb|CAP70497.1| protein product [Podospora anserina]
  misc_feature (6)..(348): NCBI GI: 238498688 Blast Desc: conserved [Aspergillus flavus NRRL3357] gi|220693853|gb|EED50198.1| conserved [Aspergillus flavus NRRL3357]
  misc_feature (6)..(377): NCBI GI: 171683161 Blast Desc: protein product [Podospora anserina] gi|170941540|emb|CAP67192.1| protein product [Podospora anserina]
  misc_feature (5)..(348): NCBI GI: 46109686 Blast Desc: FG01725.1 [Gibberella zeae PH-1]
  misc_feature (4)..(348): NCBI GI: 39942670 Blast Desc: MGG_03415 [Magnaporthe grisea 70-15] gi|145010046|gb|EDJ94702.1| MGG_03415 [Magnaporthe grisea 70-15]
  misc_feature (5)..(348): NCBI GI: 256730482 Blast Desc: NECHADRAFT_30322 [Nectria haematococca mpVI 77-13-4]
  misc_feature (6)..(348): NCBI GI: 171690662 Blast Desc: protein product [Podospora anserina] gi|170945279|emb|CAP71390.1| protein product [Podospora anserina]
  misc_feature (6)..(346): NCBI GI: 238483469 Blast Desc: conserved [Aspergillus flavus NRRL3357] gi|220701023|gb|EED57361.1| conserved [Aspergillus flavus NRRL3357]
MEPKLFRYHKLRYDKLHFRLLRLGPELSGPIKCELVDAFFYDDSGTRQTDQLMPYVAISHRWDAKSTSKSKHIMIGDLTLQVTDGIYSLLMHLRAADNKDLWFGAGGFLWIDALCINQDDETEKGHQIGLMKKIYSRATNVVVWLGSGVEGIDLFIEILGRVKGRLLPQTRMDVEQAERELNVAIDSIKTNLLVNTINPEPFGAGSRTLEMLLRHDWFQRVWVLQEVANAKSAFILYGHRSISTRYFTLAVRSMLDKMLPPHQPKVSELSRAVLNLMPGPFRQQTSSTSLSDLLEIYGSAQATEDKDRIFALFGLCAESRDLQQLASYYDKPTPEIIRAVLGHIYSAKLESVPPKLCDYADIRSFLKGFKSIRDQHFIQLFTEQDHSLFEIVLASRGSRWRFRDIFERESWIFEQGGSEVAESVDIVFKHCVNWPDHISDDFARALTTDQILSSIATNKIGGLLIMQVLCKRCSKHIYINKRFISNLAQNTGCGAQIIKKVASYITDEIYSLIIRARWDRPALIRTIPAEKMTRTERIMIEIIRQNNLELLDVIPSSELVLLTERLMQEIIFSRRLDLLKAIPSERLICNKSIMLALIINQGVGVNMLDIIPRAIWPLPRESMVAMVGGCAEEIQIFMSSTKDMDIALPGVLSLKTWATNRYSRDIIQTILRFPNVTLHFDPGELASCGSSLAGLGYMSSCSQRMCIVKKFAPPSCNCTGTRLEWNKIKLSKSDNLLSFGDLSPTISDVFDIARTILDSDEISSENTLSQEQTVPDLLTYLEQDDRWISSDSPIVSRQDHWNMAEELSISCPRPISALTLGWTPLHLAAGHGDHEIVNILTRHGMHSCRAWFGWTPLHVAAMRGHSRVIAELVTLGAESESTTIFGQTPLYLAAAADQVAAVQTLLDFKANLKARCIHALLPEDIAMMTNSWNAYRFLKQWRFEHK

SEQ ID NO: 20245 - DNA, 428 bp, Muscodor strobelii
  misc_feature: SGI EST ID NO. CUFF.47357.0
  misc_feature: Variant of the nucleotide sequence at SEQ ID NO 20243
cgctttctcaggagcagactgtacctgatcttcttacatacttggagcaagatgataggtggatatcttcagactctcctatcgtctcgcgacaggaccactggaacatggctgaagaactgtcgatatcctgccctcgaccaatctccgcgttaacattgggatggacacccctgcacttagcagccggacatggagatcacgagattgtaaacatattgacgaggcacggtatgcatagctgtagagcctggtttggatggacaccattgcacgttgcggccatgagaggacattcgagagttatagcagagctagtaacgttaggggcggagtctgaatcaacaaccatttttggacaaacgcccctgtatctggcagccgccgcagatcaagtcgctgcagttcaaaccctgcttgacttcaaa

SEQ ID NO: 20246 - DNA, 588 bp, Muscodor strobelii
  misc_feature: SGI cDNA ID NO. 566829
  misc_feature: Encodes the peptide sequence at SEQ ID NO 20247
atgtcgcgtcggcgtgtcatgcgtctcaccgcattggttcccaatgcaggtgtggtgtatcgcactgatggccgaatcaccagcaccaatgagtacgaccacgctattcgcctagcactgacctcccacggtcgcgacaccagagccctggtggacgaggccttcaccgagatgatgaccatcgctgcaagtgacgagaacgatcatataatttccaacttctgcgacgctctgcgtccacgcgtgtcttgggccgctaccgtcgctcccgccgcgttcgcaagcctcttcgtgaatctcatccgagcacgaatggcctatctcgacttcccccgacgcccgcttgataccgcacagcattgccaagttgcgaaagctgtcgatgcatttttcaagttcattggcaacgattgggacactcttctagtcgatttcgacctatttgagattccggagtcggacgaagaggaggaggataacgccggcattgactttaccaaagtcaccgaggtcatagagcaggttagtcatgatctcgatacgaaggacatgacacaagacatgcgcaatctgggtttgagcgagtga

SEQ ID NO: 20247 - protein, 195 aa, Muscodor strobelii
  misc_feature: SGI Peptide ID NO. 566829
MSRRRVMRLTALVPNAGVVYRTDGRITSTNEYDHAIRLALTSHGRDTRALVDEAFTEMMTIAASDENDHIISNFCDALRPRVSWAATVAPAAFASLFVNLIRARMAYLDFPRRPLDTAQHCQVAKAVDAFFKFIGNDWDTLLVDFDLFEIPESDEEEEDNAGIDFTKVTEVIEQVSHDLDTKDMTQDMRNLGLSE

SEQ ID NO: 20248 - DNA, 603 bp, Muscodor strobelii
  misc_feature: SGI cDNA ID NO. 566830
  misc_feature: Encodes the peptide sequence at SEQ ID NO 20249
atggcaccctcaaagcatctcaatgttttgatgccgaaagccggctataagtactcgactacaggccgaatcacgaagcgcaatgagcacgacaaagtagttcgcgacgcattggacgccggtggttataactcgcgccctggcgtcgaacaaggcatcgcaatcgtcatgagtctcgccgccagtgatgagaaggatcttgccttggtaaacctctgtgatcgcctcaaggcccgtgtcgcctgggccgcgactattccgtccaatgtgttctgctctttcttcgtcgccgtcatggaggcccgcagagcttggcatgaaaacccgacatacccctacgacatcagtgtccatggcgatgccgccaaggcaatcgataagttccttggcaaaatcggtgaagaattttgggacatgatggacggtgagcaaaagctgctagagatcgtcggcggtctcgacgacgacgaggatgaagatgaggacggtgccgatgtggatatggacatgtcggacatgaaaaaagccatcgatgaagttaacgatggtatcatcgcggacgatatggccaacgacatggagaaaatggatctcgacgattag

SEQ ID NO: 20249 - protein, 200 aa, Muscodor strobelii
  misc_feature: SGI Peptide ID NO. 566830
  misc_feature (81)..(194): NCBI GI: 171684225 Blast Desc: protein product [Podospora anserina] gi|170942073|emb|CAP67725.1| protein product [Podospora anserina]
MAPSKHLNVLMPKAGYKYSTTGRITKRNEHDKVVRDALDAGGYNSRPGVEQGIAIVMSLAASDEKDLALVNLCDRLKARVAWAATIPSNVFCSFFVAVMEARRAWHENPTYPYDISVHGDAAKAIDKFLGKIGEEFWDMMDGEQKLLEIVGGLDDDEDEDEDGADVDMDMSDMKKAIDEVNDGIIADDMANDMEKMDLDD

SEQ ID NO: 20250 - DNA, 2049 bp, Muscodor strobelii
  misc_feature: SGI cDNA ID NO. 566831
  misc_feature: Encodes the peptide sequence at SEQ ID NO 20251
atgtcgcattcgcgtctgggattccgagacacgttgcggagcatccgagcatctgtcctaggccgaagctattcccagaggttttcctatcgaactcttgctggccgcgagatacgaattgtcgagcttcatgctggagagtgcgatgagccactcaacattagcctccatcatgcaaggtttgaagccaacgaggattacgaaaacccgatcatcccacactatgaagcgctttcttacgtttgggggtcgcgagagaacgctgggcgggttatcgttggtgaatacgagatagaaattacgcataatctgactatcgccctcaaaaatctgcgcctccccagtcgatccagattcatgtggattgatgctctgagtatcaaccagtccgatgaggttgaaaagggaccatatgtggcaatgatgggggagatctatcgtcatgctgcgagcgtggtcgtttggctcggtgaagatgaaaacgaggtcgttcggggactaaagctcttgagctggttggatacccaggtagagataagcgacgatttcaaagtcattgaggcagccacgcaaagctcaacgtccggaagcatcgataccaccatcgctgacaggagcgtgcctctgccatttgacggtgccgatttgctctcgctctaccacttattctgctgtccctggtttgacagactctggatccgacaggaaatatccttagcgagaccagacaacgctgtcgtactctgtggacagtactcgatgccttggctcatctttcggagggctctggtactttgctgcttgaagcctccaaacccaagctttctcaacagggaggagtttgtagcgcgccggaaccatgtctggggtgtcgtattccggggctggacaagcacaatgccgctactacgggaaccgtatggggacgctaattgcgaagacccccgtgatagaatctatgccatcttgagaatggatagcgacgcacggcgtctcgacattgtacctgactacgtgaatgtaaagtcacaccttgacttgtatgaagatgttgcgagacaggctatcagtgtgtttagatgtctcgatattctgtcggaatgcgagctctccagcactccgttaaggaaagccaacggcgcccacgtaccgacttgggttccagactggtcaacaggcttcccttatatcacgtcgctgcgtctttttgagcaatatgcatcggcttgtttcgctgcgccaagtttcccaatcgtggagggtcgattgcgcgttgtcgccgtgccgattgacaacatacgggaagtttatgcgcacgagctgacagcacagagctcgtcaaagaagatcttatctaatatctcgactcttgcatcatcactgcaactagatgaagagtatcccctcggcggcagcgtacttgaagcgtatacctcgactgtgatggcatctacctatacggatttgaccattgacattcgtcatgacttgcctgatcgagaagttgctaaaaactttgtcaaaaaaatcatcttgacaccgtcgcagtatgagggagaagatgattctggcgtagagatatcagccgaagaacgtaaagtggcaaatcaaatttatagccggctcattgggcgcaatgtcataatgacaaaatcgggttatatgggattggcaactagatccgcagctattaacgacgaagtttgcgttatactcggctgccatgtacccatgatacttcggcgtgttgatgaagacaagaggctcgttgttggaccgtgccatctagagggcttctcaagtggcgatgctgtcttaggtccgttccctgacggtgtacggcggaaagttggtcacaattgtcagttctttaccgataagtcaggcagctgcacaacgattgaccctcgtctcgaagcatggaaagaactcgacgagcccaacattcctgaactcattgagggccattacaggtactttttcgaaaccgatgtcaatgacttaagacgacacggcattgaaaaagctagatattttgatttagtgtaa

SEQ ID NO: 20251 - protein, 682 aa, Muscodor strobelii
  misc_feature: SGI Peptide ID NO. 566831
  misc_feature (75)..(236): Pfam Id: PF06985 Pfam Desc: Heterokaryon incompatibility protein (HET)
  misc_feature (75)..(163): Pfam Id: PF06985 Pfam Desc: Heterokaryon incompatibility protein (HET)
  misc_feature (27)..(610): NCBI GI: 256730222 Blast Desc: NECHADRAFT_82497 [Nectria haematococca mpVI 77-13-4]
  misc_feature (129)..(677): NCBI GI: 261353850 Blast Desc: conserved [Verticillium albo-atrum VaMs.102]
  misc_feature (28)..(639): NCBI GI: 171678935 Blast Desc: protein product [Podospora anserina] gi|170937538|emb|CAP62196.1| protein product [Podospora anserina]
  misc_feature (58)..(659): NCBI GI: 154311024 Blast Desc: BC1G_06630 [Botryotinia fuckeliana B05.10] gi|150851034|gb|EDN26227.1| BC1G_06630 [Botryotinia fuckeliana B05.10]
  misc_feature (28)..(640): NCBI GI: 256719970 Blast Desc: NECHADRAFT_98482 [Nectria haematococca mpVI 77-13-4]
  misc_feature (70)..(614): NCBI GI: 115492481 Blast Desc: [Aspergillus terreus NIH2624] gi|114197728|gb|EAU39428.1| [Aspergillus terreus NIH2624]
  misc_feature (73)..(638): NCBI GI: 46139411 Blast Desc: FG11220.1 [Gibberella zeae PH-1]
  misc_feature (28)..(638): NCBI GI: 256727220 Blast Desc: NECHADRAFT_32743 [Nectria haematococca mpVI 77-13-4]
  misc_feature (28)..(594): NCBI GI: 256722966 Blast Desc: NECHADRAFT_86875 [Nectria haematococca mpVI 77-13-4]
  misc_feature (70)..(642): NCBI GI: 39974569 Blast Desc: MGG_00569 [Magnaporthe grisea 70-15] gi|145018530|gb|EDK02809.1| MGG_00569 [Magnaporthe grisea 70-15]
MSHSRLGFRDTLRSIRASVLGRSYSQRFSYRTLAGREIRIVELHAGECDEPLNISLHHARFEANEDYENPIIPHYEALSYVWGSRENAGRVIVGEYEIEITHNLTIALKNLRLPSRSRFMWIDALSINQSDEVEKGPYVAMMGEIYRHAASVVVWLGEDENEVVRGLKLLSWLDTQVEISDDFKVIEAATQSSTSGSIDTTIADRSVPLPFDGADLLSLYHLFCCPWFDRLWIRQEISLARPDNAVVLCGQYSMPWLIFRRALVLCCLKPPNPSFLNREEFVARRNHVWGVVFRGWTSTMPLLREPYGDANCEDPRDRIYAILRMDSDARRLDIVPDYVNVKSHLDLYEDVARQAISVFRCLDILSECELSSTPLRKANGAHVPTWVPDWSTGFPYITSLRLFEQYASACFAAPSFPIVEGRLRVVAVPIDNIREVYAHELTAQSSSKKILSNISTLASSLQLDEEYPLGGSVLEAYTSTVMASTYTDLTIDIRHDLPDREVAKNFVKKIILTPSQYEGEDDSGVEISAEERKVANQIYSRLIGRNVIMTKSGYMGLATRSAAINDEVCVILGCHVPMILRRVDEDKRLVVGPCHLEGFSSGDAVLGPFPDGVRRKVGHNCQFFTDKSGSCTTIDPRLEAWKELDEPNIPELIEGHYRYFFETDVNDLRRHGIEKARYFDLV

SEQ ID NO: 20252 - DNA, 1990 bp, Muscodor strobelii
  misc_feature: SGI EST ID NO. CUFF.47399.0
  misc_feature: Variant of the nucleotide sequence at SEQ ID NO 20250
ttcctatcgaactcttgctggccgcgagatacgaattgtcgagcttcatgctggagagtgcgatgagccactcaacattagcctccatcatgcaaggtttgaagccaacgaggattacgaaaacccgatcatcccacactatgaagcgctttcttacgtttgggggtcgcgagagaacgctgggcgggttatcgttggtgaatacgagatagaaattacgcataatctgactatcgccctcaaaaatctgcgcctccccagtcgatccagattcatgtggattgatgctctgagtatcaaccagtccgatgaggttgaaaagggaccatatgtggcaatgatgggggagatctatcgtcatgctgcgagcgtggtcgtttggctcggtgaagatgaaaacgaggtcgttcggggactaaagctcttgagctggttggatacccaggtagagataagcgacgatttcaaagtcattgaggcagccacgcaaagctcaacgtccggaagcatcgataccaccatcgctgacaggagcgtgcctctgccatttgacggtgccgatttgctctcgctctaccacttattctgctgtccctggtttgacagactctggatccgacaggaaatatccttagcgagaccagacaacgctgtcgtactctgtggacagtactcgatgccttggctcatctttcggagggctctggtactttgctgcttgaagcctccaaacccaagctttctcaacagggaggagtttgtagcgcgccggaaccatgtctggggtgtcgtattccggggctggacaagcacaatgccgctactacgggaaccgtatggggacgctaattgcgaagacccccgtgatagaatctatgccatcttgagaatggatagcgacgcacggcgtctcgacattgtacctgactacgtgaatgtaaagtcacaccttgacttgtatgaagatgttgcgagacaggctatcagtgtgtttagatgtctcgatattctgtcggaatgcgagctctccagcactccgttaaggaaagccaacggcgcccacgtaccgacttgggttccagactggtcaacaggcttcccttatatcacgtcgctgcgtctttttgagcaatatgcatcggcttgtttcgctgcgccaagtttcccaatcgtggagggtcgattgcgcgttgtcgccgtgccgattgacaacatacgggaagtttatgcgcacgagctgacagcacagagctcgtcaaagaagatcttatctaatatctcgactcttgcatcatcactgcaactagatgaagagtatcccctcggcggcagcgtacttgaagcgtatacctcgactgtgatggcatctacctatacggatttgaccattgacattcgtcatgacttgcctgatcgagaagttgctaaaaactttgtcaaaaaaatcatcttgacaccgtcgcagtatgagggagaagatgattctggcgtagagatatcagccgaagaacgtaaagtggcaaatcaaatttatagccggctcattgggcgcaatgtcataatgacaaaatcgggttatatgggattggcaactagatccgcagctattaacgacgaagtttgcgttatactcggctgccatgtacccatgatacttcggcgtgttgatgaagacaagaggctcgttgttggaccgtgccatctagagggcttctcaagtggcgatgctgtcttaggtccgttccctgacggtgtacggcggaaagttggtcacaattgtcagttctttaccgataagtcaggcagctgcacaacgattgaccctcgtctcgaagcatggaaagaactcgacgagcccaacattcctgaactcattgagggccattacaggtactttttcgaaaccgatgtcaatgacttaagacgacacggcattgaaaaagctagatattttgatttagtgtaatagaaacgaactcgtcagaacgcc

SEQ ID NO: 20253 - DNA, 1956 bp, Muscodor strobelii
  misc_feature: SGI cDNA ID NO. 566832
  misc_feature: Elevated expression when VOC is produced
  misc_feature: Encodes the peptide sequence at SEQ ID NO 20254
atgccagacaagaaagccaaggccaaacccccgcccaacgaaacggtcaccttcagctcaggttcgcacgatggtgctcctgaccttcgactactgcattacaacgacgtataccatgtcgacgcgtcttctagcgagcctgtaggtggtgctgcgaggttcatgaccctcatagaccattatcgcaatggcgatcagtttcatggacagcccgatctgctcacgttcttctcgggcgacgctttcaatcccagcttagaaagttccgtcaccaaaggtgaccacatgattccgttgttgaatgacattgggaccgatgctgctgctctggggaaccacgaccttgacttcggtgttcgaaagtttagaaacttagcatcaaagtgccacttcccatggctcatcgctaacgttctcgatcccgcccttggagatagcgttccaattggcaactgcaaaaagacacatatgatcacgtcgtccaatgactttaagattggtctcataggcctaggtgagcgagaatggctcgccactatcaacagccttccacccgatctcatttacaagtcagcaagtgagacagcaaaggagctggtcccacaactgcgcgccgaaggagccgacatcgtcatcgccattacgcacatgcgagagcctaacgataataagctcgccgaacaaactgacggcataatagacatcatattaggcggccacgatcattattacaatcacagttttattaaaggcactcatgtgttaaggtcgggcaccgatttcaagcaattgagctatatagaggcaagacagaagacagacaagtccggcaagtgggatatcgacattgttcgtcgagatgctacgtccgatattgcagagcatgaggccacaaccaagctggtcgaaaagctgacagctagcctcaagtcaacactgcaaaagccaattggctacacagccgcgcctttagacgcacgcttcagaacggtccgactcaaggaaagtaatatcggcaatttagtctgcgacatcatgcgctgttattacgatggcgattgtaccttaatggcatcaggcacaattcgaggcgatcagatctacccacccggtcccgttttgttgaaggacatactaagctgcttccccttcgaagaccctgtcgttgtcattaaagttaccggacaagaaatttgggacgctcttgagaactcgctctcgcaataccccgcgcttgaaggacgcttccctcaagtatctaacatcaaattcgaattcgacgcccgaaaaccgcctcactcgcgcatcgtttctgctactatcggtgataacccgattgatatgttgaagaaatacgtcctcgtcactcgtggctacatgggccgcggtaaagacggctatgatagtctccttgtacaatcagagggtggcagcgcagaagagatagtgtcagaagaaaatggaatactcatctcaatgatgttgcgccagtacttcatgtcacttcgcgtgatgggaaagtggaagcattggggcaaaagcatgggtcgacactgggaccaagtcacgagcaaagttggggctaatcatccacaatattcggcctcgccaacaagtccaaccagtgcgaaaactccaaagacctcaagaaatagcgggtgggagcagtggacaccggaacgaatacgtgaacgaagggctagcgttacggctagggttgaggatacggatagcgaagacgatgaaggcactgaggcagatcgcaacactgtggagtctctcgatcgcgaaatgcagacaatgcgccgtgtctttactaagtgggctcgcattgcgggtgtcgagtgtaaggtgaccgacgagctcaaagagggtgagtttgaggtggactggactcgagcgatcgcacctagaattgaaggcaggatcgtatgtttagggggtggcgtttcatag

SEQ ID NO: 20254 - protein, 651 aa, Muscodor strobelii
  misc_feature: SGI Peptide ID NO. 566832
  misc_feature (316)..(472): Pfam Id: PF02872 Pfam Desc: 5'-nucleotidase, C-terminal domain
  misc_feature (29)..(244): Pfam Id: PF00149 Pfam Desc: Calcineurin-like phosphoesterase
  misc_feature (17)..(647): NCBI GI: 145602783 Blast Desc: MGG_09866 [Magnaporthe grisea 70-15] gi|145011172|gb|EDJ95828.1| MGG_09866 [Magnaporthe grisea 70-15]
  misc_feature (6)..(647): NCBI GI: 171676668 Blast Desc: protein product [Podospora anserina] gi|170936401|emb|CAP61058.1| protein product [Podospora anserina]
  misc_feature (15)..(643): NCBI GI: 116197258 Blast Desc: CHGG_05227 [Chaetomium globosum CBS 148.51] gi|88181140|gb|EAQ88608.1| CHGG_05227 [Chaetomium globosum CBS 148.51]
  misc_feature (6)..(648): NCBI GI: 85109547 Blast Desc: NCU07590 [Neurospora crassa OR74A] gi|28924616|gb|EAA33734.1| NCU07590 [Neurospora crassa OR74A]
  misc_feature (19)..(650): NCBI GI: 189192915 Blast Desc: ser/Thr protein phosphatase family protein [Pyrenophora tritici-repentis Pt-1C-BFP] gi|187978360|gb|EDU44986.1| ser/Thr protein phosphatase family
  misc_feature (15)..(644): NCBI GI: 238844671 Blast Desc: 5'-nucleotidase [Microsporum canis CBS 113480]
  misc_feature (15)..(645): NCBI GI: 255946620 Blast Desc: Pc22g00320 [Penicillium chrysogenum Wisconsin 54-1255] gi|211591094|emb|CAP97320.1| Pc22g00320 [Penicillium chrysogenum Wisconsin 54-1255]
  misc_feature (15)..(644): NCBI GI: 119196997 Blast Desc: CIMG_02873 [Coccidioides immitis RS]
  misc_feature (15)..(644): NCBI GI: 240110723 Blast Desc: calcineurin-like phosphoesterase, [Coccidioides posadasii C735 delta SOWgp]
  misc_feature (7)..(647): NCBI GI: 169606788 Blast Desc: SNOG_06443 [Phaeosphaeria nodorum SN15] gi|111065154|gb|EAT86274.1| SNOG_06443 [Phaeosphaeria nodorum SN15]
  misc_feature (29)..(470): SWISSPROT Homolog: EC 3.1.3.5 5'-nucleotidase
  misc_feature: Useful for introducing or modulating the production of volatile compounds
MPDKKAKAKPPPNETVTFSSGSHDGAPDLRLLHYNDVYHVDASSSEPVGGAARFMTLIDHYRNGDQFHGQPDLLTFFSGDAFNPSLESSVTKGDHMIPLLNDIGTDAAALGNHDLDFGVRKFRNLASKCHFPWLIANVLDPALGDSVPIGNCKKTHMITSSNDFKIGLIGLGEREWLATINSLPPDLIYKSASETAKELVPQLRAEGADIVIAITHMREPNDNKLAEQTDGIIDIILGGHDHYYNHSFIKGTHVLRSGTDFKQLSYIEARQKTDKSGKWDIDIVRRDATSDIAEHEATTKLVEKLTASLKSTLQKPIGYTAAPLDARFRTVRLKESNIGNLVCDIMRCYYDGDCTLMASGTIRGDQIYPPGPVLLKDILSCFPFEDPVVVIKVTGQEIWDALENSLSQYPALEGRFPQVSNIKFEFDARKPPHSRIVSATIGDNPIDMLKKYVLVTRGYMGRGKDGYDSLLVQSEGGSAEEIVSEENGILISMMLRQYFMSLRVMGKWKHWGKSMGRHWDQVTSKVGANHPQYSASPTSPTSAKTPKTSRNSGWEQWTPERIRERRASVTARVEDTDSEDDEGTEADRNTVESLDREMQTMRRVFTKWARIAGVECKVTDELKEGEFEVDWTRAIAPRIEGRIVCLGGGVS

SEQ ID NO: 20255 - DNA, 2730 bp, Muscodor strobelii
  misc_feature: SGI EST ID NO. CUFF.47408.0
  misc_feature: Variant of the nucleotide sequence at SEQ ID NO 20253
acgacactaacttgatgagatctagatacctacctaggtacctacctagtctttttcgccccttaccgcttttgtgaaagctagcacctccgcgtaccgcgccaacggtgtcactcaaatctggggatatcgtgtctaatgctcttccagtgtcccatgttcatcaactcagttcgcgtgagacgcacatcgatgggcaacacccatttggagcaagtcaatgcttgttcgtaggtgcttgatggggcagtgacctggcggggcacctcgcaggttgttcctggtgcctgagcaactgatcagatttccccacattcacgataaggtacctaaaggacgatttagacggtgaaacatgaaccagcaatgccagctcatcttgaccgccaacaaaactctcaaagaattgatttcctatcatagaatatatctcgcgaatcttactttgagaacttagacctttaatcaattatcggcttccttagaccctcatttctgacagtattttcaccatgccagacaagaaagccaaggccaaacccccgcccaacgaaacggtcaccttcagctcaggttcgcacgatggtgctcctgaccttcgactactgcattacaacgacgtataccatgtcgacgcgtcttctagcgagcctgtaggtggtgctgcgaggttcatgaccctcatagaccattatcgcaatggcgatcagtttcatggacagcccgatctgctcacgttcttctcgggcgacgctttcaatcccagcttagaaagttccgtcaccaaaggtgaccacatgattccgttgttgaatgacattgggaccgatgctgctgctctggggaaccacgaccttgacttcggtgttcgaaagtttagaaacttagcatcaaagtgccacttcccatggctcatcgctaacgttctcgatcccgcccttggagatagcgttccaattggcaactgcaaaaagacacatatgatcacgtcgtccaatgactttaagattggtctcataggcctaggtgagcgagaatggctcgccactatcaacagccttccacccgatctcatttacaagtcagcaagtgagacagcaaaggagctggtcccacaactgcgcgccgaaggagccgacatcgtcatcgccattacgcacatgcgagagcctaacgataataagctcgccgaacaaactgacggcataatagacatcatattaggcggccacgatcattattacaatcacagttttattaaaggcactcatgtgttaaggtcgggcaccgatttcaagcaattgagctatatagaggcaagacagaagacagacaagtccggcaagtgggatatcgacattgttcgtcgagatgctacgtccgatattgcagagcatgaggccacaaccaagctggtcgaaaagctgacagctagcctcaagtcaacactgcaaaagccaattggctacacagccgcgcctttagacgcacgcttcagaacggtccgactcaaggaaagtaatatcggcaatttagtctgcgacatcatgcgctgttattacgatggcgattgtaccttaatggcatcaggcacaattcgaggcgatcagatctacccacccggtcccgttttgttgaaggacatactaagctgcttccccttcgaagaccctgtcgttgtcattaaagttaccggacaagaaatttgggacgctcttgagaactcgctctcgcaataccccgcgcttgaaggacgcttccctcaagtatctaacatcaaattcgaattcgacgcccgaaaaccgcctcactcgcgcatcgtttctgctactatcggtgataacccgattgatatgttgaagaaatacgtcctcgtcactcgtggctacatgggccgcggtaaagacggctatgatagtctccttgtacaatcagagggtggcagcgcagaagagatagtgtcagaagaaaatggaatactcatctcaatgatgttgcgccagtacttcatgtcacttcgcgtgatgggaaagtggaagcattggggcaaaagcatgggtcgacactgggaccaagtcacgagcaaagttggggctaatcatccacaatattcggcctcgccaacaagtccaaccagtgcgaaaactccaaagacctcaagaaatagcgggtgggagcagtggacaccggaacgaatacgtgaacgaagggctagcgttacggctagggttgaggatacggatagcgaagacgatgaaggcactgaggcagatcgcaacactgtggagtctctcgatcgcgaaatgcagacaatgcgccgtgtctttactaagtgggctcgcattgcgggtgtcgagtgtaaggtgaccgacgagctcaaagagggtgagtttgaggtggactggactcgagcgatcgcacctagaattgaaggcaggatcgtatgtttagggggtggcgtttcataggttatctcaattgactgaacggtcgacctgtgtgcttcattctccattgaagttttcttttcgtgttgtttacctgttttcctccgtttctcgttcacgcgccttcagccatgatgattttggaatctcttgctccggcatgaaagtatcagagagtaacactagtatgagtacctgcgtgagtacctgcattaggtatccatgcctgcagcgaggccgagagtgcagattgcaaaacgagaaagcaacagctagattctgc

SEQ ID NO: 20256 - DNA, 1482 bp, Muscodor strobelii
  misc_feature: SGI cDNA ID NO. 566833
  misc_feature: Encodes the peptide sequence at SEQ ID NO 20257
atggcttcaactgatccattcctgggcaagatgttctcgggaccgcagcagttattgctgcgtagtcgagcaccgacgcaggcggatgcaaagtcaaggctgattatcaagctcgccaatgtcttccaattccgcgaggcgtatcgactagacgagcaaaacgatttctttgcctacccctcattcccagaaggcttcgtcgatgacgcataccagcaccgccatgaccaaaatcgccaggtgctgccatatatgaatgaagttgacctggccaaagcaaacagattaatggaaaaggtcttcggtgaatcagacagcgatcgagaggctcgccccagcaattggccagacgagatgacccagtctgagtatctcagagttctccaggatggtagtcgcgcgtggatgggaatgggattcgatgctaccatcctccgacctatcatcgacaagctcccccaccacaagatctcgaacatcgtcgccatcggactcagcaacttcgcatcgcgcgacggaagaaagatcgaagtcaagcccagcatcctcgcgcaacacttggccattctacgcattgggaagatgcttagtaatgaacaactcaagatcgaagtcggaatatcagactacggatactgtcccgccgagcgcgcagccttatcggagttcggcttcaccgtcttgaacccagcatatgacgcgcaagagcaatttcgcgccatcgccgacaacacattattcatcgcactcggcttaacagcctcccaagcaccataccccgtattttgtcactacgccacgcccgctgccatgatctgcacgtttccatacgagcctgagcccgagcacttctcatctatgtggagcatcgtagatgatgggacggaaaaagttgttgtacctggtgtgccgcagaatcaggctatctacactccggctactaagactttctgggagcaaatacgatttggcggaatggcgcgagtcgaccaagccctctctgagattatgaccatcgctgccagtgacacatgtcccggaatcatgatcttgcccttgtggacttttgcaacgctctacgtatacgcgtatcttgggctgttgagcttccttttatgtgtttcttctgtgtcttcgtcgcaatccttcggccccgaagggcctggggacgattccgcggagccgctcagccgtgttctatgtttggagatcgccaaagcagtaaatgctttcctcaagatcgttgattctatctggcctactatgatcgtcgacctggacctttgggatactgcggaccttgcccatgaagaaaacgaggacggtgatgctaatattgtcaacatgacagccgtccacgatgccttggacgatgtccatgacattattgcacaagagtacggccagggtcgcgattgtgcttcatggatgacaccttacgagaagaaaccacaggcgaccggagagtatgccatcgactag

SEQ ID NO: 20257 - protein, 493 aa, Muscodor strobelii
  misc_feature: SGI Peptide ID NO. 566833
MASTDPFLGKMFSGPQQLLLRSRAPTQADAKSRLIIKLANVFQFREAYRLDEQNDFFAYPSFPEGFVDDAYQHRHDQNRQVLPYMNEVDLAKANRLMEKVFGESDSDREARPSNWPDEMTQSEYLRVLQDGSRAWMGMGFDATILRPIIDKLPHHKISNIVAIGLSNFASRDGRKIEVKPSILAQHLAILRIGKMLSNEQLKIEVGISDYGYCPAERAALSEFGFTVLNPAYDAQEQFRAIADNTLFIALGLTASQAPYPVFCHYATPAAMICTFPYEPEPEHFSSMWSIVDDGTEKVVVPGVPQNQAIYTPATKTFWEQIRFGGMARVDQALSEIMTIAASDTCPGIMILPLWTFATLYVYAYLGLLSFLLCVSSVSSSQSFGPEGPGDDSAEPLSRVLCLEIAKAVNAFLKIVDSIWPTMIVDLDLWDTADLAHEENEDGDANIVNMTAVHDALDDVHDIIAQEYGQGRDCASWMTPYEKKPQATGEYAID

SEQ ID NO: 20258 - DNA, 3943 bp, Muscodor strobelii
  misc_feature: SGI EST ID NO. CUFF.47412.0
  misc_feature: Variant of the nucleotide sequence at SEQ ID NO 20256
caagtgtctgacccgtgcctgaagatccctgtagacccctgtaacaactggctcatccaacgtgtcacggtaccttattacctgttacatgtagctttcgcgtccccagactgcttcatcctcaataaccagagctgagatctttccctcagtgctgctaggcattagatcgatgagtcattccaacgataccttcaagctcgaaaagcctgtagcgactcgccagccacgtttgcttcgtttcattccgaacgccgtgatttatatcaccatggctccgagaggaagtcttacgccccgcacaatcatggcaccagctgccgccttcactatggcatgccttctgttcgcatacactcgttcctcaattagtgaggcgaggcggagcgcccaacaagagcgggagagacggcagacacgcaatatacaacattccaaggaaaatggcccaaaggaccaagattagaacagaacctgtgcacgagtttcaaaaaaatacggactgttaaagatagacggatcagataccgctgctcggcttgtcagtacaacacaccaaacgtcccgctcaagtcctgcgatcccacggcggaacatcatcgacctgttctagtactctgaacttcgactgcggaaatctaatctatgtgtcctttgcttggattcataatgaaatctacccgaatcggccgaaacatgtgttccggacaaagcgagagaagcacaactgatcgacgatgttggagtatataggctgcgtctcacgaactatcacgcaaggggtgggtgcttcacattatctattgccgcgtctcctttatttggtgccactcaaattttgcgatccgacttcccaatgcgttgcaattcatcaaataccagcgcagatatccgggcacaccagttgtgcagaatatgagaggaccatgccatccgatcactaactggatattgtcacacctctccctgccctgacgatctcacatagtatgtggtcacaggcaccccagggctgatatttttcattggaatcagagtccatgtctacaaacagtcttgttcgatcaagtcgaataagcctcctataatcaacctactcacaacttgcattgattcccgtcgataactccagatagatatccaagaatggtaccgtgttgatatgcacgatgggttgcgaatattgccgcccgtgtagttacaaacagaggcgtacgatcaaattacgatagattgactaccacccttgagctaccaacggaatcttgctttttaccctttgctcacctacagagatcattaatatcattccacctagcccctcacgacctcttaggtcccgctgtgggcgtggaaagttgcttgtgaaatagggttagatgttatcaaatatgatctatacctggaaacacattccttagtcgatactcgaccgaacgaatgcccatagcgattggcagctgacattttagacccctgagtgaggcaagacaccatttcagtagccgacaacattcctttccctgggattctagtcatcattcctgatccacgtatctctaacctgcaagcggaatctgcatctccagtagcggcgacatcaccagtatcaagtacatgtcgacaatcaatgaagtctactcaagcgcagattctggcctcgggcgctaggttgacttcaccccatcccagccccccaagaaattgtcccagagtgacgagccgggtgtccccaaccgtgatcttgaaagtacaaagcagaagaatgtggggttaaagcccagaaacaacctgaagatcccaaaatccaatcaagactcggcatactcatctcgcaagcggagtacttgggtataccgctcagcgtcgttcgccagccgtcgaatacatcagagtatgtcgatccgcttctatggcctaatgacaacttcggcggtgttattatggtgagtaattacctacctatccgaatgcatatctctgtatagaccttcctacacacttgacggtgtgctcgtatatacactcaagtacttggccgtatcccgtcaaacgtacaccctcacatgaatatgccggaggaattggtgacatcgagacaggagacactaccgaccagagatctcaagatccagggcaggaatgctcactatacaccaatccttcattccacagacgccatactctccatgttgattatgcctcgcattaattcctactatgccgggcatatgtgccgtcggatggcacgatgtggtcttctcaacaagctattagcattcctcgttctttggtatcgcgtcatcgtccatgtataaaatccgcctgctggcaggtccagcatgtgctctttttctttgctctttactgagatctcagtcgtcgcattttaatgcagctatctctgcctatctcatcgaattcgagctgacataatattcgaggctgcggctcttgcgacgttataagtcctacgcgatatctctattttatccattccctttgatccagccagcgaagctaacgtgagcaccgtcaacatggcttcaactgatccattcctgggcaagatgttctcgggaccgcagcagttattgctgcgtagtcgagcaccgacgcaggcggatgcaaagtcaaggctgattatcaagctcgccaatgtcttccaattccgcgaggcgtatcgactagacgagcaaaacgatttctttgcctacccctcattcccagaaggcttcgtcgatgacgcataccagcaccgccatgaccaaaatcgccaggtgctgccatatatgaatgaagttgacctggccaaagcaaacagattaatggaaaaggtcttcggtgaatcagacagcgatcgagaggctcgccccagcaattggccagacgagatgacccagtctgagtatctcagagttctccaggatggtagtcgcgcgtggatgggaatgggattcgatgctaccatcctccgacctatcatcgacaagctcccccaccacaagatctcgaacatcgtcgccatcggactcagcaacttcgcatcgcgcgacggaagaaagatcgaagtcaagcccagcatcctcgcgcaacacttggccattctacgcattgggaagatgcttagtaatgaacaactcaagatcgaagtcggaatatcagactacggatactgtcccgccgagcgcgcagccttatcggagttcggcttcaccgtcttgaacccagcatatgacgcgcaagagcaatttcgcgccatcgccgacaacacattattcatcgcactcggcttaacagcctcccaagcaccataccccgtattttgtcactacgccacgcccgctgccatgatctgcacgtttccatacgagcctgagcccgagcacttctcatctatgtggagcatcgtagatgatgggacggaaaaagttgttgtacctggtgtgccgcagaatcaggctatctacactccggctactaagactttctgggagcagtatgatagggtctggggactttctcttggcgatgatgagcgggcgaagattactaattttgagtgtttgcatgagtcttgtttgcacactaagtggaatgatcagaatacgatttggcggaatggcgcgagtatgtggctgcgacaggagagttggaagccttgatgatcttcgttgcgactgtgatggatacgggatggggtattgacacactcgttttatgttatcaccttgaatactcgacaagatgagagtagtggtctaatttggcgaagggaagggcttgagtacttctttcctcttacttaaagaacccgcgttgctgcgatcagagagcgtcttatgcccagctcaggcaatgtttaagacaatgtcatgctcttcggagtttgatgccgtagagctatagccccatacgcaatttacgctcctgaaaggctttc

SEQ ID NO: 20259 - DNA, 1782 bp, Muscodor strobelii
  misc_feature: SGI cDNA ID NO. 566835
  misc_feature: Encodes the peptide sequence at SEQ ID NO 20260
atggacttcatcaagtcgcgattttcgcgccgcgaatcggttcatgattacgtgggcgtcttgattccgctagaagaggctcatctgcacagtcattctgccaggtgcggtaagaccgaattcgaggatagacggcacagcggtgatgacttcgacatagacgcagaggacggagaaaacgagttctccgccgctgttaagaatggcgaaaatgagggcacgggcatgttacaaatggatgccgccgaatacactatagagggactacggcgggacgtgctgaagggggagtcaggaaggcgatggaccgagtatgaactgaaatcaaaactcatcaataaagctatacaagatattggaatgggtcgatacaactggcagctctttatattgtgtggatttggatggtttgcggacaatctctggatgcagggcgtttcgctaactctcccatcactctccgaggaattcggtgtctcagagaagcatgtcagatacacgactagttcattatacgttggactaagtattggaagtgcggtatggggactgggcgcagatattgtgggcagacggatcgctttcaatcttactcttctgattactagcatatttggtacgttcgccgcggcggcaccgaactggacaagtgtatgcatcgcatttgcgttgatgggcacgggtgtcggtggaaaccttcccgtcgatggcgcgctgtttcttgagtttcttccggatgcctcgagctcgttgcttaccttattatcggtatggtggccggttggccaactcgtatcatccatctttgcttggtacttcatcacaaagtggccagtgaatgaagggtggagattatttattgccactgttggcatcatcactttcgtcatgtttctcatccgctttgcgttatttcatcttttcgagtcgccgaagttcttactgtcgcagggacggcaagcagaagcagttgcagtggtgcatggaatcgcttatcgcaatggcaagaagacatggcttacagaagaaatattggacgccgtggtcgacacggaggatacagaacgcacccagacgcacatttctgcggcaagtgtgctgaagcagaacctgagctcgttctcgctgggtcacattcagcccctattccagaatcgcaagcttggattggcaacggccttagtatggttttgctgggcttccatcggcatgggatatcctctcttcaatgcattcctaccccaatatctatcgcatggcggagcagatgtagcagtagctactcgagagaatgcggccacttcaccggcaacgtcgcctacaacctatcggaactatgcgatcatctccgtagtaggagttcctggcagtctgctagcagcatacatggttgatcacaagtcgccgttcctcgggcgcaaaggcacactagccatctctacattcgtgtcggccgtgtttctctatctcttcgtgacattcggtacaacacctaattggcagctcttcttcacatccgttgagtccttctgccaaaacatcatgtacggcgtactgtatgctttcacgcctgagatcttccctgcgcccgtgcgaggtgctggtacaggcgttgcaagcttcctaaatcgtgtcacgggtctgcttgcacccatcctagcagcgaacatcccaggtgatggcacgacaacacctatctatctgtctgctgctctaattttgtcagcgtttgtcgccatggttatgattcctatcgagactcggggccggcagagactctga

SEQ ID NO: 20260 - protein, 593 aa, Muscodor strobelii
  misc_feature: SGI Peptide ID NO. 566835
  misc_feature (132)..(551): Pfam Id: PF07690 Pfam Desc: Major Facilitator Superfamily
  misc_feature (126)..(589): Pfam Id: PF00083 Pfam Desc: Sugar (and other) transporter
  misc_feature (10)..(593): NCBI GI: 39971961 Blast Desc: MGG_07296 [Magnaporthe grisea 70-15] gi|145019801|gb|EDK04029.1| MGG_07296 [Magnaporthe grisea 70-15]
  misc_feature (12)..(593): NCBI GI: 256731754 Blast Desc: NECHADRAFT_93627 [Nectria haematococca mpVI 77-13-4]
  misc_feature (10)..(593): NCBI GI: 85099632 Blast Desc: NCU01285 [Neurospora crassa OR74A] gi|28922348|gb|EAA31586.1| NCU01285 [Neurospora crassa OR74A] gi|28950086|emb|CAD70849.1| conserved [Neurospora crassa]
  misc_feature (10)..(593): NCBI GI: 116180166 Blast Desc: CHGG_00711 [Chaetomium globosum CBS 148.51] gi|88185008|gb|EAQ92476.1| CHGG_00711 [Chaetomium globosum CBS 148.51]
  misc_feature (1)..(593): NCBI GI: 238843174 Blast Desc: conserved [Microsporum canis CBS 113480]
  misc_feature (11)..(593): NCBI GI: 169779015 Blast Desc: [Aspergillus oryzae RIB40] gi|238499617|ref|XP_002381043.1| sugar transporter, [Aspergillus flavus NRRL3357] gi|83772711|dbj|BAE62839.1| protein product
  misc_feature (16)..(593): NCBI GI: 115442706 Blast Desc: conserved [Aspergillus terreus NIH2624] gi|114188029|gb|EAU29729.1| conserved [Aspergillus terreus NIH2624]
  misc_feature (10)..(593): NCBI GI: 154279706 Blast Desc: conserved [Ajellomyces capsulatus NAm1] gi|150412609|gb|EDN07996.1| conserved [Ajellomyces capsulatus NAm1]
  misc_feature (11)..(593): NCBI GI: 145238452 Blast Desc: An07g07980 [Aspergillus niger] gi|134076359|emb|CAK39614.1| protein product [Aspergillus niger]
  misc_feature (10)..(593): NCBI GI: 261196996 Blast Desc: sugar transporter [Ajellomyces dermatitidis SLH14081] gi|239596146|gb|EEQ78727.1| sugar transporter [Ajellomyces dermatitidis SLH14081] gi|239609729|gb|EEQ86716.1| sugar ER-3]
MDFIKSRFSRRESVHDYVGVLIPLEEAHLHSHSARCGKTEFEDRRHSGDDFDIDAEDGENEFSAAVKNGENEGTGMLQMDAAEYTIEGLRRDVLKGESGRRWTEYELKSKLINKAIQDIGMGRYNWQLFILCGFGWFADNLWMQGVSLTLPSLSEEFGVSEKHVRYTTSSLYVGLSIGSAVWGLGADIVGRRIAFNLTLLITSIFGTFAAAAPNWTSVCIAFALMGTGVGGNLPVDGALFLEFLPDASSSLLTLLSVWWPVGQLVSSIFAWYFITKWPVNEGWRLFIATVGIITFVMFLIRFALFHLFESPKFLLSQGRQAEAVAVVHGIAYRNGKKTWLTEEILDAVVDTEDTERTQTHISAASVLKQNLSSFSLGHIQPLFQNRKLGLATALVWFCWASIGMGYPLFNAFLPQYLSHGGADVAVATRENAATSPATSPTTYRNYAIISVVGVPGSLLAAYMVDHKSPFLGRKGTLAISTFVSAVFLYLFVTFGTTPNWQLFFTSVESFCQNIMYGVLYAFTPEIFPAPVRGAGTGVASFLNRVTGLLAPILAANIPGDGTTTPIYLSAALILSAFVAMVMIPIETRGRQRL

SEQ ID NO: 20261 - DNA, 2478 bp, Muscodor strobelii
  misc_feature: SGI EST ID NO. CUFF.47448.1
  misc_feature: Variant of the nucleotide sequence at SEQ ID NO 20259
atcacatgctctctatttctttttacaccgcgaagacattgcactattactgttttgtcaaataggtctatgaaatcctattggggcctatgcttgtacggacgctgccgcgacattcattacatcatcggaccccttgcagcgctaggcccaagaaaatccggggatggtcagactgatttctaggggttgtcttggcacagaatcatccaccagctgatgagcctcacctgtcttttcaccatttaatcagctgaacagagcccccacgtggcccttcaagactttgtctctcctcaaggacgccttatccgatggcttaacaattcaatagtgcttctccagtctacatcagattgatacttaggagacccgaggatttctttgagtactttttggaacaaagccgaccgttgatgcaattgcgctttcaagagcaggcgtggagtttcatcagagtctgacgttctcgctccaattgatatcgatggacttcatcaagtcgcgattttcgcgccgcgaatcggttcatgattacgtgggcgtcttgattccgctagaagaggctcatctgcacagtcattctgccaggtgcggtaagaccgaattcgaggatagacggcacagcggtgatgacttcgacatagacgcagaggacggagaaaacgagttctccgccgctgttaagaatggcgaaaatgagggcacgggcatgttacaaatggatgccgccgaatacactatagagggactacggcgggacgtgctgaagggggagtcaggaaggcgatggaccgagtatgaactgaaatcaaaactcatcaataaagctatacaagatattggaatgggtcgatacaactggcagctctttatattgtgtggatttggatggtttgcggacaatctctggatgcagggcgtttcgctaactctcccatcactctccgaggaattcggtgtctcagagaagcatgtcagatacacgactagttcattatacgttggactaagtattggaagtgcggtatggggactgggcgcagatattgtgggcagacggatcgctttcaatcttactcttctgattactagcatatttggtacgttcgccgcggcggcaccgaactggacaagtgtatgcatcgcatttgcgttgatgggcacgggtgtcggtggaaaccttcccgtcgatggcgcgctgtttcttgagtttcttccggatgcctcgagctcgttgcttaccttattatcggtatggtggccggttggccaactcgtatcatccatctttgcttggtacttcatcacaaagtggccagtgaatgaagggtggagattatttattgccactgttggcatcatcactttcgtcatgtttctcatccgctttgcgttatttcatcttttcgagtcgccgaagttcttactgtcgcagggacggcaagcagaagcagttgcagtggtgcatggaatcgcttatcgcaatggcaagaagacatggcttacagaagaaatattggacgccgtggtcgacacggaggatacagaacgcacccagacgcacatttctgcggcaagtgtgctgaagcagaacctgagctcgttctcgctgggtcacattcagcccctattccagaatcgcaagcttggattggcaacggccttagtatggttttgctgggcttccatcggcatgggatatcctctcttcaatgcattcctaccccaatatctatcgcatggcggagcagatgtagcagtagctactcgagagaatgcggccacttcaccggcaacgtcgcctacaacctatcggaactatgcgatcatctccgtagtaggagttcctggcagtctgctagcagcatacatggttgatcacaagtcgccgttcctcgggcgcaaaggcacactagccatctctacattcgtgtcggccgtgtttctctatctcttcgtgacattcggtacaacacctaattggcagctcttcttcacatccgttgagtccttctgccaaaacatcatgtacggcgtactgtatgctttcacgcctgagatcttccctgcgcccgtgcgaggtgctggtacaggcgttgcaagcttcctaaatcgtgtcacgggtctgcttgcacccatcctagcagcgaacatcccaggtgatggcacgacaacacctatctatctgtctgctgctctaattttgtcagcgtttgtcgccatggttatgattcctatcgagactcggggccggcagagactctgagctataatagactggtacaccaagcatggatagtgaattgtagtatcttcttgtatatagactagcattctggagtcggagcatcatcattgcattgggcgggtcacaaaaattgaataggagaattttgattactcgagatcacaagactttactgggttatccgtatgtcgtcgtatggtcctcctattcactcgatgtaatctggc

SEQ ID NO: 20262 - DNA, 1023 bp, Muscodor strobelii
  misc_feature: SGI cDNA ID NO. 566836
  misc_feature: Encodes the peptide sequence at SEQ ID NO 20263
atggcacccgctccccgtcttcgagttccgcccaaggagccgaaggcgcgcaaagggtggcgaatgaaagaggatgcatccgggcccgggtccgggtccggtgaggcaggacgcccggctcttctctcgttcgatgaaatgccggaatggtttcaacacgataacaaccagtggattcttcacgattaccggcccatttcgggctcagttcgcgtctcgttccgcagttggtggtatttacacaacgagacggtcaacatctattcccatctcattccagccgtcgtcttcctcctcggcgagtggtatatcttgcagtaccttgctagcaaatattctagagttactagcaccgatttagttgctttctcattcttcatgcttacggcgacgatttgctatgcattttcagctctttatcataccttgatgaaccactcttacatcgtagaccatttctgtcaccgactagacatgcttggcatagggctcttcatagtcggtgacattattttgggagtatacatcatcttcttttgtgagactgtgctacgcagtatttattggtctatgattggggttttcggggcattaaccatcatcacgaacatccatcccaagctccaaagccataaataccgctccatgcgaacactagcgttcgtggcgactgccatgtccgttgtggcgcccttgattcatggactcgataggctcggtctggacctgatgaacaaaaaagccttcatctatactgtagtggcaaagatagactgccttctatttggaacggcgctttacgcagtgagcttcgattttgcccatacagaaggaaaatcagtcctgatacacgtcattcgaaagattaggtttcccgaaagttggtggcctggaaaattcgacatgtgcagttcccactcattcatgcacatcttggtggtctgcgccgctgttatccagatgataggctatctgggagccttcgactatgcttactcaaatattacctgctcggcctcttga

SEQ ID NO: 20263 - protein, 340 aa, Muscodor strobelii
  misc_feature: SGI Peptide ID NO. 566836
  misc_feature (78)..(321): Pfam Id: PF03006 Pfam Desc: Haemolysin-III related
  misc_feature (78)..(234): Pfam Id: PF03006 Pfam Desc: Haemolysin-III related
  misc_feature (290)..(321): Pfam Id: PF03006 Pfam Desc: Haemolysin-III related
  misc_feature (1)..(340): NCBI GI: 256727336 Blast Desc: NECHADRAFT_76108 [Nectria haematococca mpVI 77-13-4]
  misc_feature (1)..(339): NCBI GI: 238841163 Blast Desc: hemolysin-III family protein [Microsporum canis CBS 113480]
  misc_feature (5)..(337): NCBI GI: 145228359 Blast Desc: An01g00400 [Aspergillus niger] gi|134054575|emb|CAK43430.1| protein product [Aspergillus niger]
  misc_feature (12)..(338): NCBI GI: 119491815 Blast Desc: haemolysin-III channel protein Izh2, [Neosartorya fischeri NRRL 181] gi|119411562|gb|EAW21505.1| haemolysin-III channel protein Izh2, [Neosartorya fischeri NRRL 181]
  misc_feature (8)..(337): NCBI GI: 255945465 Blast Desc: Pc20g10060 [Penicillium chrysogenum Wisconsin 54-1255] gi|211588235|emb|CAP86335.1| Pc20g10060 [Penicillium chrysogenum Wisconsin 54-1255]
  misc_feature (12)..(336): NCBI GI: 242782440 Blast Desc: hemolysin-III channel protein Izh2, [Talaromyces stipitatus ATCC 10500] gi|218720146|gb|EED19565.1| hemolysin-III channel protein Izh2, [Talaromyces stipitatus ATCC 10500]
  misc_feature (12)..(338): NCBI GI: 70999690 Blast Desc: haemolysin-III channel protein Izh2 [Aspergillus fumigatus Af293] gi|66852199|gb|EAL92524.1| haemolysin-III channel protein Izh2, [Aspergillus fumigatus Af293] channel Izh2,
  misc_feature (41)..(340): NCBI GI: 169770593 Blast Desc: [Aspergillus oryzae RIB40] gi|83767625|dbj|BAE57764.1| protein product [Aspergillus oryzae]
  misc_feature (41)..(336): NCBI GI: 242782435 Blast Desc: hemolysin-III channel protein Izh2, [Talaromyces stipitatus ATCC 10500] gi|218720145|gb|EED19564.1| hemolysin-III channel protein Izh2, [Talaromyces stipitatus ATCC 10500]
  misc_feature (17)..(338): NCBI GI: 189204808 Blast Desc: adiponectin receptor protein 1 [Pyrenophora tritici-repentis Pt-1C-BFP] gi|187985838|gb|EDU51326.1| adiponectin receptor protein 1 [Pyrenophora tritici-repentis
MAPAPRLRVPPKEPKARKGWRMKEDASGPGSGSGEAGRPALLSFDEMPEWFQHDNNQWILHDYRPISGSVRVSFRSWWYLHNETVNIYSHLIPAVVFLLGEWYILQYLASKYSRVTSTDLVAFSFFMLTATICYAFSALYHTLMNHSYIVDHFCHRLDMLGIGLFIVGDIILGVYIIFFCETVLRSIYWSMIGVFGALTIITNIHPKLQSHKYRSMRTLAFVATAMSVVAPLIHGLDRLGLDLMNKKAFIYTVVAKIDCLLFGTALYAVSFDFAHTEGKSVLIHVIRKIRFPESWWPGKFDMCSSHSFMHILVVCAAVIQMIGYLGAFDYAYSNITCSAS

SEQ ID NO: 20264 - DNA, 1038 bp, Muscodor strobelii
  misc_feature: SGI cDNA ID NO. 566837
  misc_feature: Encodes the peptide sequence at SEQ ID NO 20265
atggccacggcagccgtgcctctttacggctcgttcgtcccaatcaatgtcgaacctggctccctcatgcttgcagaatggggccgactatggataggagctcgacatcgaactttatggcaaatgtgcagagcgaatccagcctataccaacaatcctagcctgggcatccgttcattcggcgtgaggacgcaaaccgtattaaagatgtcgatgatagctgaagatgcccaactggctagatctggggctgccgccgactcgagagatggtagtggtaatttattgccgctagcaccagcgttcgaatggatcaggaattttgtgactcgcttcatcgaattctgggatgagttgtctttcctcgtcaatactagggacgaggctacctccgccgatagggcaacgtcaaacgcagcgttactgactgtctggactccctatcgatcaatcctgatccctagaatcaaacaagtcagggcatatcggcaagatcatacagccttcagaagaacagattgggacgagataatacgagtagtccaacaaattgtaaatctgataacaatgtctggtgacatatggggtatctggggagggcctgcacctgcgtacattgcccgagaatttccacggtggtcgtcaagttataaccgtagacccagcttcaacttcggcacgttgatagggccaccgcctactatcccacacgcttatttgttgggaggaggagcaggagctggaggtggaggtggaggtggaggtggtggtagtggtggtccaccgtcgggagggcccggcagcggtcctggtaatgctggaggaggtggcgggggtaccttcaaccctggggcaccaacttccaccctcggagcagcaggcttcaaccccacggcatcaactttcaatcccacggcatcaaatttcaaccccacgacccggtctgagttcgatcccgatgggaatccaatggacgacgaagggccaccatatgacgacatcgacgcattattggacaaaagtgtacgtgatcgataa

SEQ ID NO: 20265 - protein, 345 aa, Muscodor strobelii
  misc_feature: SGI Peptide ID NO. 566837
MATAAVPLYGSFVPINVEPGSLMLAEWGRLWIGARHRTLWQMCRANPAYTNNPSLGIRSFGVRTQTVLKMSMIAEDAQLARSGAAADSRDGSGNLLPLAPAFEWIRNFVTRFIEFWDELSFLVNTRDEATSADRATSNAALLTVWTPYRSILIPRIKQVRAYRQDHTAFRRTDWDEIIRVVQQIVNLITMSGDIWGIWGGPAPAYIAREFPRWSSSYNRRPSFNFGTLIGPPPTIPHAYLLGGGAGAGGGGGGGGGGSGGPPSGGPGSGPGNAGGGGGGTFNPGAPTSTLGAAGFNPTASTFNPTASNFNPTTRSEFDPDGNPMDDEGPPYDDIDALLDKSVRDR

SEQ ID NO: 20266 - DNA, 3488 bp, Muscodor strobelii
  misc_feature: SGI EST ID NO. CUFF.47493.1
  misc_feature: Variant of the nucleotide sequence at SEQ ID NO 20264
atttaatactgttttattgcacggcaatcatctaagtgtctacacctctacacctcgccggtccattgattaatattatgatgaattcgtttcggccgatgtgaccagtcaatacgtgctttgccaagcacctctcccagggcttcccacttccgggtcgccttgccgccagcttctccgcccttacaagtccgtgattaccatgatcaagactgtgcccgattccagtatcgtcgcaacaacgcaagcataacaaccaccatgcctcctgttcctgtcagtatggcaccatacgagatcatatactataaaggtgtccccggacgtggggagttcatccgtctagcactagaagaagccgaagctccctatacagacaccgcatcgctcggcgtggaagagtcccgccgcgccgtcgcctccttcctcggagagagctatacgggcgaggggagaaatccgccatgttacgcgccaccgctgttgaaacacggagatctgaccatttctcaaaccagtaccatcctctcctaccttggccctaagcgggggctcgcgggcttggaggaaaacgaccgataccgcgtcagtgcactggcacagacggcgttggatggcctgctgaatgaagtccatgattggcatcatcctatcgcagtcgagctctattacgaagaccagaaggatgaaagcctaaggcgtagtaaagagtggatcaagacgaggctgcccaagcaccttgggtattggcagaaagttttacgtgcaaatgtggatgggaaaggacagagttgggtgcttgggggcgcctttacctacgccgatatagtgctcttccagtgtctcgacggggtccagtacgcttttccaaaagccatgaaccacgccagagattctggtctttatgatcgagtctttcgactgtgggaagacgtaaagaacaggccgaacattgctaagtatttggccagtgagagacgacaggcttacgattcttagggtatctatcggtattatgaggtgaacgacgtcattcctgaatgagtggcctgaccttgaagaggcgtgcttctcggctgctaacatggtggtggacgaatcagtattacgatatctccctgttctggtcatgacagcggcaatcattacttatttgggcattgtatcgattatattctggtgccacaagcccagcaacaaagggattgtctgtcttctctgatacggcggaagttcttgtctggctcgatccatcgactttctcctttgtccgagcagcggagacgacaatgccggatccggctcatatcgcagactatccttattcttctgtaaaagcaaatgtttacgtagcaaaggtgcaatcgttcaaagttgcagaaactgaggcttaacaacatttggtgttgcagcagacatacctgtgacaaatgcattgcattcacttgtagttacaaatcaaagcccatcagtttacgattctcgcgtgggacaggcgcaggcatcatggccacggcagccgtgcctctttacggctcgttcgtcccaatcaatgtcgaacctggctccctcgcacgattctctagagcaaactttagattcaactaccttgacacccacaccgataatgaatttatgcgtgttagtgctcacttgaaataaattcctttaacatcttaagcagcggccccgactttagccccgaccgaatcatttcacctcgacttgacggaactgtcgttattttccattgttgatttgatctgtcttttagatgcttgcagaatggggccgactatggataggagctcgtgagacaatagctctttaactatagcagatgcgacgttgtttactgacacttagtaggacatcgaactttatggcaaatgtgcagagcgaatccagcctataccaacaatcctagcctgggcatccgttcattcggcgtgaggacgcaaaccgtattaaagatgtcgatgatagctgaagatgcccaactggctagatctggtgcgttttggcttaagccagaggattacgccttcggactccggagcaaacctcacggacgtcgaaaaattgatatgaatgatctcttcaaatgggcatatggaggactaagcgctttggatgttctggacatagtgagtaatttctggagttcctttctggaagttttctggagcaagtcctccagaaacatgttttagtactcccgagacatgcgcaaacacgctataaagagtagttactgactccaagccttgcagtgtagtgcccctggcttttaagccactcatattgtaaagcttttcaggcgcgctaatatatatataacaggggctgccgccgactcgagagatggtagtggtaatttattgccgctagcaccagcgttcgaatggatcaggaattttgtgactcgcttcatcgaattctgggatgagttgtctttcctcgtaagtatttcaaacgcctcgggctgccaatgaaactcatcgacctgccacaggtcaatactagggacgaggctacctccgccgatagggcaacgtcaaacgcagcgttactgactgtctggactccctatcgatcaatcctgatccctagaatcaaacaagtcagggcatatcggcaagatcatacagccttcagaagaacagattgggacgagataatacgagtagtccaacaaattgtaaatctgataacaatgtctggtgacatatggggtatctggggagggcctgcacctgcgtacattgcccgagaatttccacggtggtcgtcaagttataaccgtagtaagttgactccgagctatctcttcgtccgcatacctagtactttcatatcgtaaacagtggcttattcgtacgtgtacaggacccagcttcaacttcggcacgttgatagggccaccgcctactatcccacacgcttatttgttgggaggaggagcaggagctggaggtggaggtggaggtggaggtggtggtagtggtggtccaccgtcgggagggcccggcagcggtcctggtaatgctggaggaggtggcgggggtaccttcaaccctggggcaccaacttccaccctcggagcagcaggcttcaaccccacggcatcaactttcaatcccacggcatcaaatttcaaccccacgacccggtctgagttcgatcccgatgggaatccaatggacgacgaagggccaccatatgacgacatcgacgcattattggacaaaagtgtacgtgatcgataaaatgaagacggcgataaggatacgccggctgtgtctctgggagagctggaatccaggcagttgcccatctcgcaaactgctcatttgtgccgtctatcgcgtgtatgaaaacatgtcgatttggtaaaattttcgaaagctatggaatctggtggaattttaggggtaaggggtgaggccattattaaggcgtttttttagcctttttatatatatttc

SEQ ID NO: 20267 - DNA, 1023 bp, Muscodor strobelii
  misc_feature: SGI cDNA ID NO. 566838
  misc_feature: Encodes the peptide sequence at SEQ ID NO 20268
atggccacggcagccgtgcctctttacggctcgttcgtcccaatcaatgtcgaacctggctccctcatgcttgcagaatggggccgactatggataggagctcgacatcgaactttatggcaaatgtgcagagcgaatccagcctataccaacaatcctagcctgggcatccgttcattcggcgtgaggacgcaaaccgtattaaagatgtcgatgatagctgaagatgcccaactggctagatctggggctgccgccgactcgagagatggtagtggtaatttattgccgctagcaccagcgttcgaatggatcaggaattttgtgactcgcttcatcgaattctgggatgagttgtctttcctcgtcaatactagggacgaggctacctccgccgatagggcaacgtcaaacgcagcgttactgactgtctggactccctatcgatcaatcctgatccctagaatcaaacaagtcagggcatatcggcaagatcatacagccttcagaagaacagattgggacgagataatacgagtagtccaacaaattgtaaatctgataacaatgtctggtgacatatggggtatctggggagggcctgcacctgcgtacattgcccgagaatttccacggtggtcgtcaagttataaccgtagacccagcttcaacttcggcacgttgatagggccaccgcctactatcccacacgcttatttgttgggaggaggagcaggagctggaggtggaggtggaggtggaggtggtggtagtggtggtccaccgtcgggagggcccggcagcggtcctggtaatgctggaggaggtggcgggggtaccttcaaccctggggcaccaacttccaccctcggagcagcaggcttcaaccccacggcatcaactttcaatcccacggcatcaaatttcaaccccacgacccggtctgagttcgatcccgatgggaatccaatggacgacgaagggccaccatatgacgacatcgacgcattattggacaaaagt

SEQ ID NO: 20268 - protein, 341 aa, Muscodor strobelii
  misc_feature: SGI Peptide ID NO. 566838
MATAAVPLYGSFVPINVEPGSLMLAEWGRLWIGARHRTLWQMCRANPAYTNNPSLGIRSFGVRTQTVLKMSMIAEDAQLARSGAAADSRDGSGNLLPLAPAFEWIRNFVTRFIEFWDELSFLVNTRDEATSADRATSNAALLTVWTPYRSILIPRIKQVRAYRQDHTAFRRTDWDEIIRVVQQIVNLITMSGDIWGIWGGPAPAYIAREFPRWSSSYNRRPSFNFGTLIGPPPTIPHAYLLGGGAGAGGGGGGGGGGSGGPPSGGPGSGPGNAGGGGGGTFNPGAPTSTLGAAGFNPTASTFNPTASNFNPTTRSEFDPDGNPMDDEGPPYDDIDALLDKS

SEQ ID NO: 20269 - DNA, 3488 bp, Muscodor strobelii; identical to SEQ ID NO: 20266
  misc_feature: SGI EST ID NO. CUFF.47493.1
  misc_feature: Variant of the nucleotide sequence at SEQ ID NO 20267

SEQ ID NO: 20270 - DNA, 738 bp, Muscodor strobelii
  misc_feature: SGI cDNA ID NO. 566839
  misc_feature: Elevated expression when VOC is produced
  misc_feature: Encodes the peptide sequence at SEQ ID NO 20271
atgcctcctgttcctgtcagtatggcaccatacgagatcatatactataaaggtgtccccggacgtggggagttcatccgtctagcactagaagaagccgaagctccctatacagacaccgcatcgctcggcgtggaagagtcccgccgcgccgtcgcctccttcctcggagagagctatacgggcgaggggagaaatccgccatgttacgcgccaccgctgttgaaacacggagatctgaccatttctcaaaccagtaccatcctctcctaccttggccctaagcgggggctcgcgggcttggaggaaaacgaccgataccgcgtcagtgcactggcacagacggcgttggatggcctgctgaatgaagtccatgattggcatcatcctatcgcagtcgagctctattacgaagaccagaaggatgaaagcctaaggcgtagtaaagagtggatcaagacgaggctgcccaagcaccttgggtattggcagaaagttttacgtgcaaatgtggatgggaaaggacagagttgggtgcttgggggcgcctttacctacgccgatatagtgctcttccagtgtctcgacggggtccagtacgcttttccaaaagccatgaaccacgccagagattctggtctttatgatcgagtctttcgactgtgggaagacgtaaagaacaggccgaacattgctaagtatttggccagtgagagacgacaggcttacgattcttag

SEQ ID NO: 20271 - protein, 245 aa, Muscodor strobelii
  misc_feature: SGI Peptide ID NO. 566839
  misc_feature (124)..(229): Pfam Id: PF00043 Pfam Desc: Glutathione S-transferase, C-terminal domain
  misc_feature (9)..(243): NCBI GI: 154289559 Blast Desc: BC1G_16073 [Botryotinia fuckeliana B05.10] gi|150849028|gb|EDN24221.1| BC1G_16073 [Botryotinia fuckeliana B05.10]
  misc_feature (11)..(243): NCBI GI: 261354641 Blast Desc: glutathione S-transferase [Verticillium albo-atrum VaMs.102]
  misc_feature (6)..(243): NCBI GI: 256726160 Blast Desc: NECHADRAFT_62085 [Nectria haematococca mpVI 77-13-4]
  misc_feature (7)..(243): NCBI GI: 238508282 Blast Desc: glutathione S-transferase family protein, [Aspergillus flavus NRRL3357] gi|220688857|gb|EED45209.1| glutathione S-transferase family protein, [Aspergillus flavus NRRL3357]
  misc_feature (7)..(243): NCBI GI: 169784552 Blast Desc: [Aspergillus oryzae RIB40] gi|83775484|dbj|BAE65604.1| protein product [Aspergillus oryzae]
  misc_feature (9)..(245): NCBI GI: 164425285 Blast Desc: NCU04676 [Neurospora crassa OR74A] gi|157070866|gb|EAA29983.2| NCU04676 [Neurospora crassa OR74A]
  misc_feature (9)..(243): NCBI GI: 46116630 Blast Desc: FG04157.1 [Gibberella zeae PH-1]
  misc_feature (9)..(245): NCBI GI: 28950064 Blast Desc: conserved [Neurospora crassa]
  misc_feature (9)..(243): NCBI GI: 116179728 Blast Desc: CHGG_00492 [Chaetomium globosum CBS 148.51] gi|88184789|gb|EAQ92257.1| CHGG_00492 [Chaetomium globosum CBS 148.51]
  misc_feature (9)..(245): NCBI GI: 171691647 Blast Desc: protein product [Podospora anserina] gi|170945772|emb|CAP72572.1| protein product [Podospora anserina]
  misc_feature (13)..(243): SWISSPROT Homolog: EC 2.5.1.18 Glutathione transferase
  misc_feature: Useful for introducing or modulating the production of volatile compounds
MPPVPVSMAPYEIIYYKGVPGRGEFIRLALEEAEAPYTDTASLGVEESRRAVASFLGESYTGEGRNPPCYAPPLLKHGDLTISQTSTILSYLGPKRGLAGLEENDRYRVSALAQTALDGLLNEVHDWHHPIAVELYYEDQKDESLRRSKEWIKTRLPKHLGYWQKVLRANVDGKGQSWVLGGAFTYADIVLFQCLDGVQYAFPKAMNHARDSGLYDRVFRLWEDVKNRPNIAKYLASERRQAYDS

SEQ ID NO: 20272 - DNA, 3488 bp, Muscodor strobelii; identical to SEQ ID NO: 20266
  misc_feature: SGI EST ID NO. CUFF.47493.1
  misc_feature: Variant of the nucleotide sequence at SEQ ID NO 20270

SEQ ID NO: 20273 - DNA, 567 bp, Muscodor strobelii
  misc_feature: SGI cDNA ID NO. 566840
  misc_feature: Reduced expression when VOC is produced
  misc_feature: Encodes the peptide sequence at SEQ ID NO 20274
gccgccctctctgcccccggccacgtctaccaggtctcgctggcccccggcgaggacttcgtcgcccacccggccaacgtcgtcgcctacaccctgaccaaccacccgcccttgcccttccgcttcaagagctccgccatccgcttccaggtcccctccgtcaccgcctggctcgagaccacaagcttcttccagaacatgcgccagaccgacacctacaagctcctcgcccgcctcctctactccctgcgcaccaccacccgccgcaccatctggggcgacaggctgtttctgcagttccgtgggcccatgaccatcctcatgtccagtcgtgcatcgcgcatcagcgatgtcctgacgagtgccgacgtcaacgagattgccgatgcccccgctggtgccgtgcccgctgccgtcgacttggccacgcggcccaaggtcgccgagccgctaccggagaagagggaacacgaggtacggctcaacgtcgccagtgttggtagagacggaaaggtccatctcgaggctgccagtgctgaggacttgaagcaatttgagaagaactag

SEQ ID NO: 20274 - protein, 188 aa, Muscodor strobelii
  misc_feature: SGI Peptide ID NO. 566840
  misc_feature (1)..(185): NCBI GI: 261354694 Blast Desc: conserved [Verticillium albo-atrum VaMs.102]
  misc_feature (2)..(173): NCBI GI: 116178758 Blast Desc: CHGG_00007 [Chaetomium globosum CBS 148.51] gi|88184304|gb|EAQ91772.1| CHGG_00007 [Chaetomium globosum CBS 148.51]
  misc_feature (1)..(185): NCBI GI: 256732914 Blast Desc: [Nectria haematococca mpVI 77-13-4]
  misc_feature (2)..(175): NCBI GI: 156050675 Blast Desc: SS1G_07925 [Sclerotinia sclerotiorum 1980] gi|154692325|gb|EDN92063.1| SS1G_07925 [Sclerotinia sclerotiorum 1980]
  misc_feature (1)..(188): NCBI GI: 39973335 Blast Desc: MGG_07962 [Magnaporthe grisea 70-15] gi|145012781|gb|EDJ97435.1| MGG_07962 [Magnaporthe grisea 70-15]
  misc_feature (1)..(185): NCBI GI: 171680630 Blast Desc: protein product [Podospora anserina] gi|170939942|emb|CAP65168.1| protein product [Podospora anserina]
  misc_feature (1)..(185): NCBI GI: 46123915 Blast Desc: FG06335.1 [Gibberella zeae PH-1]
  misc_feature (2)..(185): NCBI GI: 85079374 Blast Desc: NCU05027 [Neurospora crassa OR74A] gi|28917395|gb|EAA27099.1| NCU05027 [Neurospora crassa OR74A]
  misc_feature (2)..(140): NCBI GI: 189192586 Blast Desc: conserved [Pyrenophora tritici-repentis Pt-1C-BFP] gi|187974238|gb|EDU41737.1| conserved [Pyrenophora tritici-repentis Pt-1C-BFP]
  misc_feature (2)..(176): NCBI GI: 238840758 Blast Desc: conserved [Microsporum canis CBS 113480]
  misc_feature: Useful for introducing or modulating the production of volatile compounds
AALSAPGHVYQVSLAPGEDFVAHPANVVAYTLTNHPPLPFRFKSSAIRFQVPSVTAWLETTSFFQNMRQTDTYKLLARLLYSLRTTTRRTIWGDRLFLQFRGPMTILMSSRASRISDVLTSADVNEIADAPAGAVPAAVDLATRPKVAEPLPEKREHEVRLNVASVGRDGKVHLEAASAEDLKQFEKN

SEQ ID NO: 20275 - DNA, 1212 bp, Muscodor strobelii
  misc_feature: SGI EST ID NO. CUFF.47453.0
  misc_feature: Variant of the nucleotide sequence at SEQ ID NO 20273
gccctctctgcccccggccacgtctaccaggtctcgctggcccccggcgaggacttcgtcgcccacccggccaacgtcgtcgcctacaccctgaccaaccacccgcccttgcccttccgcttcaagagctccgccatccgcttccaggtcccctccgtcaccgcctggctcgagaccacaagcttcttccagaacatgcgccagaccgacacctacaagctcctcgcccgcctcctctactccctgcgcaccaccacccgccgcaccatctggggcgacaggctgtttctgcagttccgtgggcccatgaccatcctcatgtccagtcgtgcatcgcgcatcagcgatgtcctgacgagtgccgacgtcaacgagattgccgatgcccccgctggtgccgtgcccgctgccgtcgacttggccacgcggcccaaggtcgccgagccgctaccggagaagagggaacacgaggtacggctcaacgtcgccagtgttggtagagacggaaaggtccatctcgaggctgccagtgctgaggacttgaagcaatttgagaagaactagagtggtgacccgtgttgtacgactagacgacaagcaaaattggtgtgctgtatgaaacaaacctggaagcctgctctcccaagcgacttccctttgttgtagatagacgttcgaaatatatacccaaagcttttcatacaagataagctatacgttacgaatcggaaaaagagggtttgtcggtatgtacttgtgcaacgccatgaggcaggcgcaaggggaaagggtactcaaagcgcatcgccttaccactcgccaacatcagccagctaccggatctatccccggggagcagccggattgggattgcgactggatagtaaagagagccatgaatagcttcttagacgcacgatggctgtcttcattcagccttgatatggctgccaagataatgcgccacgactacgctgaactgctctccataggtagtctatacgccgtttcgcgattcggcaacactagatatttgctcttcgtctactgagagctggacgaaagtgtaatatagtggccagttacatgttcaatattgcgcatgtccccagtcaggaccgacgttcggtcgcccgtagtcaacctcttttcacacttgacatgtagtgaatcgttcttggagtcttgaggtagtgggcaggagagatgccg

SEQ ID NO: 20276 - DNA, 1773 bp, Muscodor strobelii
  misc_feature: SGI cDNA ID NO. 566841
  misc_feature: Elevated expression when VOC is produced
  misc_feature: Encodes the peptide sequence at SEQ ID NO 20277
atgccaaagagatttgcgctacttgtaggagtggacttgtatatcaaggatggttcgaggcagctgccaaatggcaagattgtggctctgaagaacctgcaaggggctgtcaacgatgttgcaaacatagcattgcttctggacaaatttcatttcaatgaggtagcccgcctcacttgttctccatctttaaccgaccctcaaattcctagcgaacacgaggacagccagcctactcatgccaacatcaagactgcttttgaaggcatacaaagcaagacctgcgctggagatttgttcttctttcacttttccggacatggggcgcagttgcgtgcgacttctaattcagtggcccagggtcgctctatggagccatccttgatgactgccgactactgctgcggcgagccggcgattcgaggatgggaactcaacgagtggctatgggaattgaatgagaaaggagttcgggtcgtcgttctgctcgacagttgctactctggtggggcttggcggatcgggctgaaaaacatccgatctcccgaggactggaccccgcctcccaaccttcccgctgatgaaacggcagtgcagggaacacagaaaaagcctggccaccgcgatgcagatctcgacgtctcgtgggatatcaatccgaaagactttactgtcttagcagcttgtcagagcaaccaagtcgctgtagagaaaacggagaacggggtagtgtacggcgcgtttacgcttgctctatcgcagtatttccaagaccgaacaaactcgcaaacgtcaacataccataccattcgcgatcatacggctgagctcattgaatcatgggacctggcacagacaccccaggtttttggtcgagacagactggcttttctcgaagactatgagccagtctcagtggccccgatctttgggcgcatagaagaggacgccatcactcttcctgttggcaatatccacggtgttagcctagggacagaattcataacagttgcgactcactctacggctaaagtctccatttccgcagtgaacgatcttgagagcaagacaaagatgttggaaggatctgttcaagatctgtcgcaacccatccaggtcgttccattccggtggtgctccgggaagaccttaaccatcgtcattgacccaaaccttggtcattcgttccgggagaggcttgccacttatctgggaaatagaactgctagtcacattcgatacactaaaatgcctccatcaaagaacagtgcagactctgaagttacttggctttggttcggactctcgtttttcaagaggataatcagctacttcgggagttggaccactggtgatatgcggaacgtagaggatgccgattctccaatcaacaacgacgctgaagcggtctggttccggctagggccgagagagaacggcggcattaagatcaccggaccaaattggtcattaggggctcaaggatccgtacgagggtggaatgcgaagggagagactgaagatgaaagagctagggaatcggccgttgcattggcccatctgttcaggtttgagcagattttcaacgtacaaaacgagtctgagatggaggcgccgttcgaggtgaaaatcaaaccagttgacggcatcgcccgacagtttcaatttaattttgcaaatcaacaggcagaggaattgttcttcgccgtgattatcttgagcgcggggttccatgtcaaacagttgttcccagccaccgacaatctccaagcg

SEQ ID NO: 20277 - protein, 591 aa, Muscodor strobelii
  misc_feature: SGI Peptide ID NO. 566841
  misc_feature (4)..(298): Pfam Id: PF00656 Pfam Desc: Caspase domain
  misc_feature (4)..(110): Pfam Id: PF00656 Pfam Desc: Caspase domain
  misc_feature (4)..(334): NCBI GI: 256728431 Blast Desc: NECHADRAFT_87859 [Nectria haematococca mpVI 77-13-4]
  misc_feature (5)..(335): NCBI GI: 119490224 Blast Desc: Peptidase C14, caspase catalytic subunit p20 [Lyngbya sp. PCC 8106] gi|119454110|gb|EAW35263.1| Peptidase C14, caspase catalytic subunit p20 [Lyngbya sp. PCC 8106]
  misc_feature (1)..(335): NCBI GI: 119474521 Blast Desc: caspase, [Neosartorya fischeri NRRL 181] gi|119407289|gb|EAW17239.1| caspase, [Neosartorya fischeri NRRL 181]
  misc_feature (2)..(452): NCBI GI: 159030615 Blast Desc: protein product [Microcystis aeruginosa PCC 7806]
  misc_feature (4)..(334): NCBI GI: 256730384 Blast Desc: NECHADRAFT_101119 [Nectria haematococca mpVI 77-13-4]
  misc_feature (5)..(372): NCBI GI: 119490219 Blast Desc: Peptidase C14, caspase catalytic subunit p20 [Lyngbya sp. PCC 8106] gi|119454105|gb|EAW35258.1| Peptidase C14, caspase catalytic subunit p20 [Lyngbya sp. PCC 8106]
  misc_feature (5)..(335): NCBI GI: 119487607 Blast Desc: L8106_27162 [Lyngbya sp. PCC 8106] gi|119455776|gb|EAW36912.1| L8106_27162 [Lyngbya sp. PCC 8106]
  misc_feature (63)..(335): NCBI GI: 46109678 Blast Desc: FG01721.1 [Gibberella zeae PH-1]
  misc_feature (4)..(340): NCBI GI: 46120498 Blast Desc: FG04896.1 [Gibberella zeae PH-1]
  misc_feature (5)..(338): NCBI GI: 170099429 Blast Desc: [Laccaria bicolor S238N-H82] gi|164644458|gb|EDR08708.1| [Laccaria bicolor S238N-H82]
  misc_feature: Useful for introducing or modulating the production of volatile compounds
MPKRFALLVGVDLYIKDGSRQLPNGKIVALKNLQGAVNDVANIALLLDKFHFNEVARLTCSPSLTDPQIPSEHEDSQPTHANIKTAFEGIQSKTCAGDLFFFHFSGHGAQLRATSNSVAQGRSMEPSLMTADYCCGEPAIRGWELNEWLWELNEKGVRVVVLLDSCYSGGAWRIGLKNIRSPEDWTPPPNLPADETAVQGTQKKPGHRDADLDVSWDINPKDFTVLAACQSNQVAVEKTENGVVYGAFTLALSQYFQDRTNSQTSTYHTIRDHTAELIESWDLAQTPQVFGRDRLAFLEDYEPVSVAPIFGRIEEDAITLPVGNIHGVSLGTEFITVATHSTAKVSISAVNDLESKTKMLEGSVQDLSQPIQVVPFRWCSGKTLTIVIDPNLGHSFRERLATYLGNRTASHIRYTKMPPSKNSADSEVTWLWFGLSFFKRIISYFGSWTTGDMRNVEDADSPINNDAEAVWFRLGPRENGGIKITGPNWSLGAQGSVRGWNAKGETEDERARESAVALAHLFRFEQIFNVQNESEMEAPFEVKIKPVDGIARQFQFNFANQQAEELFFAVIILSAGFHVKQLFPATDNLQA

SEQ ID NO: 20278 - DNA, 2203 bp, Muscodor strobelii
  misc_feature: SGI EST ID NO. CUFF.47459.0
  misc_feature: Variant of the nucleotide sequence at SEQ ID NO 20276
ttttcgtagagcctcgctctgcagttggcttaatacgtacctcaatttctaggcaagatttgaagatattgcagccagctgaagtgcacaaacagaagttggttacgagctgtctttgtgcaaaattattcgtcgaaatacgcctgaccaatgttacatcgattgtccaagtacttctgcacatctaaacaggattttctacagtaacagcaagattgctaatatcgcttcttatttcaatctctattactgcttcgccatttttctcatgctccattcaatagcggttgacgaatcaaacaaataattacatccacagttcgaactagagtgtgacttccaacctaccacatctaacttgtcaaacatgccaaagagatttgcgctacttgtaggagtggacttgtatatcaaggatggttcgaggcagctgccaaatggcaagattgtggctctgaagaacctgcaaggggctgtcaacgatgttgcaaacatagcattgcttctggacaaatttcatttcaatgaggtagcccgcctcacttgttctccatctttaaccgaccctcaaattcctagcgaacacgaggacagccagcctactcatgccaacatcaagactgcttttgaaggcatacaaagcaagacctgcgctggagatttgttcttctttcacttttccggacatggggcgcagttgcgtgcgacttctaattcagtggcccagggtcgctctatggagccatccttgatgactgccgactactgctgcggcgagccggcgattcgaggatgggaactcaacgagtggctatgggaattgaatgagaaaggagttcgggtcgtcgttctgctcgacagttgctactctggtggggcttggcggatcgggctgaaaaacatccgatctcccgaggactggaccccgcctcccaaccttcccgctgatgaaacggcagtgcagggaacacagaaaaagcctggccaccgcgatgcagatctcgacgtctcgtgggatatcaatccgaaagactttactgtcttagcagcttgtcagagcaaccaagtcgctgtagagaaaacggagaacggggtagtgtacggcgcgtttacgcttgctctatcgcagtatttccaagaccgaacaaactcgcaaacgtcaacataccataccattcgcgatcatacggctgagctcattgaatcatgggacctggcacagacaccccaggtttttggtcgagacagactggcttttctcgaagactatgagccagtctcagtggccccgatctttgggcgcatagaagaggacgccatcactcttcctgttggcaatatccacggtgttagcctagggacagaattcataacagttgcgactcactctacggctaaagtctccatttccgcagtgaacgatcttgagagcaagacaaagatgttggaaggatctgttcaagatctgtcgcaacccatccaggtcgttccattccggtggtgctccgggaagaccttaaccatcgtcattgacccaaaccttggtcattcgttccgggagaggcttgccacttatctgggaaatagaactgctagtcacattcgatacactaaaatgcctccatcaaagaacagtgcagactctgaagttacttggctttggttcggactctcgtttttcaagaggataatcagctacttcgggagttggaccactggtgatatgcggaacgtagaggatgccgattctccaatcaacaacgacgctgaagcggtctggttccggctagggccgagagagaacggcggcattaagatcaccggaccaaattggtcattaggggctcaaggatccgtacgagggtggaatgcgaagggagagactgaagatgaaagagctagggaatcggccgttgcattggcccatctgttcaggtttgagcagattttcaacgtacaaaacgagtctgagatggaggcgccgttcgaggtgaaaatcaaaccagttgacggcatcgcccgacagtttcaatttaattttgcaaatcaacaggcagaggaattgttcttcgccgtgattatcttgagcgcggggttccatgtcaaacagttgttcccagccaccgacaatctccaagcggtaccaccaaacggaaggaaatgttttggattcggcttaaagatccccgatgagctaagaggc

SEQ ID NO: 20279 - DNA, 2382 bp, Muscodor strobelii
  misc_feature: SGI cDNA ID NO. 566842
  misc_feature: Encodes the peptide sequence at SEQ ID NO 20280
atggccgaagacgatgtagagaaggcaaacgagactgcctcatcaaccactccagtgctaacgcaaggacccgctcccgatcgcccagctgctgtggatgccaacgatcgatttcaacccaagagtttcaagttttggtcgataatagtcagcattttcttggctctgtttctagtagcactcgacaggaccatcattggaacagcgacacccaatatcactgaagagttccacagcttgggagatatcggctggtatggaagtgcgtatcaactcacgacagccgcttcacaactgttgtttggtagagtctataaattctacgaggttaaaaagaccttcttggctaccgttctcgtatttgaaattggatctgtgatatgtggtgccgccccaagctcgattgttttcattgtcgggcgtgccattgctggcctcggcggtgcaggtatattctccggctgtaccattattatgataaatatggtacctcttcacaaacgaccaatcttccaaggtgccttcggtatagtctttgggctagcttctgcattgggccctctcataggtggcgctctgactgatgctatatcatggagatggtgtttctacatcaacctcccgattggcgctgtcgcgggactttgtctcatattgattctcaagccatccagagctcctcacgaaccggcaacaatatggcaacaagttcttcgtcttgatcctctcggtaccttttttcttgtcccgagcgttgtgtcccttctccttgctctccaatggggtggctcgacgtacgcatgggatagctggcgaatcatcttattactcgtcctcttcggggttctttttatcgccttcggaatcgttcaggttaaaacgccaaagacagccacggtacccgtgcgagtcattacccgtaggagtatttttgccgcagcagtattcatgtttgcactcgccgggtctttcttgatggccatatactacctaccgatctggtttcaggtagtgaagggcgcgagtgcgacgcaatctggcgtctatacacttcccttcgttctaagtctggtagttggcagtacgctatcaggagcctttacgcagaaggttggctactacgtaccagcgatgatcgcctctccaagtctgttggccaccggacagggtctcatgagtacatttcgggtgcacgaagtctcgtcacattggatcggtttccaagttatcgccgggtttggattgggtttaggcatgcaggcgtccagtcttgccgcccaggctgttcttcccatgcccgatgttccaattggtatcgcaattatgttcttttcccagcaacttggtggaggtattttcacgtccgttgggcaaaatctactgagcacatatctggtctctcatctcaccgatatccctggcatcgaccctgctacgatcacgaacgagggcgccacagacctcgtttcatcagttgcacctgaatatcagctggaggttaagacgatttataatgaagccttaaataagatcttcctaaccgcaatgggagttgcgttggttgccgtggtttcagcgctcttcatggagtggaagaacgtcaagaagacgggaccaccgaaaggtggccctcctggaggatcgcaaatccccattgcgccaaactccagcagcgttgctggagatagaccatcaggctcagcgcctggttcatccgatagaaattcctccgaaaatccttctgatacggaaaagaaggacaagctcaaacaagctcagcaggtagaagccaaagaggccaaagcggaagctctcgagagtcagacgccactaacgcctaagggctgcgatcattgcgaacattgcagactctcgcgagcactgacgctcaccccatcggagcgccaaagcatatcccatccaccccactccacatcgaccacacatctcacaccacatcgctcatctacatactcgccccaatcaccctctgtagaagctctcgaggaagccgcacggctcgcgacaattgctcgtgaggccgtggcgcagctcgaggaactgacacgcccattttccgtcatcgggatgtctaatagtaggcactcgttcgagggcacacgtaggctaacaccccctaatgcgccgcgacgtcagtccatagcggcgcctgagataccaccgcgcaagccgcggagacagccgacgacgcaggagctcgtcgaaaatgcacggcgagtatcggctcaattagagcgcgaacatagtgaagaaatggaaagagagaaagcgatagaatcggagaaacaacaacaccaggggtcgacctccgcgcagtctatcggatcatctctcaagtcttcaaattcaaatggaaggtga

SEQ ID NO: 20280 - protein, 793 aa, Muscodor strobelii
  misc_feature: SGI Peptide ID NO. 566842
  misc_feature (52)..(454): Pfam Id: PF07690 Pfam Desc: Major Facilitator Superfamily
  misc_feature (82)..(156): Pfam Id: PF00083 Pfam Desc: Sugar (and other) transporter
  misc_feature (1)..(608): NCBI GI: 40882232 Blast Desc: aflatoxin efflux pump AFLT [Neurospora crassa]
  misc_feature (22)..(544): NCBI GI: 256727026 Blast Desc: NECHADRAFT_34100 [Nectria haematococca mpVI 77-13-4]
  misc_feature (1)..(618): NCBI GI: 116196548 Blast Desc: CHGG_04872 [Chaetomium globosum CBS 148.51] gi|88180785|gb|EAQ88253.1| CHGG_04872 [Chaetomium globosum CBS 148.51]
  misc_feature (33)..(541): NCBI GI: 238494302 Blast Desc: efflux pump antibiotic resistance protein, [Aspergillus flavus NRRL3357] gi|220695037|gb|EED51380.1| efflux pump antibiotic resistance protein, [Aspergillus flavus NRRL3357]
  misc_feature (6)..(536): NCBI GI: 171688450 Blast Desc: protein product [Podospora anserina] gi|170944187|emb|CAP70297.1| protein product [Podospora anserina]
  misc_feature (3)..(541): NCBI GI: 169777181 Blast Desc: [Aspergillus oryzae RIB40] gi|83771793|dbj|BAE61923.1| protein product [Aspergillus oryzae]
  misc_feature (24)..(541): NCBI GI: 261352265 Blast Desc: aflatoxin efflux pump [Verticillium albo-atrum VaMs.102]
  misc_feature (7)..(535): NCBI GI: 46136159 Blast Desc: FG09595.1 [Gibberella zeae PH-1]
  misc_feature (18)..(603): NCBI GI: 39952271 Blast Desc: MGG_01778 [Magnaporthe grisea 70-15] gi|145020367|gb|EDK04496.1| MGG_01778 [Magnaporthe grisea 70-15]
  misc_feature (1)..(608): NCBI GI: 164429455 Blast Desc: NCU04391 [Neurospora crassa OR74A] gi|157073486|gb|EAA28232.2| conserved [Neurospora crassa OR74A]
MAEDDVEKANETASSTTPVLTQGPAPDRPAAVDANDRFQPKSFKFWSIIVSIFLALFLVALDRTIIGTATPNITEEFHSLGDIGWYGSAYQLTTAASQLLFGRVYKFYEVKKTFLATVLVFEIGSVICGAAPSSIVFIVGRAIAGLGGAGIFSGCTIIMINMVPLHKRPIFQGAFGIVFGLASALGPLIGGALTDAISWRWCFYINLPIGAVAGLCLILILKPSRAPHEPATIWQQVLRLDPLGTFFLVPSVVSLLLALQWGGSTYAWDSWRIILLLVLFGVLFIAFGIVQVKTPKTATVPVRVITRRSIFAAAVFMFALAGSFLMAIYYLPIWFQVVKGASATQSGVYTLPFVLSLVVGSTLSGAFTQKVGYYVPAMIASPSLLATGQGLMSTFRVHEVSSHWIGFQVIAGFGLGLGMQASSLAAQAVLPMPDVPIGIAIMFFSQQLGGGIFTSVGQNLLSTYLVSHLTDIPGIDPATITNEGATDLVSSVAPEYQLEVKTIYNEALNKIFLTAMGVALVAVVSALFMEWKNVKKTGPPKGGPPGGSQIPIAPNSSSVAGDRPSGSAPGSSDRNSSENPSDTEKKDKLKQAQQVEAKEAKAEALESQTPLTPKGCDHCEHCRLSRALTLTPSERQSISHPPHSTSTTHLTPHRSSTYSPQSPSVEALEEAARLATIAREAVAQLEELTRPFSVIGMSNSRHSFEGTRRLTPPNAPRRQSIAAPEIPPRKPRRQPTTQELVENARRVSAQLEREHSEEMEREKAIESEKQQHQGSTSAQSIGSSLKSSNSNGR

SEQ ID NO: 20281 - DNA, 588 bp, Muscodor strobelii
  misc_feature: SGI EST ID NO. CUFF.47468.0
  misc_feature: Variant of the nucleotide sequence at SEQ ID NO 20279
gcggtgcaggtatattctccggctgtaccattattatgataaatatggtgagtatttcatcgctctttgcgtcaagtgatatcacagagctaaatgtgcttaggtacctcttcacaaacgaccaatcttccaaggtgccttcggtatagtctttgggctagcttctgcattgggccctctcataggtggcgctctgactgatgctatatcatggagatggtgtttctacatcaacctcccgattggcgctgtcgcgggactttgtctcatattgattctcaagccatccagagctcctcacgaaccggcaacaatatggcaacaagttcttcgtcttgatcctctcggtaccttttttcttgtcccgagcgttgtgtcccttctccttgctctccaatggggtggctcgacgtacgcatgggatagctggcgaatcatcttattactcgtcctcttcggggttctttttatcgccttcggaatcgttcaggttaaaacgccaaagacagccacggtacccgtgcgagtcattacccgtaggagtatttttgccgcagcagtattcatgtttgcactcgccgggtcttt

SEQ ID NO: 20282 - DNA, 2928 bp, Muscodor strobelii
  misc_feature: SGI cDNA ID NO. 566843
  misc_feature: Encodes the peptide sequence at SEQ ID NO 20283
atgcccatgatttcgtctcctgttgtttaccctgccagctcctctccgacatctgcgaagcgttccaaaccacacacgaatctgcagccccgattacggactaaggctggcttcctgcttgacgactctgacgatgaggacaatcttcctgtaccggctgcaaagcgccaaatgctgggcagcccccgagatgcagcacctgccgaatacaccgaaccatcttctccgccagggccgccggacttaactgagaagatcagtgacgcggtcttgtccacggatgatgtgccccgtccgaacagtgaacccaatactaggagtcagacactgccatctctgtttatatcgggaaccaactcgatcttcaattcagtttcgcccgctgtggctcaagatactctaaagattacgacatgctcaggcgagactgttggtatcataaaacgagaaccgaacactagtgtgacatacgagcgcatggtagcagcgagatcaaagacgaaaaagggccgagccgagcgaagttactatggcatcgaaattcaccagctgatagacgagatctccaaggatctcgccagcaaagctgagaagcctgcccctgtccctgacgaagcactcccatccgtcgaacatcatgcttcgaagaagccgaagaaaaccctattatggaccgagaaataccgtgcgcgtaatttcatggacttggtcggtgacgatctcaccaaccgacaagtgctcaagtggttgaagcgatgggacactctggtctttccaggagcttcaagatctcgaccctcgttcaggcgaccgggtatcaaagctgaaactgaagaagagcagccgcatcgcaagatcctgcttttaacgggccctcctgggctcggcaagacaaccctggcacacgtatgtgctaagcaggccggctacgaagtcatggagatcaacgccagtgatgaccggagcagagacgtggtcaagaacagaatacggacaagtctcgcaacagaaagtgtcaaaaccgtgcaacactcgaaggcgcagcccgataggccgcagaaagtcgcacgtccagtctgcgttgtggtagacgaggttgatggcgtggtgactggctccggcggctccggagaaggtggcttcattaaggcattgatggaccttattacaaccggcgagaaaaatgcttcgggggaggaatccagtgctcaatatggtggcaagcgcaaaaagaaaggagatgattttcgacagatgagacctctaatactcatctgtaatgatgtataccatccctcattgcgaccattacgacaatccagtctagctgagatcatacacgttggcaagcctacagtggactcagtgattaatcggctgaagtccgtattcgagaaggaaggcatcacttgcgagaaagatgctgcccgcaagatatgtgagtcagcctggggtatcactagtgggatagacaccaaaagaggtgcacaaagtaccacagagggagaccttcgaggtatcatggttgttggagaatgggtggccggtcgactcaggtcatctgctttaaacagcccactgagcttgactcggcattgggtcgagcagcatgtcgttcgtgatcttgcccacgggggaggcggcacaagaggcgttggaagaggcaatgtcaaggatatcgttactcgtgtctttcaagatggcgccggcttccctaaggacagcatacccatttttgcaccttctacgaagcatttgcacgagcaacctcaagcacagcttggattctcagagcagcaaaagaagtatggcatagaacgtctgcaacagatggtcgagacaagtggcgatatggacagagttttgacggagatctactcggaatatcccagccacgagttcaacgatgattctttcttaagtaagccaaatcaggcatacgagtggatgcacttccatgacacctgctcctccagaatttttggtagccaagaatgggaacttggaccatacctcagtcaacctattctagcctgccatcatctatttgcttcgcctattcgacgggcaaacatgggctatgataaaaaatgggggaacaatggagaagaagaggcaacaccgcttccattctcaggtcccagggctgactacgcagctcgcgaaactgaaaaggagaacaggtcaatgcttcaagcccttcaagctcagctaccgccgacgttgatgcgctctttccgaagcgctgaggatgtttctgccgagtttctaccgtatctcatccgaatgatatcgccggatgtgaaaccagttgttgtgggagggagcggtgattcgcgcggcacagccagtgtcaggaaagacacagaaaaagccatggtccaacgcgctgcgaacgtacttgcagaggtcggaattgagctccaacggggcaagatcgagagcgagtcggcatttagtagggggccgcagtgggtatatcgcatggaaccggatctcgacgttctagccacatacgaaacctccgcagccgtactccacggcacgcaagcaccaacacgctacgcagtacgacaagtcctggatcaagagcttcaaaaagccactatattacgagagaacgcagccagacaagcacggtacaaggctggaagccacacctctgcagattacatatttgacgataaagagaacacgggcgcggcaaaggaaacgttattacccggaatacctgtgaagagggatttcttcggccgcatcatcaaaactgaggctcgtcccctctcagagacggacggtaataaggcgaagaagggcagcgagcctttgggcaaagctgagactaaggtatgggttacgtatcatgaaggtctgaataatgctgttaggaaacctgtcacgttggatgagctactcagaggcttgtag

SEQ ID NO: 20283 - protein, 975 aa, Muscodor strobelii
  misc_feature: SGI Peptide ID NO. 566843
  misc_feature (286)..(508): Pfam Id: PF00004 Pfam Desc: ATPase family associated with various cellular activities (AAA)
  misc_feature (286)..(391): Pfam Id: PF00004 Pfam Desc: ATPase family associated with various cellular activities (AAA)
  misc_feature (14)..(975): NCBI GI: 46121897 Blast Desc: FG05326.1 [Gibberella zeae PH-1]
  misc_feature (133)..(975): NCBI GI: 261359733 Blast Desc: chromosome transmission fidelity protein [Verticillium albo-atrum VaMs.102]
  misc_feature (5)..(975): NCBI GI: 116194688 Blast Desc: CHGG_03942 [Chaetomium globosum CBS 148.51] gi|88179855|gb|EAQ87323.1| CHGG_03942 [Chaetomium globosum CBS 148.51]
  misc_feature (5)..(975): NCBI GI: 171683465 Blast Desc: protein product [Podospora anserina] gi|170941692|emb|CAP67346.1| protein product [Podospora anserina]
  misc_feature (160)..(975): NCBI GI: 164424374 Blast Desc: NCU07313 [Neurospora crassa OR74A] gi|157070486|gb|EAA33235.2| conserved [Neurospora crassa OR74A]
  misc_feature (118)..(975): NCBI GI: 256720734 Blast Desc: NECHADRAFT_85735 [Nectria haematococca mpVI 77-13-4]
  misc_feature (1)..(975): NCBI GI: 156063576 Blast Desc: SS1G_01906 [Sclerotinia sclerotiorum 1980] gi|154697240|gb|EDN96978.1| SS1G_01906 [Sclerotinia sclerotiorum 1980]
  misc_feature (1)..(953): NCBI GI: 145607269 Blast Desc: MGG_04123 [Magnaporthe grisea 70-15] gi|145014858|gb|EDJ99426.1| MGG_04123 [Magnaporthe grisea 70-15]
  misc_feature (26)..(975): NCBI GI: 239610529 Blast Desc: sister chromatid cohesion factor [Ajellomyces dermatitidis ER-3]
  misc_feature (26)..(975): NCBI GI: 261195410 Blast Desc: sister chromatid cohesion factor [Ajellomyces dermatitidis SLH14081] gi|239587981|gb|EEQ70624.1| sister chromatid cohesion factor [Ajellomyces dermatitidis SLH14081]
MPMISSPVVYPASSSPTSAKRSKPHTNLQPRLRTKAGFLLDDSDDEDNLPVPAAKRQMLGSPRDAAPAEYTEPSSPPGPPDLTEKISDAVLSTDDVPRPNSEPNTRSQTLPSLFISGTNSIFNSVSPAVAQDTLKITTCSGETVGIIKREPNTSVTYERMVAARSKTKKGRAERSYYGIEIHQLIDEISKDLASKAEKPAPVPDEALPSVEHHASKKPKKTLLWTEKYRARNFMDLVGDDLTNRQVLKWLKRWDTLVFPGASRSRPSFRRPGIKAETEEEQPHRKILLLTGPPGLGKTTLAHVCAKQAGYEVMEINASDDRSRDVVKNRIRTSLATESVKTVQHSKAQPDRPQKVARPVCVVVDEVDGVVTGSGGSGEGGFIKALMDLITTGEKNASGEESSAQYGGKRKKKGDDFRQMRPLILICNDVYHPSLRPLRQSSLAEIIHVGKPTVDSVINRLKSVFEKEGITCEKDAARKICESAWGITSGIDTKRGAQSTTEGDLRGIMVVGEWVAGRLRSSALNSPLSLTRHWVEQHVVRDLAHGGGGTRGVGRGNVKDIVTRVFQDGAGFPKDSIPIFAPSTKHLHEQPQAQLGFSEQQKKYGIERLQQMVETSGDMDRVLTEIYSEYPSHEFNDDSFLSKPNQAYEWMHFHDTCSSRIFGSQEWELGPYLSQPILACHHLFASPIRRANMGYDKKWGNNGEEEATPLPFSGPRADYAARETEKENRSMLQALQAQLPPTLMRSFRSAEDVSAEFLPYLIRMISPDVKPVVVGGSGDSRGTASVRKDTEKAMVQRAANVLAEVGIELQRGKIESESAFSRGPQWVYRMEPDLDVLATYETSAAVLHGTQAPTRYAVRQVLDQELQKATILRENAARQARYKAGSHTSADYIFDDKENTGAAKETLLPGIPVKRDFFGRIIKTEARPLSETDGNKAKKGSEPLGKAETKVWVTYHEGLNNAVRKPVTLDELLRGL

SEQ ID NO: 20284 - DNA, 3396 bp, Muscodor strobelii
  misc_feature: SGI EST ID NO. CUFF.47472.0
  misc_feature: Variant of the nucleotide sequence at SEQ ID NO 20282
cggccccgccagaccgggataagacgtgacgcgtgaagacgcgccttggcccattgagagcctaccattaacttaggtggacgattgaaatataggtacatcttggtgcaagtgttaaccagcaagccaaacaccaaacaataaacacgtgagctcttctcctgtcaattgcaagttcgacgtccatgacttcaaagtaatgaaatttgttcaaaaatgcccatgatttcgtctcctgttgtttaccctgccagctcctctccgacatctgcgaagcgttccaaaccacacacgaatctgcagccccgattacggactaaggctggcttcctgcttgacgactctgacgatgaggacaatcttcctgtaccggctgcaaagcgccaaatgctgggcagcccccgagatgcagcacctgccgaatacaccgaaccatcttctccgccagggccgccggacttaactgagaagatcagtgacgcggtcttgtccacggatgatgtgccccgtccgaacagtgaacccaatactaggagtcagacactgccatctctgtttatatcgggaaccaactcgatcttcaattcagtttcgcccgctgtggctcaagatactctaaagattacgacatgctcaggcgagactgttggtatcataaaacgagaaccgaacactagtgtgacatacgagcgcatggtagcagcgagatcaaagacgaaaaagggccgagccgagcgaagttactatggcatcgaaattcaccagctgatagacgagatctccaaggatctcgccagcaaagctgagaagcctgcccctgtccctgacgaagcactcccatccgtcgaacatcatgcttcgaagaagccgaagaaaaccctattatggaccgagaaataccgtgcgcgtaatttcatggacttggtcggtgacgatctcaccaaccgacaagtgctcaagtggttgaagcgatgggacactctggtctttccaggagcttcaagatctcgaccctcgttcaggcgaccgggtatcaaagctgaaactgaagaagagcagccgcatcgcaagatcctgcttttaacgggccctcctgggctcggcaagacaaccctggcacacgtatgtgctaagcaggccggctacgaagtcatggagatcaacgccagtgatgaccggagcagagacgtggtcaagaacagaatacggacaagtctcgcaacagaaagtgtcaaaaccgtgcaacactcgaaggcgcagcccgataggccgcagaaagtcgcacgtccagtctgcgttgtggtagacgaggttgatggcgtggtgactggctccggcggctccggagaaggtggcttcattaaggcattgatggaccttattacaaccggcgagaaaaatgcttcgggggaggaatccagtgctcaatatggtggcaagcgcaaaaagaaaggagatgattttcgacagatgagacctctaatactcatctgtaatgatgtataccatccctcattgcgaccattacgacaatccagtctagctgagatcatacacgttggcaagcctacagtggactcagtgattaatcggctgaagtccgtattcgagaaggaaggcatcacttgcgagaaagatgctgcccgcaagatatgtgagtcagcctggggtatcactagtgggatagacaccaaaagaggtgcacaaagtaccacagagggagaccttcgaggtatcatggttgttggagaatgggtggccggtcgactcaggtcatctgctttaaacagcccactgagcttgactcggcattgggtcgagcagcatgtcgttcgtgatcttgcccacgggggaggcggcacaagaggcgttggaagaggcaatgtcaaggatatcgttactcgtgtctttcaagatggcgccggcttccctaaggacagcatacccatttttgcaccttctacgaagcatttgcacgagcaacctcaagcacagcttggattctcagagcagcaaaagaagtatggcatagaacgtctgcaacagatggtcgagacaagtggcgatatggacagagttttgacggagatctactcggaatatcccagccacgagttcaacgatgattctttcttaagtaagccaaatcaggcatacgagtggatgcacttccatgacacctgctcctccagaatttttggtagccaagaatgggaacttggaccatacctcagtcaacctattctagcctgccatcatctatttgcttcgcctattcgacgggcaaacatgggctatgataaaaaatgggggaacaatggagaagaagaggcaacaccgcttccattctcaggtcccagggctgactacgcagctcgcgaaactgaaaaggagaacaggtcaatgcttcaagcccttcaagctcagctaccgccgacgttgatgcgctctttccgaagcgctgaggatgtttctgccgagtttctaccgtatctcatccgaatgatatcgccggatgtgaaaccagttgttgtgggagggagcggtgattcgcgcggcacagccagtgtcaggaaagacacagaaaaagccatggtccaacgcgctgcgaacgtacttgcagaggtcggaattgagctccaacggggcaagatcgagagcgagtcggcatttagtagggggccgcagtgggtatatcgcatggaaccggatctcgacgttctagccacatacgaaacctccgcagccgtactccacggcacgcaagcaccaacacgctacgcagtacgacaagtcctggatcaagagcttcaaaaagccactatattacgagagaacgcagccagacaagcacggtacaaggctggaagccacacctctgcagattacatatttgacgataaagagaacacgggcgcggcaaaggaaacgttattacccggaatacctgtgaagagggatttcttcggccgcatcatcaaaactgaggctcgtcccctctcagagacggacggtaataaggcgaagaagggcagcgagcctttgggcaaagctgagactaaggtatgggttacgtatcatgaaggtctgaataatgctgttaggaaacctgtcacgttggatgagctactcagaggcttgtagagagatggtggcgaagcttgcataatacggcgttcaagtagcatctttgttttgatactataatgaacatttatcacttctgacagctaagtgcaagagctttgtctttgttgcgttggccccattcttcggatacctcaacggccggatatagcggcgttattcgctcttaaattcggtcatcccgttagtagtacttccacatgaggatctgcaatgcttctgcgagcttttacataatcaatttctggc

SEQ ID NO: 20285 - DNA, 1605 bp, Muscodor strobelii
  misc_feature: SGI cDNA ID NO. 566844
  misc_feature: Elevated expression when VOC is produced
  misc_feature: Encodes the peptide sequence at SEQ ID NO 20286
atgagaacacgggcgcgcgcgtgccagggctgccagcggttgaaaatcaagtgtgaatggaacacggcagccgatactcgatgcgtacggtgctcctgtagctcgctggagtgcgtgccgggtgcgccccgattgcagcgggaccggattcaggatcttgaggcccgcatcgaggaacttcaggccgcaatcgagagcgctggcgcggaacggccttccggcggcttcctcgacctggtgcaccataatcgcgccgtcctctcgttcctcgatgcccgcatccagcctgagagacagcgtgcgctactcgacctctatgcccagcaggttggcgccgtttggcccgttgttcaactaccagcagaggaccttgacgctatccgtgccgggtccccaacgctactgttatccgtgctagcgtccgccctcacgcagcggcagcagcatgtcgatcgagacacacaccatgaacttgtgcgcgagactctcagcgtcctcgccaacgaggttatttgcagggggaggcgatctttggagctcgtgcaggcgcttcttgtcgttgccttctggacaaagcccatagatgcgggacaacacgcgagctgctaccagcttgtccagctagccgtcgaaatggctatcgacttgagcatggcaggccattatctgccgccgtccccgtcggtctacttcttccgttccgtcgacggagcatctcttgcctccaggcgcacctggcttgtctgctacgtcacagttacggcatcctcggccagcaccaggcgattgaacaccgtttcgtgggatacataccattccgattgtctttcgcgcctcgaggctagtcctgaatcatctgacgtcttgctctgtcaaatcgttcgtatcgtgcgcatcgtcaacgatatctgtgatcacttgaatttatgtcgcttaactgcattcgttgacagcaacgagcacagtacttacgctttgttggaaagtttagaatacaagatcgatgcatggggcactcaagtcccttcaagtcttgcctcctcactagtgcttcaattctggcgaagcgtggctatgatgtatatcttcgaggtcgttctacacactcgtaccaacaagtccttctttgccgcaccgtatatccccggccgcatccccgtcaaggatcttccagctcctatcgacatgatcccctcactcggaatagcgctcaaagctcttatccggcagtgccacgctgttattgatacggcactcacgattggccccgatttgatcatcagtctcccttccttttgcttcgctccgatgatcccctactcgctcttcgtactactcaccatcttcgcagctacgaccgtccctggaaacacctacgggcgcttcatattgacggaggactgctgcatcgagcagtacaacgcaaaactcaaggtctttagggaacaggtgaaatgcctcgatcctacaacgagcagctacgcgacccagcttatcggttcgacagtatggctcgaagaatggtacaatacctacaccggcatcatccagcgctacaaagacggtcagctcctggggcaagagtgtctggacaagttagactag

SEQ ID NO: 20286 - protein, 534 aa, Muscodor strobelii
  misc_feature: SGI Peptide ID NO. 566844
  misc_feature (1)..(520): NCBI GI: 169595390 Blast Desc: SNOG_00433 [Phaeosphaeria nodorum SN15] gi|111070808|gb|EAT91928.1| SNOG_00433 [Phaeosphaeria nodorum SN15]
  misc_feature (1)..(520): NCBI GI: 189207575 Blast Desc: conserved [Pyrenophora tritici-repentis Pt-1C-BFP] gi|187976214|gb|EDU42840.1| conserved [Pyrenophora tritici-repentis Pt-1C-BFP]
  misc_feature (1)..(519): NCBI GI: 261361497 Blast Desc: conserved [Verticillium albo-atrum VaMs.102]
  misc_feature (1)..(522): NCBI GI: 46124431 Blast Desc: FG06593.1 [Gibberella zeae PH-1]
  misc_feature (1)..(520): NCBI GI: 256720048 Blast Desc: NECHADRAFT_56534 [Nectria haematococca mpVI 77-13-4]
  misc_feature (2)..(516): NCBI GI: 60729591 Blast Desc: NECHADRAFT_56534 [Nectria haematococca mpVI 77-13-4]
  misc_feature (102)..(481): NCBI GI: 154301173 Blast Desc: BC1G_10559 [Botryotinia fuckeliana B05.10] gi|150856307|gb|EDN31499.1| BC1G_10559 [Botryotinia fuckeliana B05.10]
  misc_feature (116)..(477): NCBI GI: 119188819 Blast Desc: CIMG_04457 [Coccidioides immitis RS]
  misc_feature (102)..(481): NCBI GI: 156057027 Blast Desc: SS1G_04244 [Sclerotinia sclerotiorum 1980] gi|154702030|gb|EDO01769.1| SS1G_04244 [Sclerotinia sclerotiorum 1980]
  misc_feature (116)..(477): NCBI GI: 240111469 Blast Desc: Fungal specific transcription factor, [Coccidioides posadasii C735 delta SOWgp]
  misc_feature: Useful for introducing or modulating the production of volatile compounds
MRTRARACQGCQRLKIKCEWNTAADTRCVRCSCSSLECVPGAPRLQRDRIQDLEARIEELQAAIESAGAERPSGGFLDLVHHNRAVLSFLDARIQPERQRALLDLYAQQVGAVWPVVQLPAEDLDAIRAGSPTLLLSVLASALTQRQQHVDRDTHHELVRETLSVLANEVICRGRRSLELVQALLVVAFWTKPIDAGQHASCYQLVQLAVEMAIDLSMAGHYLPPSPSVYFFRSVDGASLASRRTWLVCYVTVTASSASTRRLNTVSWDTYHSDCLSRLEASPESSDVLLCQIVRIVRIVNDICDHLNLCRLTAFVDSNEHSTYALLESLEYKIDAWGTQVPSSLASSLVLQFWRSVAMMYIFEVVLHTRTNKSFFAAPYIPGRIPVKDLPAPIDMIPSLGIALKALIRQCHAVIDTALTIGPDLIISLPSFCFAPMIPYSLFVLLTIFAATTVPGNTYGRFILTEDCCIEQYNAKLKVFREQVKCLDPTTSSYATQLIGSTVWLEEWYNTYTGIIQRYKDGQLLGQECLDKLD

SEQ ID NO: 20287 - DNA, 2281 bp, Muscodor strobelii
  misc_feature: SGI EST ID NO. CUFF.47474.0
  misc_feature: Variant of the nucleotide sequence at SEQ ID NO 20285
cttcgaagttgcgcaaaaatactcaagatgacttcaggatgactttaggctgaggcctgaagaggacaaggcgcgcccaccagagaagcaatgtgccggatggcagttacgagaagctgacacagcaaggctctaccaaagtagcatactctagaccaactggctatgagaacacgggcgcgcgcgtgccagggctgccagcggttgaaaatcaagtgtgaatggaacacggcagccgatactcgatgcgtacggtgctcctgtagctcgctggagtgcgtgccgggtgcgccccgattgcagcgggaccggattcaggatcttgaggcccgcatcgaggaacttcaggccgcaatcgagagcgctggcgcggaacggccttccggcggcttcctcgacctggtgcaccataatcgcgccgtcctctcgttcctcgatgcccgcatccagcctgagagacagcgtgcgctactcgacctctatgcccagcaggttggcgccgtttggcccgttgttcaactaccagcagaggaccttgacgctatccgtgccgggtccccaacgctactgttatccgtgctagcgtccgccctcacgcagcggcagcagcatgtcgatcgagacacacaccatgaacttgtgcgcgagactctcagcgtcctcgccaacgaggttatttgcagggggaggcgatctttggagctcgtgcaggcgcttcttgtcgttgccttctggacaaagcccatagatgcgggacaacacgcgagctgctaccagcttgtccagctagccgtcgaaatggctatcgacttgagcatggcaggccattatctgccgccgtccccgtcggtctacttcttccgttccgtcgacggagcatctcttgcctccaggcgcacctggcttgtctgctacgtcacagttacggcatcctcggccagcaccaggcgattgaacaccgtttcgtgggatacataccattccgattgtctttcgcgcctcgaggctagtcctgaatcatctgacgtcttgctctgtcaaatcgttcgtatcgtgcgcatcgtcaacgatatctgtgatcacttgaatttatgtcgcttaactgcattcgttgacagcaacgagcacagtacttacgctttgttggaaagtttagaatacaagatcgatgcatggggcactcaagtcccttcaagtcttgcctcctcactagtgcttcaattctggcgaagcgtggctatgatgtatatcttcgaggtcgttctacacactcgtaccaacaagtccttctttgccgcaccgtatatccccggccgcatccccgtcaaggatcttccagctcctatcgacatgatcccctcactcggaatagcgctcaaagctcttatccggcagtgccacgctgttattgatacggcactcacgattggccccgatttgatcatcagtctcccttccttttgcttcgctccgatgatcccctactcgctcttcgtactactcaccatcttcgcagctacgaccgtccctggaaacacctacgggcgcttcatattgacggaggactgctgcatcgagcagtacaacgcaaaactcaaggtctttagggaacaggtgaaatgcctcgatcctacaacgagcagctacgcgacccagcttatcggttcgacagtatggctcgaagaatggtacaatacctacaccggcatcatccagcgctacaaagacggtcagctcctggggcaagagtgtctggacaagttagactagtatcgcaaatgtcagccaccaaacccgtgacgtgatccatgctacgtagctcagcgctgagcaagccgcgccattatacaagtaattatttccatgcttcgtcaatggcaggctggagtcgggataactggcgcaatcgtgtagcacgatgggtacagtacagattaacgcaacgaatagtgctctgatagcagtccgatggctcagcgagaatgattcagaatgttctgtagcatatatgtacagattcaggatctgatagagaatgccctggatgtatatgtaaggacgtgttaacaatgcgtttggacgagacacaggtaagtgccctgtcatggttttgatacctgtggcctggctgggtatcaatcgcaagagttcaggacttgtctagaattggctgaacagagatagtagaggtttccccttttccaaaacaaatgtttcacattaatttccaatggtacaagggacaaattactctagagacaagtttctagatacattagcg

SEQ ID NO: 20288 - DNA, 1278 bp, Muscodor strobelii
  misc_feature: SGI cDNA ID NO. 566845
  misc_feature: Encodes the peptide sequence at SEQ ID NO 20289
atgcgtacctctttctggtcctgtttggctctggcgggctctgttgtcgcgcagggtgatctagctgcgctcctcgcttcccaagatgatctcagcacgttgcttgagcttgttagtctcgtcgatggtcttgcggataagctcgggtcatccaccaacatcaccattgtggctccaacgaacgacgcttttgaccgtctccggcgtgatatccctgagggcgtcgctgtcgagaacatgaacgacaccatctccattggcgctcttctagttcttcacgtcttcaagggcgtctatccgtccgacgtcatcactgacgtccccatcttcgcacaaacgctgcttgacgactcgtatattacgttcaatcagccctttgccaacttcaccggcggtgcctataacgggctcgtgaagaacggcgaggatgtctgcgtgctctcgtccgaggagaccatctcaactgtcactcaagctgatatcaaactgggcgagggcatcaccatccacaagatcgacacagtcttgtcgttcggcacaccgctccagctcttctcgtatcgggccggctacctcgcctttaacgccgcactagaagccgcggacttgggtattgcctttggcctcaccggcgctgacgacaaagggctcaatatctccgatttcaccgttttcataccaaataatgaggccttctacgacatcgggtcggtcctggaaacggcggatcttaaaacactccaagaggttctgcggtaccacatcatccccaacgacgtcgtattctcgccctcgcttggcaacatcaccgtgccttctcttcagggcgaagacctaaccttcaccgtcctacctgacggaactgtctgggttaacaacgccaagataatatttcctaacaacatcttgtataacggagtggcccacgtgatcgatagcgtcttgagcccgggcaagttcgatcgggcctctcttgagccctcggcgcccgcctcggatcgggtcgctttcccgagtgccacttcggtctcccctttacccttcacgagcgttacctttgccggcgacaaaatgacctacactggtacgcctgcgctgctgcagaccatcgctgctgtaggaccgcagacgaccgccgcgaccaaccccacgccaagccagacaggctccggtccagtccctagtagttcagtcccagtggccagcggtagcacacttgctcccatggggagtctaatggctttggccctggtcgtcgctcatttttcctccatctaa

SEQ ID NO: 20289 - protein, 425 aa, Muscodor strobelii
  misc_feature: SGI Peptide ID NO. 566845
  misc_feature (190)..(317): Pfam Id: PF02469 Pfam Desc: Fasciclin domain
  misc_feature (30)..(178): Pfam Id: PF02469 Pfam Desc: Fasciclin domain
  misc_feature (30)..(70): Pfam Id: PF02469 Pfam Desc: Fasciclin domain
  misc_feature (1)..(368): NCBI GI: 189207577 Blast Desc: conserved [Pyrenophora tritici-repentis Pt-1C-BFP] gi|187976215|gb|EDU42841.1| conserved [Pyrenophora tritici-repentis Pt-1C-BFP]
  misc_feature (1)..(390): NCBI GI: 169595388 Blast Desc: SNOG_00432 [Phaeosphaeria nodorum SN15] gi|111070807|gb|EAT91927.1| SNOG_00432 [Phaeosphaeria nodorum SN15]
  misc_feature (11)..(396): NCBI GI: 261361496 Blast Desc: conserved [Verticillium albo-atrum VaMs.102]
  misc_feature (15)..(415): NCBI GI: 256720049 Blast Desc: NECHADRAFT_105769 [Nectria haematococca mpVI 77-13-4]
  misc_feature (18)..(373): NCBI GI: 46124429 Blast Desc: FG06592.1 [Gibberella zeae PH-1]
  misc_feature (1)..(350): NCBI GI: 169609703 Blast Desc: SNOG_07944 [Phaeosphaeria nodorum SN15] gi|111063100|gb|EAT84220.1| SNOG_07944 [Phaeosphaeria nodorum SN15]
  misc_feature (1)..(343): NCBI GI: 261354966 Blast Desc: beta-Ig-H3/Fasciclin [Verticillium albo-atrum VaMs.102]
  misc_feature (8)..(350): NCBI GI: 256728620 Blast Desc: NECHADRAFT_72611 [Nectria haematococca mpVI 77-13-4]
  misc_feature (30)..(333): NCBI GI: 261353642 Blast Desc: beta-Ig-H3/fasciclin [Verticillium albo-atrum VaMs.102]
  misc_feature (1)..(350): NCBI GI: 242788417 Blast Desc: conserved [Talaromyces stipitatus ATCC 10500] gi|218721361|gb|EED20780.1| conserved [Talaromyces stipitatus ATCC 10500]
MRTSFWSCLALAGSVVAQGDLAALLASQDDLSTLLELVSLVDGLADKLGSSTNITIVAPTNDAFDRLRRDIPEGVAVENMNDTISIGALLVLHVFKGVYPSDVITDVPIFAQTLLDDSYITFNQPFANFTGGAYNGLVKNGEDVCVLSSEETISTVTQADIKLGEGITIHKIDTVLSFGTPLQLFSYRAGYLAFNAALEAADLGIAFGLTGADDKGLNISDFTVFIPNNEAFYDIGSVLETADLKTLQEVLRYHIIPNDVVFSPSLGNITVPSLQGEDLTFTVLPDGTVWVNNAKIIFPNNILYNGVAHVIDSVLSPGKFDRASLEPSAPASDRVAFPSATSVSPLPFTSVTFAGDKMTYTGTPALLQTIAAVGPQTTAATNPTPSQTGSGPVPSSSVPVASGSTLAPMGSLMALALVVAHFSSI

SEQ ID NO: 20290 - DNA, 1816 bp, Muscodor strobelii
  misc_feature: SGI EST ID NO. CUFF.47477.0
  misc_feature: Variant of the nucleotide sequence at SEQ ID NO 20288
aaaaactggggacggcgaaaattggccgtctccaaaaaagcgctccccttgacgatgccctcatttctggtccggaccaggattgcacgacaattgctctcgtaactgacgagacaatgcccttgcttacatcctttttgtaatttcgaacgtacgactgcagtcattattacagcttcgtagacgtcatgactttcagagttaagatcatggctctcaagcagccgagagttgcttttttgactttacgccgacgatggtgtatataaattatgtcggtgtctctcgtcaaaggtctggcagctcaaatatacatcgatacaaagcctgcttcgccagttctgtcttgtgcttcgtccattaataacgatccactttactctcgtgttttgaatcttcatcatgcgtacctctttctggtcctgtttggctctggcgggctctgttgtcgcgcagggtgatctagctgcgctcctcgcttcccaagatgatctcagcacgttgcttgagcttgttagtctcgtcgatggtcttgcggataagctcgggtcatccaccaacatcaccattgtggctccaacgaacgacgcttttgaccgtctccggcgtgatatccctgagggcgtcgctgtcgagaacatgaacgacaccatctccattggcgctcttctagttcttcacgtcttcaagggcgtctatccgtccgacgtcatcactgacgtccccatcttcgcacaaacgctgcttgacgactcgtatattacgttcaatcagccctttgccaacttcaccggcggtgcctataacgggctcgtgaagaacggcgaggatgtctgcgtgctctcgtccgaggagaccatctcaactgtcactcaagctgatatcaaactgggcgagggcatcaccatccacaagatcgacacagtcttgtcgttcggcacaccgctccagctcttctcgtatcgggccggctacctcgcctttaacgccgcactagaagccgcggacttgggtattgcctttggcctcaccggcgctgacgacaaagggctcaatatctccgatttcaccgttttcataccaaataatgaggccttctacgacatcgggtcggtcctggaaacggcggatcttaaaacactccaagaggttctgcggtaccacatcatccccaacgacgtcgtattctcgccctcgcttggcaacatcaccgtgccttctcttcagggcgaagacctaaccttcaccgtcctacctgacggaactgtctgggttaacaacgccaagataatatttcctaacaacatcttgtataacggagtggcccacgtgatcgatagcgtcttgagcccgggcaagttcgatcgggcctctcttgagccctcggcgcccgcctcggatcgggtcgctttcccgagtgccacttcggtctcccctttacccttcacgagcgttacctttgccggcgacaaaatgacctacactggtacgcctgcgctgctgcagaccatcgctgctgtaggaccgcagacgaccgccgcgaccaaccccacgccaagccagacaggctccggtccagtccctagtagttcagtcccagtggccagcggtagcacacttgctcccatggggagtctaatggctttggccctggtcgtcgctcatttttcctccatctaaggaaaaagacaagatctcacggagatgagggatgaccgatcgtggaagctagatggaacaagtgcaggataatcttcgaaccaactactgaatagttagtgaataatgctagtatatacacacatctgaaccccta

SEQ ID NO: 20291 - DNA, 852 bp, Muscodor strobelii
  misc_feature: SGI cDNA ID NO. 566846
  misc_feature: Encodes the peptide sequence at SEQ ID NO 20292
atgagagtctcgaagacagttacattccttgccgctgccacaggcatctcagcctcgcccgtcgagctcgatgagaggtctgtctctcccggtactggaactagcaatggatattactattcattctggacagatggccaaggaagcgtgacctacaacaatgacgccgctggcaaatacgatgtcacatggagcaacgtgaacaacttcgtggctggcaaaggctggaacccaggcgctgctcgcgtgatcggatacaacgggacgtggaacggggcaagtgtgaacagttacctgtctgtctacggctggaccacgaacccattgatcgagtactatatcgtcgagtcttatggtacctacaacccatcgaccggtgccactctacttggcactgtgaattctgatggtggtacctacaacatctataagactcagcgtgtgaatcaaccttccatcgaaggtactagcacgttcaaccagttctggtctgtaagacagtcgaagagagtaggaggaacggtgacggttaaaaaccacttcgatgcttgggctaaatctggtctaacgctcggcacgttcaactaccaaattctcgcgactgagggttaccagagcagcggctctgcgtcgatccaggtctgggacgcaggtactggtgccggttctggcactggcggtggcggcagcacgcccacaactacgacaactgctggaggctctgcacctactggtggctgttcggtcgcgaagtatgggcagtgcggaggacagtcatggaccggctgcaaggcttgtgcttcagggtcgacttgccaggctgcgaacgcgtattattcccaatgcttgtaa

SEQ ID NO: 20292 - protein, 283 aa, Muscodor strobelii
  misc_feature: SGI Peptide ID NO. 566846
  misc_feature (251)..(279): Pfam Id: PF00734 Pfam Desc: Fungal cellulose binding domain
  misc_feature (33)..(214): Pfam Id: PF00457 Pfam Desc: Glycosyl hydrolases family 11
  misc_feature (19)..(214): NCBI GI: 164562256 Blast Desc: xylanase [Annulohypoxylon stygium]
  misc_feature (4)..(214): NCBI GI: 109390308 Blast Desc: xylanase [Alternaria sp. HB186]
  misc_feature (3)..(283): NCBI GI: 28950192 Blast Desc: endo-1, 4-beta-xylanase B precursor [Neurospora crassa]
  misc_feature (10)..(283): NCBI GI: 156059212 Blast Desc: SS1G_03618 [Sclerotinia sclerotiorum 1980] gi|154701405|gb|EDO01144.1| SS1G_03618 [Sclerotinia sclerotiorum 1980]
  misc_feature (10)..(283): NCBI GI: 167599626 Blast Desc: endo-1,4-beta-xylanase B precursor [Phanerochaete chrysosporium]
  misc_feature (10)..(283): NCBI GI: 12006977 Blast Desc: AF301904_1 endo-1,4-B-xylanase B [Phanerochaete chrysosporium]
  misc_feature (10)..(283): NCBI GI: 12006979 Blast Desc: AF301905_1 endo-1,4-B-xylanase B [Phanerochaete chrysosporium]
  misc_feature (3)..(214): NCBI GI: 116205351 Blast Desc: CHGG_10559 [Chaetomium globosum CBS 148.51] gi|88176687|gb|EAQ84155.1| CHGG_10559 [Chaetomium globosum CBS 148.51]
  misc_feature (4)..(214): NCBI GI: 189209652 Blast Desc: endo-1,4-beta-xylanase A [Pyrenophora tritici-repentis Pt-1C-BFP] gi|187977251|gb|EDU43877.1| endo-1,4-beta-xylanase A [Pyrenophora tritici-repentis Pt-1C-BFP]
  misc_feature (4)..(214): NCBI GI: 169619301 Blast Desc: SNOG_12845 [Phaeosphaeria nodorum SN15] gi|160703789|gb|EAT79645.2| SNOG_12845 [Phaeosphaeria nodorum SN15]
  misc_feature (7)..(214): SWISSPROT Homolog: EC 3.2.1.8 Endo-1,4-beta-xylanase
MRVSKTVTFLAAATGISASPVELDERSVSPGTGTSNGYYYSFWTDGQGSVTYNNDAAGKYDVTWSNVNNFVAGKGWNPGAARVIGYNGTWNGASVNSYLSVYGWTTNPLIEYYIVESYGTYNPSTGATLLGTVNSDGGTYNIYKTQRVNQPSIEGTSTFNQFWSVRQSKRVGGTVTVKNHFDAWAKSGLTLGTFNYQILATEGYQSSGSASIQVWDAGTGAGSGTGGGGSTPTTTTTAGGSAPTGGCSVAKYGQCGGQSWTGCKACASGSTCQAANAYYSQCL

SEQ ID NO: 20293 - DNA, 631 bp, Muscodor strobelii
  misc_feature: SGI EST ID NO. CUFF.47484.0
  misc_feature: Variant of the nucleotide sequence at SEQ ID NO 20291
gaaattgctgtaataggaaataacgactagctatagtattgtcttatataaaccatgacgatctgatatcttcaacaggtggaccgccgcgccaggatctttgaacatagcactcacttgccagtctctacttaattttgctcatcgttcatcatgagagtctcgaagacagttacattccttgccgctgccacaggcatctcagcctcgcccgtcgagctcgatgagaggtctgtctctcccggtactggaactagcaatggatattactattcattctggacagatggccaaggaagcgtgacctacaacaatgacgccgctggcaaatacgatgtcacatggagcaacgtgaacaacttcgtggctggcaaaggctggaacccaggcgctgctcgcgtgatcggatacaacgggacgtggaacggggcaagtgtgaacagttacctgtctgtctacggctggaccacgaacccattgatcgagtactatatcgtcgagtcttatggtacctacaacccatcgaccggtgccactctacttggcactgtgaattctgatggtggtacctacaacatctataagactcagcgtgtgaatcaaccttccatcgaaggtactagcacgttca

SEQ ID NO: 20294 - DNA, 852 bp, Muscodor strobelii
  misc_feature: SGI cDNA ID NO. 566847
  misc_feature: Encodes the peptide sequence at SEQ ID NO 20295
atgaaggttttaagtctcacgtctttggttgcggtggccagcgcgagtgctgtggttaccgaacgtcagagctgcccgaacgtctacgtctttggagctcgtgagacaaccgcacctccaggctatggcacagctggaggcttggtcaatatggttgtgtccgcaaatccaggcgcgggatcatctgctatcacttatcccgcttgtggtggtcaagcatcatgtggcggcgttagttacgataactctgcaactcaaggaacagcggccgtggtatcagccgtcactgcatacaacaaacaatgtccgaacaccaagatcgttctgatcggctactctcagggcggccagatcatggataatgctttttgcggtggagctggcgccaccctcactgggactgctttggccgccgttaaggctgtcattttcatgggtgatccgcacaacgttgctggtcttccttacaacgtcggaacttgcacagcaggaggcttcgccgctcgtcccgcaggttacaaatgctcgcctggaaacccgtcaattatcaagtcatactgcgatgctgccgatccatactgttgcaatggaaacaacgcagccgtacatcagggctacgtgaccgagtatggttcacaggccttgtctttcatccagggactgcttggaagtagctcgggaggtggcggaggtagcacgccaaccacgacctccagtggttctactcctactggtggctgctcggtcgccaaatatggccagtgcggcggacagagctggacaggctgcaagacttgcgcttcaggatcgacttgtcaagctgcgaactcgtattactctcaatgcctataa

SEQ ID NO: 20295 - protein, 283 aa, Muscodor strobelii
  misc_feature: SGI Peptide ID NO. 566847
  misc_feature (251)..(279): Pfam Id: PF00734 Pfam Desc: Fungal cellulose binding domain
  misc_feature (23)..(223): Pfam Id: PF01083 Pfam Desc: Cutinase
  misc_feature (6)..(223): NCBI GI: 39973415 Blast Desc: MGG_01146 [Magnaporthe grisea 70-15] gi|145017881|gb|EDK02160.1| MGG_01146 [Magnaporthe grisea 70-15]
  misc_feature (1)..(223): NCBI GI: 116197290 Blast Desc: conserved [Chaetomium globosum CBS 148.51] gi|88181156|gb|EAQ88624.1| conserved [Chaetomium globosum CBS 148.51]
  misc_feature (4)..(225): NCBI GI: 85091086 Blast Desc: acetylxylan esterase precursor [Neurospora crassa OR74A] gi|28920112|gb|EAA29494.1| acetylxylan esterase precursor [Neurospora crassa OR74A]
  misc_feature (1)..(225): NCBI GI: 171676688 Blast Desc: protein product [Podospora anserina] gi|170936411|emb|CAP61068.1| protein product [Podospora anserina]
  misc_feature (3)..(283): NCBI GI: 85081067 Blast Desc: acetylxylan esterase precursor [Neurospora crassa OR74A] gi|28881447|emb|CAD70564.1| [Neurospora crassa] gi|28917729|gb|EAA27421.1| acetylxylan esterase precursor crassa
  misc_feature (1)..(283): NCBI GI: 156051031 Blast Desc: SS1G_08104 [Sclerotinia sclerotiorum 1980] gi|154692503|gb|EDN92241.1| SS1G_08104 [Sclerotinia sclerotiorum 1980]
  misc_feature (2)..(283): NCBI GI: 212539978 Blast Desc: acetyl xylan esterase (Axe1), [Penicillium marneffei ATCC 18224] gi|210067443|gb|EEA21535.1| acetyl xylan esterase (Axe1), [Penicillium marneffei ATCC 18224]
  misc_feature (1)..(219): NCBI GI: 189200274 Blast Desc: acetylxylan esterase precursor [Pyrenophora tritici-repentis Pt-1C-BFP] gi|187983573|gb|EDU49061.1| acetylxylan esterase precursor [Pyrenophora tritici-repentis
  misc_feature (19)..(283): NCBI GI: 119473547 Blast Desc: acetyl xylan esterase (Axe1), [Neosartorya fischeri NRRL 181] gi|119406802|gb|EAW16752.1| acetyl xylan esterase (Axe1), [Neosartorya fischeri NRRL 181]
  misc_feature (19)..(283): NCBI GI: 70985713 Blast Desc: acetyl xylan esterase (Axe1) [Aspergillus fumigatus Af293] gi|66845991|gb|EAL86324.1| acetyl xylan esterase (Axe1), [Aspergillus fumigatus Af293] gi|159128503|gb|EDP53618.1| acetyl
  misc_feature (22)..(283): SWISSPROT Homolog: EC 3.1.1.72 Acetylxylan esterase
MKVLSLTSLVAVASASAVVTERQSCPNVYVFGARETTAPPGYGTAGGLVNMVVSANPGAGSSAITYPACGGQASCGGVSYDNSATQGTAAVVSAVTAYNKQCPNTKIVLIGYSQGGQIMDNAFCGGAGATLTGTALAAVKAVIFMGDPHNVAGLPYNVGTCTAGGFAARPAGYKCSPGNPSIIKSYCDAADPYCCNGNNAAVHQGYVTEYGSQALSFIQGLLGSSSGGGGGSTPTTTSSGSTPTGGCSVAKYGQCGGQSWTGCKTCASGSTCQAANSYYSQCL

SEQ ID NO: 20296 - DNA, 1340 bp, Muscodor strobelii
  misc_feature: SGI EST ID NO. CUFF.47489.0
  misc_feature: Variant of the nucleotide sequence at SEQ ID NO 20294
cgcgcacggatccttctcagttctagatcaaaaccgggttttcggaccacggtgtcgggtagccgcctggcgaagaatttgaaatttggcattcgtaagcccctatcctttgagacagcttcggaggcccatgacatgtttgactaactgctccgtgattagattgagtatagcgtctcattataaccggacatgaggatatctgacttcacaacggggaccactaatattcggtcggagccgtaagccgggtgatgatgaagacgggtaggtatatgaagcaggctacatgccaagttttctgagcgtactatcatcatcaactcagtgtatcacgacatcatctcttctctgcccatttacacgtcatattgatcatcatgaaggttttaagtctcacgtctttggttgcggtggccagcgcgagtgctgtggttaccgaacgtcagagctgcccgaacgtctacgtctttggagctcgtgagacaaccgcacctccaggctatggcacagctggaggcttggtcaatatggttgtgtccgcaaatccaggcgcgggatcatctgctatcacttatcccgcttgtggtggtcaagcatcatgtggcggcgttagttacgataactctgcaactcaaggaacagcggccgtggtatcagccgtcactgcatacaacaaacaatgtccgaacaccaagatcgttctgatcggctactctcagggcggccagatcatggataatgctttttgcggtggagctggcgccaccctcactgggactgctttggccgccgttaaggctgtcattttcatgggtgatccgcacaacgttgctggtcttccttacaacgtcggaacttgcacagcaggaggcttcgccgctcgtcccgcaggttacaaatgctcgcctggaaacccgtcaattatcaagtcatactgcgatgctgccgatccatactgttgcaatggaaacaacgcagccgtacatcagggctacgtgaccgagtatggttcacaggccttgtctttcatccagggactgcttggaagtagctcgggaggtggcggaggtagcacgccaaccacgacctccagtggttctactcctactggtggctgctcggtcgccaaatatggccagtgcggcggacagagctggacaggctgcaagacttgcgcttcaggatcgacttgtcaagctgcgaactcgtattactctcaatgcctataagctgaggatatcagtggtgagtaaacatgtgtaaagagtacactgaaatatgattcagccaataaaaggagtacacgtagattcaaaatactaaattctcatcctagt

SEQ ID NO: 20297 - DNA, 1107 bp, Muscodor strobelii
  misc_feature: SGI cDNA ID NO. 566848
  misc_feature: Encodes the peptide sequence at SEQ ID NO 20298
atggagacatccgaagacgcagaccccattgtcgcaagctacaacgtctacgtcaaccccaccatcgcccaaaacaaaaaggtgctcatcatgcagcatcccaacaagcaggggcaccagaacaggtcatacgactacctcagcgaggttcgcctgaagcccaagtccagcatggtcgaggtcgaggtccccattggcgtcgtcgacaacgactacgaccgcgacaagggccaacgctggggcgccgcgctggccaaaagcaccaactccaagaacggcggcggcctcgggctgtcgggtggcttcggcgtcggcgtctctaaccttcgccccaacaagaggcgcgatgacttcgatcgcgagaccctcggcggcgagatccccgccgacagcaagaccgcacccaactacatggtcggcgcattcgaccgcgacgaactccacctcacccctatctcagccgtactctccctccgtccccaactccaccacatcgacgccatgtacgagcaatcccgcggcggccgtggcggcgtcggctcctcgggcaccggctccaaagacgacgcaggcgcaggagccagcggccccgcccgcgcaatccacatgtccatcaagagcgccgatgcaagcggcagcggcgagatcaccacagagaccatggccgaccgcctacgcgtcatccagaccgaagcatggcgcaagctaaactatatagacgaagacgagacctgggagcccgtcttccacaagaccctcctgcccctcggcacgcagcccgagaaagaaggaaaagcgaaagccaaaggaaaaggaaaagaagcagttcgcaatgccgtcgatgtcgacggcgatgattccaaacaactacaaactgagtgggacaacactacgtacttccgagccgtctgcggacaccccgtcgcatctcagaccaatggcattaagagcgagccccagatcaagaaagaggcaccggatgagtcgacggccggagccacgggcagtggtggacccaccattgggacagcaccgaagaagacaccgaatgctaagggcaagtcggtggcgttccaagccgatgccatggacacgaatcccaattaa

SEQ ID NO: 20298 - protein, 368 aa, Muscodor strobelii
  misc_feature: SGI Peptide ID NO. 566848
  misc_feature (9)..(331): NCBI GI: 46136297 Blast Desc: FG09664.1 [Gibberella zeae PH-1]
  misc_feature (9)..(304): NCBI GI: 256726810 Blast Desc: NECHADRAFT_76172 [Nectria haematococca mpVI 77-13-4]
  misc_feature (9)..(312): NCBI GI: 39948528 Blast Desc: MGG_08694 [Magnaporthe grisea 70-15] gi|145009237|gb|EDJ93948.1| MGG_08694 [Magnaporthe grisea 70-15]
  misc_feature (1)..(262): NCBI GI: 154303691 Blast Desc: BC1G_08730 [Botryotinia fuckeliana B05.10] gi|150854524|gb|EDN29716.1| BC1G_08730 [Botryotinia fuckeliana B05.10]
  misc_feature (3)..(240): NCBI GI: 261354945 Blast Desc: conserved [Verticillium albo-atrum VaMs.102]
  misc_feature (12)..(261): NCBI GI: 156049325 Blast Desc: SS1G_08369 [Sclerotinia sclerotiorum 1980] gi|154692768|gb|EDN92506.1| SS1G_08369 [Sclerotinia sclerotiorum 1980]
  misc_feature (2)..(246): NCBI GI: 238845420 Blast Desc: DNA-directed RNA polymerase III complex subunit Rpc37 [Microsporum canis CBS 113480]
  misc_feature (8)..(253): NCBI GI: 258573305 Blast Desc: sulfite reductase beta subunit [Uncinocarpus reesii 1704] gi|237901100|gb|EEP75501.1| sulfite reductase beta subunit [Uncinocarpus reesii 1704]
  misc_feature (7)..(253): NCBI GI: 261193291 Blast Desc: conserved [Ajellomyces dermatitidis SLH14081] gi|239588656|gb|EEQ71299.1| conserved [Ajellomyces dermatitidis SLH14081]
  misc_feature (7)..(253): NCBI GI: 239614019 Blast Desc: conserved [Ajellomyces dermatitidis ER-3]
METSEDADPIVASYNVYVNPTIAQNKKVLIMQHPNKQGHQNRSYDYLSEVRLKPKSSMVEVEVPIGVVDNDYDRDKGQRWGAALAKSTNSKNGGGLGLSGGFGVGVSNLRPNKRRDDFDRETLGGEIPADSKTAPNYMVGAFDRDELHLTPISAVLSLRPQLHHIDAMYEQSRGGRGGVGSSGTGSKDDAGAGASGPARAIHMSIKSADASGSGEITTETMADRLRVIQTEAWRKLNYIDEDETWEPVFHKTLLPLGTQPEKEGKAKAKGKGKEAVRNAVDVDGDDSKQLQTEWDNTTYFRAVCGHPVASQTNGIKSEPQIKKEAPDESTAGATGSGGPTIGTAPKKTPNAKGKSVAFQADAMDTNPN

SEQ ID NO: 20299 - DNA, 1707 bp, Muscodor strobelii
  misc_feature: SGI EST ID NO. CUFF.47660.0
  misc_feature: Variant of the nucleotide sequence at SEQ ID NO 20297
taaaggttgttatcagagaccgataaaagattgattcgcaattgccccgccaaaatctacagcactagcgccgcggatgtgtgaagcttgagctttaactgcatcaacgatcacacgacgacgccttccttccttccttcggaggttgcgacaatcttaccaagcttaccaagctccgcgccttggccaacacatccaccgaagccagcatctacaacagtcttcacgatggagacatccgaagacgcagaccccattgtcgcaagctacaacgtctacgtcaaccccaccatcgcccaaaacaaaaaggtgctcatcatgcagcatcccaacaagcaggggcaccagaacaggtcatacgactacctcagcgaggttcgcctgaagcccaagtccagcatggtcgaggtcgaggtccccattggcgtcgtcgacaacgactacgaccgcgacaagggccaacgctggggcgccgcgctggccaaaagcaccaactccaagaacggcggcggcctcgggctgtcgggtggcttcggcgtcggcgtctctaaccttcgccccaacaagaggcgcgatgacttcgatcgcgaggtcgacatgcatagctggaacgaggccctccgcctcgatagggtgccttaggacccagaccctcggcggcgagatccccgccgacagcaagaccgcacccaactacatggtcggcgcattcgaccgcgacgaactccacctcacccctatctcagccgtactctccctccgtccccaactccaccacatcgacgccatgtacgagcaatcccgcggcggccgtggcggcgtcggctcctcgggcaccggctccaaagacgacgcaggcgcaggagccagcggccccgcccgcgcaatccacatgtccatcaagagcgccgatgcaagcggcagcggcgagatcaccacagagaccatggccgaccgcctacgcgtcatccagaccgaagcatggcgcaagctaaactatatagacgaagacgagacctgggagcccgtcttccacaagaccctcctgcccctcggcacgcagcccgagaaagaaggaaaagcgaaagccaaaggaaaaggaaaagaagcagttcgcaatgccgtcgatgtcgacggcgatgattccaaacaactacaaactgagtgggacaacactacgtacttccgagccgtctgcggacaccccgtcgcatctcagaccaatggcattaagagcgagccccagatcaagaaagaggcaccggatgagtcgacggccggagccacgggcagtggtggacccaccattgggacagcaccgaagaagacaccgaatgctaagggcaagtcggtggcgttccaagccgatgccatggacacgaatcccaattaagcgttctttcatcatttctagacattgcatcagccggcgtttcggagagcatacttggctggcgctgcacaagatacggagtacggatttgggcttgagtttacgactttgttcattcaggacatgattcgtagttgtgtttctacgtcactgaggttcagaaaagtagcatatgcgactacatagtcatgagacaaaatatgttgcattaaccgaagaagatagtgctgaatgttaggaataacgcaagcatgtaatatcccgccgatcatgatccaattaaacagtgaaactgggcattgaatgattctcga

SEQ ID NO: 20300 - DNA, 2424 bp, Muscodor strobelii
  misc_feature: SGI cDNA ID NO. 566849
  misc_feature: Reduced expression when VOC is produced
  misc_feature: Encodes the peptide sequence at SEQ ID NO 20301
atggcttcggccggccacaaccagtcggcccctggcttcggccaagcatacgatccatttgctgaccttcgaggcaatcatgacaacatagatgatgctctcgacttcgaggatgcctacgacggcctaggcgatgagcttgatgagaccgatgacgccttcaacgatgacaccttcggcggttcggctgccggcccaagtggccccgtgggcaaggacttcgacttcttcggctcgactgcacaagtcgccaacgccatggaggaagagcaccagcgcttcagtctccagcatacttccagagccactcgacctaccgttcctcagggttataactcaggctatgcttaccagccgaccccgcctgctccgaagccaactcgctctggttacgaaaagtacaaggaagagcccaccgagctccagatcgatcactctatttggggtgttgcgcccaaaaagaccgtgacgcccgctgcgcagccccaaccccagccaacctcaggccgcaagatgatgagtctggaagaagtcgaagcatctatgagatccagtggcactcctcttcaacctcagcgacagcctcagccgccccccgactaccatgccttcgactcgccgagagctgtgcaacctaacctccatactcgccaggagcaatatagcaatccacttctacagcccggtgacagccagcaacaagccctacagcatggtgagtatcaacagcaaggtccccagggcatatcgcacggacatcccattacgattctacagcgccctacttctaaacaaggcccgtctgttccaagccccgccatggctgcctcgttgcctcaacagcaacaatcgcaacagcacgtccccccgaccgcaccgacgcagatactgcagaatccaagccgtccgtctggagatggtgccgcgatggtcttgcccatgcaccctcatcagcgccagcagaatttaatgccccgtaaccagccaccaatgcatacgcaacaaagccaacttgccctgatgacggagcaagagaagattgttttccttgccgctgaagctaagcgcgtcaagcgcaaccaaaagatccatctcatgtctggaaacaatggaatgatgaccccgcaggacaagtctttcatcactcggatccaactgcaacagctcgtgtcggcaactggcgatccgaacgaccaggccaatgatctcgcgatcaatgaagacttctactaccaggttctcagctcccttcgagccggacagcggcccaatcccaatcagccactgaacaacttcgcccagacatacttgttccagacaggcactcgtcatggtggcatgaggcgtcatggtcgtggtcccgagaatcacgtgcaacgcatggagcaacaggttcaacgtgccgtggaagccgcaaagagcaagccgaagaacaagcaactcgtgattgaaggcagccttggcaagatctcattcagcaacgccaagaccccgaagcccttattaaacattaagaggactgaaagtggaacggacgcaaataggccgggcagtagccagaaacacactaacaaaggtcatgacgagaaggatgcgctccgcgatatcgagaacgtctacctcaccctcatgaaaatggaagacctcgcccgccggactggccaaccacccgctaatggacagcctgatcaacacactgctgaggaacagcagcagttcgaggagttgaacaaccagctttggaacaatctcagagttcacgagcctatcagccaggacactgtgcatcccttcatcaacttcctctcataccccaagggcaagagagcaatcccccgaattttccgttacctttccccacccagcatccagaccggagagtcgatatccctggatgcagccacccgagagcgtatagagctattctctttggctgtcatgccgagtcttttccaacttctcaatgagtccccgctcgatattgtgaccggtgtgctcggccttatcacccagagctcaaatgtcgatctggttgcgcgcactcgcattggtgtctcgatgttgaccatggttctgagccgtgcagagctcatcaagcaggccggcgaggctaatgaacagacttggcagcaatgggtgggcgagtttaatctcttcttcaacaaactggagcctacgcttcacaacatattccccggtaccattgcttcgggcgaagatatttacgtctggcagttccttgccgccattggcatcggcgccagccccgacgaacagcagagacttgtatttgcggtgaaggaccgtgtcatgggcactgttggcctggccaagaccctacctcccgacatggccaaggcacgactcgacaatgtcaatctattcatgcgctccatcggtctcgatgttgagttgctgaattag

SEQ ID NO: 20301 - protein, 807 aa, Muscodor strobelii
  misc_feature: SGI Peptide ID NO. 566849
  misc_feature (3)..(806): NCBI GI: 39948517 Blast Desc: MGG_08693 [Magnaporthe grisea 70-15] gi|145009236|gb|EDJ93947.1| MGG_08693 [Magnaporthe grisea 70-15]
  misc_feature (6)..(806): NCBI GI: 85106788 Blast Desc: NCU06540 [Neurospora crassa OR74A] gi|28923848|gb|EAA33011.1| NCU06540 [Neurospora crassa OR74A]
  misc_feature (2)..(806): NCBI GI: 256727370 Blast Desc: [Nectria haematococca mpVI 77-13-4]
  misc_feature (3)..(806): NCBI GI: 46136295 Blast Desc: FG09663.1 [Gibberella zeae PH-1]
  misc_feature (5)..(806): NCBI GI: 170940102 Blast Desc: protein product [Podospora anserina]
  misc_feature (8)..(806): NCBI GI: 258574031 Blast Desc: conserved [Uncinocarpus reesii 1704] gi|237901463|gb|EEP75864.1| conserved [Uncinocarpus reesii 1704]
  misc_feature (12)..(806): NCBI GI: 240105996 Blast Desc: CPC735_055590 [Coccidioides posadasii C735 delta SOWgp]
  misc_feature (12)..(806): NCBI GI: 119192684 Blast Desc: CIMG_00719 [Coccidioides immitis RS]
  misc_feature (10)..(806): NCBI GI: 255954637 Blast Desc: Pc21g10360 [Penicillium chrysogenum Wisconsin 54-1255] gi|211589782|emb|CAP95933.1| Pc21g10360 [Penicillium chrysogenum Wisconsin 54-1255]
  misc_feature (6)..(806): NCBI GI: 261354944 Blast Desc: topoisomerase II [Verticillium albo-atrum VaMs.102]
  misc_feature: Useful for introducing or modulating the production of volatile compounds
MASAGHNQSAPGFGQAYDPFADLRGNHDNIDDALDFEDAYDGLGDELDETDDAFNDDTFGGSAAGPSGPVGKDFDFFGSTAQVANAMEEEHQRFSLQHTSRATRPTVPQGYNSGYAYQPTPPAPKPTRSGYEKYKEEPTELQIDHSIWGVAPKKTVTPAAQPQPQPTSGRKMMSLEEVEASMRSSGTPLQPQRQPQPPPDYHAFDSPRAVQPNLHTRQEQYSNPLLQPGDSQQQALQHGEYQQQGPQGISHGHPITILQRPTSKQGPSVPSPAMAASLPQQQQSQQHVPPTAPTQILQNPSRPSGDGAAMVLPMHPHQRQQNLMPRNQPPMHTQQSQLALMTEQEKIVFLAAEAKRVKRNQKIHLMSGNNGMMTPQDKSFITRIQLQQLVSATGDPNDQANDLAINEDFYYQVLSSLRAGQRPNPNQPLNNFAQTYLFQTGTRHGGMRRHGRGPENHVQRMEQQVQRAVEAAKSKPKNKQLVIEGSLGKISFSNAKTPKPLLNIKRTESGTDANRPGSSQKHTNKGHDEKDALRDIENVYLTLMKMEDLARRTGQPPANGQPDQHTAEEQQQFEELNNQLWNNLRVHEPISQDTVHPFINFLSYPKGKRAIPRIFRYLSPPSIQTGESISLDAATRERIELFSLAVMPSLFQLLNESPLDIVTGVLGLITQSSNVDLVARTRIGVSMLTMVLSRAELIKQAGEANEQTWQQWVGEFNLFFNKLEPTLHNIFPGTIASGEDIYVWQFLAAIGIGASPDEQQRLVFAVKDRVMGTVGLAKTLPPDMAKARLDNVNLFMRSIGLDVELLN

SEQ ID NO: 20302 - DNA, 3542 bp, Muscodor strobelii
  misc_feature: SGI EST ID NO. CUFF.47664.0
  misc_feature: Variant of the nucleotide sequence at SEQ ID NO 20300
cgtcaatcattttcgccgagtgctgcttgcccaactcacacctagcagggcaccttttttgtcgcaatcgttgccgcataacgtcacgtcaaggcgcctctctcaacgccgtcttgcaggacagcaagataggctctgttctctggcatatcatagagcagcttggactccctcgccgttgtctttcctggttggacatcttttgcgtctcccagtgatcctgttgtcggcgcatctcatctacctttgtcaccaacccaccctcccactcactcgccgccatcatacatcatgatcaagcattcctcttgtttcgccggctccgtgttcctccacatcttctaactattttctgttccgtgcgcggtgttcgctctcagacgggcgtctgtagacagacatcacctcgcaacgagccgaatcaggaagcgtcttgagagccgtaccctgccatcactgtcactatggcttcggccggccacaaccagtcggcccctggcttcggccaagcatacgatccatttgctgaccttcgaggcaatcatgacaacatagatgatgctctcgacttcgaggatgcctacgacggcctaggcgatgagcttgatgagaccgatgacgccttcaacgatgacaccttcggcggttcggctgccggcccaagtggccccgtgggcaaggacttcgacttcttcggctcgactgcacaagtcgccaacgccatggaggaagagcaccagcgcttcagtctccagcatacttccagagccactcgacctaccgttcctcagggttataactcaggctatgcttaccagccgaccccgcctgctccgaagccaactcgctctggttacgaaaagtacaaggaagagcccaccgagctccagatcgatcactctatttggggtgttgcgcccaaaaagaccgtgacgcccgctgcgcagccccaaccccagccaacctcaggccgcaagatgatgagtctggaagaagtcgaagcatctatgagatccagtggcactcctcttcaacctcagcgacagcctcagccgccccccgactaccatgccttcgactcgccgagagctgtgcaacctaacctccatactcgccaggagcaatatagcaatccacttctacagcccggtgacagccagcaacaagccctacagcatggtgagtatcaacagcaaggtccccagggcatatcgcacggacatcccattacgattctacagcgccctacttctaaacaaggcccgtctgttccaagccccgccatggctgcctcgttgcctcaacagcaacaatcgcaacagcacgtccccccgaccgcaccgacgcagatactgcagaatccaagccgtccgtctggagatggtgccgcgatggtcttgcccatgcaccctcatcagcgccagcagaatttaatgccccgtaaccagccaccaatgcatacgcaacaaagccaacttgccctgatgacggagcaagagaagattgttttccttgccgctgaagctaagcgcgtcaagcgcaaccaaaagatccatctcatgtctggaaacaatggaatgatgaccccgcaggacaagtctttcatcactcggatccaactgcaacagctcgtgtcggcaactggcgatccgaacgaccaggccaatgatctcgcgatcaatgaagacttctactaccaggttctcagctcccttcgagccggacagcggcccaatcccaatcagccactgaacaacttcgcccagacatacttgttccagacaggcactcgtcatggtggcatgaggcgtcatggtcgtggtcccgagaatcacgtgcaacgcatggagcaacaggttcaacgtgccgtggaagccgcaaagagcaagccgaagaacaagcaactcgtgattgaaggcagccttggcaagatctcattcagcaacgccaagaccccgaagcccttattaaacattaagaggactgaaagtggaacggacgcaaataggccgggcagtagccagaaacacactaacaaaggtcatgacgagaaggatgcgctccgcgatatcgagaacgtctacctcaccctcatgaaaatggaagacctcgcccgccggactggccaaccacccgctaatggacagcctgatcaacacactgctgaggaacagcagcagttcgaggagttgaacaaccagctttggaacaatctcagagttcacgagcctatcagccaggacactgtgcatcccttcatcaacttcctctcataccccaagggcaagagagcaatcccccgaattttccgttacctttccccacccagcgtacgactatcttgactctgatcattgttcacctcgatcagcttgatgtgattagaggctgtcagatccagaccggagagtcgatatccctggatgcagccacccgagagcgtatagagctattctctttggctgtcatgccgagtcttttccaacttctcaatgagtccccgctcgatattgtgaccggtgtgctcggccttatcacccagagctcaaatgtcgatctggttgcgcgcactcgcattggtgtctcgatgttgaccatggttctgagccgtgcagagctcatcaagcaggccggcgaggctaatgaacagacttggcagcaatgggtgggcgagtttaatctcttcttcaacaaactggagcctacgcttcacaacatattccccggtaccattgcttcgggcgaagatatttacgtctggcagttccttgccgccattggcatcggcgccagccccgacgaacagcagagacttgtatttgcggtgaaggaccgtgtcatgggcactgttggcctggccaagaccctacctcccgacatggccaaggcacgactcgacaatgtcaatctattcatgcgctccatcggtctcgatgttgagttgctgaattaggatgggatcaagcgaatgacacatacagcgaagaatgtaaaccgggcctacagagccaagaccgatattaccatcttagtcctgcgtactttggaaggtcaacaaattgacgagcagcacttcaagatggcggcgtatcaggaattgccgccattagtactaaatgcttcacatctggctgcagtaagtccaagctgaacgaagcggccttgtcagttcttgcacaatttcagattactaccatattgccacacgtgaaaggtcgatgggatatagtagaactgggccgagatcattccatacgttatggtgggttggcgggaacacaggagagacgacctggaaagcaatggtatttgtactttggtcttttcatgtatagaccatctgagatagcatttgtaaagtattccgcaggactaaaagattagcatgagtttgtaaaacccttttgatacctcatgtctcaagtgtgaagctgtgttttaattatgatcaactgacagtttgagtcagtatgacgaacacgagacaaggtttgcccaaacataatgcccgaaccctcgatctaaagtcacaatgatgggag

SEQ ID NO: 20303 - DNA, 1428 bp, Muscodor strobelii
  misc_feature: SGI cDNA ID NO. 566850
  misc_feature: Encodes the peptide sequence at SEQ ID NO 20304
atggctgccggaaacgctcgtatcgtgagatacgtcgtctttgccgccttttttctcggagtactctacttcgtctccaactctaaatatgataactaccacctcaaccccgattccttcaacacaggaacaggaaaaaccgacactgtgatttctacccctgaaatagagaacccgcctagcgaaaaaccaattaccaacatcggcggcgacccgatttcgccggataatcaatggcaaagtccaaagggcggcaagactggtacctcgggcaaatcgggctcgacagtacccggcgacagcacgtctaaccccgaatccgactctatgaaaggatcgacgagacctccgcccggcacgcccaagcaacaagtcgatctcggtgaagccgccatggccctcagcccgatggaccacggctggaacgatttgctcggcacagcgcccggtcctcgcatgaatgctacgttcgtgactctcgcccgcaatagtgatgtatgggaaattgcgcgttctatcagacaggtcgaggatcgtttcaaccgtcgctacaactatgactgggtgttcctgaacgacaagccgttcgatgatgtattcaagaaggtcaccacatctcttgtgtccggaaagacgcattacggcgagatcccccacgagcactggtcgttcccggatcacatcgatcaggacaaggccaagaaggtccgtgaggatatggctcagcgcaagatcatctacggcgattcggtcagctaccgccatatgtgtcgattcgagtccggcttcttcttccgacaggagttgatgatgaactacgaatggtactggcgcgtggaacccagcatcgagctcttttgcgatgttcactacgaccctttccgttacatggccgagaacaagaagaagtacgctttcgttttgagtctttatgagtatatcgagactattccgaccctttgggatagcgtgaagaaattcatgaagaactatccggaacacattgtcgccgacaactcgatgggattcctcagcgacgacgacggcgagtcgtacaacaggtgccacttctggtctaactttgaagttggcaatctcgattggctgcgatctcaggcatatctcgatttctttgagtccctcgaccaggacggtggtttcttctacgagcgatggggcgatgcgccggtacactcgattgctgccagtctcctccttaagaaggaagagatccacttcttcaacgacattgcctactatcatgtacccttcacgcactgccctaccggcgagcagacacgaattgaccttcgttgtcactgcaacccgaaagataactttgattggaaggggtactcttgcaccgcaagatatttcgatctcaacaagatgagcaagccgaagggctacgaggcggagaccagctag

SEQ ID NO: 20304 - protein, 475 aa, Muscodor strobelii
  misc_feature: SGI Peptide ID NO. 566850
  misc_feature (92)..(424): Pfam Id: PF01793 Pfam Desc: Glycolipid 2-alpha-mannosyltransferase
  misc_feature (151)..(424): Pfam Id: PF01793 Pfam Desc: Glycolipid 2-alpha-mannosyltransferase
  misc_feature (1)..(473): NCBI GI: 256726811 Blast Desc: NECHADRAFT_99132 [Nectria haematococca mpVI 77-13-4]
  misc_feature (1)..(473): NCBI GI: 116195060 Blast Desc: CHGG_04128 [Chaetomium globosum CBS 148.51] gi|88180041|gb|EAQ87509.1| CHGG_04128 [Chaetomium globosum CBS 148.51]
  misc_feature (116)..(473): NCBI GI: 261354943 Blast Desc: glycolipid 2-alpha-mannosyltransferase [Verticillium albo-atrum VaMs.102]
  misc_feature (1)..(473): NCBI GI: 156059276 Blast Desc: conserved [Sclerotinia sclerotiorum 1980] gi|154701437|gb|EDO01176.1| conserved [Sclerotinia sclerotiorum 1980]
  misc_feature (1)..(474): NCBI GI: 39948507 Blast Desc: conserved [Magnaporthe grisea 70-15] gi|59802977|gb|AAX07685.1| glycolipid 2-alpha-mannosyltransferase-like protein [Magnaporthe grisea]
  misc_feature (1)..(474): NCBI GI: 170940103 Blast Desc: protein product [Podospora anserina]
  misc_feature (1)..(474): NCBI GI: 85106793 Blast Desc: alpha-1,2 mannosyltransferase KTR1 [Neurospora crassa OR74A] gi|28923849|gb|EAA33012.1| alpha-1,2 mannosyltransferase KTR1 [Neurospora crassa OR74A]
  misc_feature (1)..(475): NCBI GI: 212533303 Blast Desc: alpha-1,2-mannosyltransferase (Kre2), [Penicillium marneffei ATCC 18224] gi|210072172|gb|EEA26261.1| alpha-1,2-mannosyltransferase (Kre2), [Penicillium marneffei ATCC
  misc_feature (92)..(475): NCBI GI: 242777720 Blast Desc: alpha-1,2-mannosyltransferase (Kre2), [Talaromyces stipitatus ATCC 10500] gi|218722710|gb|EED22128.1| alpha-1,2-mannosyltransferase (Kre2), [Talaromyces stipitatus
  misc_feature (1)..(474): NCBI GI: 169785981 Blast Desc: [Aspergillus oryzae RIB40] gi|238506907|ref|XP_002384655.1| alpha-1,2-mannosyltransferase (Kre2), [Aspergillus flavus NRRL3357] gi|83776199|dbj|BAE66318.1|
  misc_feature (5)..(475): SWISSPROT Homolog: EC 2.4.1.131 Glycolipid 2-alpha-mannosyltransferase
MAAGNARIVRYVVFAAFFLGVLYFVSNSKYDNYHLNPDSFNTGTGKTDTVISTPEIENPPSEKPITNIGGDPISPDNQWQSPKGGKTGTSGKSGSTVPGDSTSNPESDSMKGSTRPPPGTPKQQVDLGEAAMALSPMDHGWNDLLGTAPGPRMNATFVTLARNSDVWEIARSIRQVEDRFNRRYNYDWVFLNDKPFDDVFKKVTTSLVSGKTHYGEIPHEHWSFPDHIDQDKAKKVREDMAQRKIIYGDSVSYRHMCRFESGFFFRQELMMNYEWYWRVEPSIELFCDVHYDPFRYMAENKKKYAFVLSLYEYIETIPTLWDSVKKFMKNYPEHIVADNSMGFLSDDDGESYNRCHFWSNFEVGNLDWLRSQAYLDFFESLDQDGGFFYERWGDAPVHSIAASLLLKKEEIHFFNDIAYYHVPFTHCPTGEQTRIDLRCHCNPKDNFDWKGYSCTARYFDLNKMSKPKGYEAETS

SEQ ID NO: 20305 - DNA, 3441 bp, Muscodor strobelii
  misc_feature: SGI EST ID NO. CUFF.47779.0
  misc_feature: Variant of the nucleotide sequence at SEQ ID NO 20303
atttattgtccacgtctttgcgagcgaatgcgcacgtatcgcagccaatgcatcccagctaataccatcgacccaaatctaccgacagccagcctgcctagtcattctccatcatccctaacatcccttcaatcctttttttccttgttgttcgtgctactctgctgtgaatcgtattacagtccatagtacctcgagtcggacgtgtgtcaacgacctctctttctgcgactccatctgttcttgacgatcgaccccattctttttcatctatttcctccttctccacggccctccctatcgacctagcttgcatcccatctagctcccgaggctccccatcaccacctttcgctcccatcttacagtccccagatgacgacctgacgcctcctttgtccttattgtgtcacaggcgcaaagtttccaacgcatcggccccgccacaattaaagatctgtgcccagcccatttttgattcacttggggggattaccctatcctcctcgacatcccttacggctcgacccatctcccatcgagtcgcctcctcccagccgacgcactggccctagcatcgcatctagcccgacgacagcgataatatcatcgtcatcatggctgccggaaacgctcgtatcgtgagatacgtcgtctttgccgccttttttctcggagtactctacttcgtctccaactctaaatatgataactaccacctcaaccccgattccttcaacacaggaacaggaaaaaccgacactgtgatttctacccctgaaatagagaacccgcctagcgaaaaaccaattaccaacatcggcggcgacccgatttcgccggataatcaatggcaaagtccaaagggcggcaagactggtacctcgggcaaatcgggctcgacagtacccggcgacagcacgtctaaccccgaatccgactctatgaaaggatcgacgagacctccgcccggcacgcccaagcaacaagtcgatctcggtgaagccgccatggccctcagcccgatggaccacggctggaacgatttgctcggcacagcgcccggtcctcgcatgaatgctacgttcgtgactctcgcccgcaatagtgatgtatgggaaattgcgcgttctatcagacaggtcgaggatcgtttcaaccgtcgctacaactatgactgggtgttcctgaacgacaagccgttcgatgatgtattcaagaaggtcaccacatctcttgtgtccggaaagacgcattacggcgagatcccccacgagcactggtcgttcccggatcacatcgatcaggacaaggccaagaaggtccgtgaggatatggctcagcgcaagatcatctacggcgattcggtcagctaccgccatatgtgtcgattcgagtccggcttcttcttccgacaggagttgatgatgaactacgaatggtactggcgcgtggaacccagcatcgagctcttttgcgatgttcactacgaccctttccgttacatggccgagaacaagaagaagtacgctttcgttttgagtctttatgagtatatcgagactattccgaccctttgggatagcgtgaagaaattcatgaagaactatccggaacacattgtcgccgacaactcgatgggattcctcagcgacgacgacggcgagtcgtacaacaggtgccacttctggtctaactttgaagttggcaatctcgattggctgcgatctcaggcatatctcgatttctttgagtccctcgaccaggacggtggtttcttctacgagcgatggggcgatgcgccggtacactcgattgctgccagtctcctccttaagaaggaagagatccacttcttcaacgacattgcctactatcatgtacccttcacgcactgccctaccggcgagcagacacgaattgaccttcgttgtcactgcaacccgaaagataactttgattggaaggggtactcttgcaccgcaagatatttcgatctcaacaagatgagcaagccgaagggctacgaggcggagaccagctaggggatggagaatgatttcagtagtaaaagcattgtacaatagaaatgccttattttcctttcttaacgaaagggtcattatgaatacatcggctaagggaatgggggctcaagtcaggacgactttggctggcgtctaggttctctcatccattggagaggcatatcatgttattttcatgcatcacatctgtaaatacaacattcaaagcccacaagaccgatcaatcattgtaaagagacagggatcaagaaaaaataaatgcgttgccgattagacgcgctacggcattcaagtgtatatgtacaggcgcaactactcatgcaatggtagtcgactgtctatcgcgtgatggtacaaggtcggtctcgacgtccgctatatcaagttcctcaaatgatgttggtggcatgccacttgctttatgcgccaactgaggccttctttggtttcttcgtgccgtatttactcctactcgtcatgcgatttgatacaccaccctattgcaatcgaattagcaaacaaactcacgttgagccgcaatttttggaagaatgatatgacgaccatcgtcgcgtagaggcagatgagatcatcacacaaatacgcatgtcgcatctccatccataccctcccgcccaaaagtcgtaaatacccccttccaccatctacaaaaggagagatccaacgaaaaacccgcaaactcaccaagtccagcgcgccgcgcaccaaatgatatcgcacaccgggacaatcctgagaccgtccacctctgacgaggacgacggagtgctgctggatattgtggccctcgccggggatgtaggccgttatcatgcggcccgaggacagacgcacacgggccgtcttccgctcgccggagttgggcttcttgggccgcgtgatgccgaccttgaggcagacgcccttttgctgcggacacatggtgtcggatagcgctggggagacggcgtggcgggcgcgttggggtttacggcagccctgtgggtttatggttagtcgctgtatcatatatcggcatgtgtatcggtatggagcagatggaaagttccattgatcggtttggaggacgctttgggtggtagagtggcgtgacgtactcgtaaaacttggtttaatgtggcattaggtgcgggtgtcgtcgagaaggcgcgtgagacggagggagatgggagagttttcggtatagttgctatttgtcggctggccagcgatggccataaggagcgtaatatgggagcggccatggtgagggcgatatggtgggtgttgaggctcacgatatgctcctgctcagagacactcaagatatcttaggtaggtttggcgtcgcgagcttggcagagctgctttgcaggcttcttgacagtccgac

SEQ ID NO: 20306 - DNA, 519 bp, Muscodor strobelii
  misc_feature: SGI cDNA ID NO. 566851
  misc_feature: Reduced expression when VOC is produced
  misc_feature: Encodes the peptide sequence at SEQ ID NO 20307
atggccgctcccatattacgctccttatggccatcgctggccagccgacaaatagcaactataccgaaaactctcccatctccctccgtctcacgcgccttctcgacgacacccgcacctaatgccacattaaaccaagttttacgaggctgccgtaaaccccaacgcgcccgccacgccgtctccccagcgctatccgacaccatgtgtccgcagcaaaagggcgtctgcctcaaggtcggcatcacgcggcccaagaagcccaactccggcgagcggaagacggcccgtgtgcgtctgtcctcgggccgcatgataacggcctacatccccggcgagggccacaatatccagcagcactccgtcgtcctcgtcagaggtggacggtctcaggattgtcccggtgtgcgatatcatttggtgcgcggcgcgctggacttgggtggtgtatcaaatcgcatgacgagtaggagtaaatacggcacgaagaaaccaaagaaggcctcagttggcgcataa

SEQ ID NO: 20307 - protein, 172 aa, Muscodor strobelii
  misc_feature: SGI Peptide ID NO. 566851
  misc_feature (42)..(166): Pfam Id: PF00164 Pfam Desc: Ribosomal protein S12
  misc_feature (22)..(170): NCBI GI: 170940104 Blast Desc: protein product [Podospora anserina]
  misc_feature (32)..(171): NCBI GI: 261354942 Blast Desc: 37S ribosomal protein S12 [Verticillium albo-atrum VaMs.102]
  misc_feature (1)..(168): NCBI GI: 39948498 Blast Desc: conserved [Magnaporthe grisea 70-15] gi|145009234|gb|EDJ93945.1| conserved [Magnaporthe grisea 70-15]
  misc_feature (22)..(166): NCBI GI: 212533301 Blast Desc: 37S ribosomal protein S12 [Penicillium marneffei ATCC 18224] gi|210072171|gb|EEA26260.1| 37S ribosomal protein S12 [Penicillium marneffei ATCC 18224]
  misc_feature (1)..(169): NCBI GI: 156059274 Blast Desc: SS1G_03649 [Sclerotinia sclerotiorum 1980] gi|154701436|gb|EDO01175.1| SS1G_03649 [Sclerotinia sclerotiorum 1980]
  misc_feature (1)..(167): NCBI GI: 70997665 Blast Desc: 37S ribosomal protein S12 [Aspergillus fumigatus Af293] gi|66851207|gb|EAL91533.1| 37S ribosomal protein S12 [Aspergillus fumigatus Af293] gi|159126698|gb|EDP51814.1| 37S S12
  misc_feature (15)..(168): NCBI GI: 239606245 Blast Desc: 37S ribosomal protein S12 [Ajellomyces dermatitidis ER-3]
  misc_feature (15)..(168): NCBI GI: 261188640 Blast Desc: 37S ribosomal protein S12 [Ajellomyces dermatitidis SLH14081] gi|239593092|gb|EEQ75673.1| 37S ribosomal protein S12 [Ajellomyces dermatitidis SLH14081]
  misc_feature (1)..(167): NCBI GI: 119479173 Blast Desc: 37S ribosomal protein S12 [Neosartorya fischeri NRRL 181] gi|119407769|gb|EAW17718.1| 37S ribosomal protein S12 [Neosartorya fischeri NRRL 181]
  misc_feature (21)..(166): NCBI GI: 226284668 Blast Desc: mitochondrial ribosomal protein S12 [Paracoccidioides brasiliensis Pb01]
  misc_feature: Useful for introducing or modulating the production of volatile compounds
MAAPILRSLWPSLASRQIATIPKTLPSPSVSRAFSTTPAPNATLNQVLRGCRKPQRARHAVSPALSDTMCPQQKGVCLKVGITRPKKPNSGERKTARVRLSSGRMITAYIPGEGHNIQQHSVVLVRGGRSQDCPGVRYHLVRGALDLGGVSNRMTSRSKYGTKKPKKASVGA

SEQ ID NO: 20308 - DNA, 3297 bp, Muscodor strobelii
  misc_feature: SGI EST ID NO. CUFF.47780.1
  misc_feature: Variant of the nucleotide sequence at SEQ ID NO 20306
gtcggactgtcaagaagcctgcaaagcagctctgccaagctcgcgacgccaaacctacctaagatatcttgagtgtctctgagcaggagcatatcgtgagcctcaacacccaccatatcgccctcaccatggccgctcccatattacgctccttatggccatcgctggccagccgacaaatagcaactataccgaaaactctcccatctccctccgtctcacgcgccttctcgacgacacccgcacctaatgccacattaaaccaagttttacgaggctgccgtaaaccccaacgcgcccgccacgccgtctccccagcgctatccgacaccatgtgtccgcagcaaaagggcgtctgcctcaaggtcggcatcacgcggcccaagaagcccaactccggcgagcggaagacggcccgtgtgcgtctgtcctcgggccgcatgataacggcctacatccccggcgagggccacaatatccagcagcactccgtcgtcctcgtcagaggtggacggtctcaggattgtcccggtgtgcgatatcatttggtgcgcggcgcgctggacttgggtggtgtatcaaatcgcatgacgagtaggagtaaatacggcacgaagaaaccaaagaaggcctcagttggcgcataaagcaagtggcatgccaccaacatcatttgaggaacttgatatagcggacgtcgagaccgaccttgtaccatcacgcgatagacagtcgactaccattgcatgagtagttgcgcctgtacatatacacttgaatgccgtagcgcgtctaatcggcaacgcatttattttttcttgatccctgtctctttacaatgattgatcggtcttgtgggctttgaatgttgtatttacagatgtgatgcatgaaaataacatgatatgcctctccaatggatgagagaacctagacgccagccaaagtcgtcctgacttgagcccccattcccttagccgatgtattcataatgaccctttcgttaagaaaggaaaataaggcatttctattgtacaatgcttttactactgaaatcattctccatcccctagctggtctccgcctcgtagcccttcggcttgctcatcttgttgagatcgaaatatcttgcggtgccttgagttgattacgtcagcctagatcaattaagcaacaagtaatagtgttagacttacaagagtaccccttccaatcaaagttatctttcgggttgcagtgacaacgaaggtcaattcgtgtctgctcgccggtagggcagtgcgtgaagggtacatgatagtaggcaatgtcgttgaagaagtggatctcttccttcttaaggaggagactggcagcaatcgagtgtaccggcgcatcgccccatcgctcgtagaagaaaccaccgtcctggtcgagggactcaaagaaatcgagatatgcctgagatcgcagccaatcgagattgccaacttcaaagttagaccactgctgccgcgttagttctgtccttagtaagcttccaccgccaatcacttacgaagtggcacctgttgtacgactcgccgtcgtcgtcgctgaggaatcccatcgagttgtcggcgacaatgtgttccggatagttcttcatgaatttcttcacgctatcccaaagggtcggaatagtctcgatatactcataaagactcaaaacgaaagcgtacttcttcttgttctcggccatgtaacggaaagggtcgtagtgaacatcgcaaaagagctcgatgctgggttccacgcgccagtaccattcgtagttcatcatcaactcctgtcggaagaagaagccggactcgaatcgacacatatggcggtagctgaccgaatcgccgtagatgatcttgcgctgagccatatcctcacggaccttcttggccttgtcctgatcgatgtgatccgggaacgaccagtgctcgtgggggatctcgccgtaatgcgtctttccggacacaagagatgtggtgaccttcttgaatacatcatcgaacggcttgtcgttcaggaacacccagtcatagttgtagcgacggttgaaacgatcctcgacctgtctgatagaacgcgcaatttcccatacatcactattgcgggcgagagtcacgaacgtagcattcatgcgaggaccgggcgctgtgccgagcaaatcgttccagccgtggtccatcgggctgagggccatggcggcttcaccgagatcgacttgttgcttgggcgtgccgggcggaggtctcgtcgatcctttcatagagtcggattcggggttagacgtgctgtcgccgggtactgtcgagcccgatttgcccgaggtaccagtcttgccgccctttggactttgccattgattatccggcgaaatcgggtcgccgccgatgttggtaattggtttttcgctaggcgggttctctatttcaggggtagaaatcacagtgtcggtttttcctgttcctgtgttgaaggaatcggggttgaggtggtagttatcatatttagagttggagacgaagtagagtactccgagaaactagacacggcacacattattagagcgagcgcgcaatgaagccacacggcgcgagagacagatggggcttacaaaggcggcaaagacgacgtatctcacgatacgagcgtttccggcagccatgatgacgatgatattatcgctgtcgtcgggctagatgcgatgctagggccagtgcgtcggctgggaggaggcgactcgatgggagatgggtcgagccgtaagggatgtcgaggaggatagggtaatccccccaagtgaatcaaaaatgggctgggcacagatctttaattgtggcggggccgatgcgttggaaactttgcgcctgtgacacaataaggacaaaggaggcgtcaggtcgtcatctggggactgtaagatgggagcgaaaggtggtgatggggagcctcgggagctagatgggatgcaagctaggtcgatagggagggccgtggagaaggaggaaatagatgaaaaagaatggggtcgatcgtcaagaacagatggagtcgcagaaagagaggtcgttgacacacgtccgactcgaggtactatggactgtaatacgattcacagcagagtagcacgaacaacaaggaaaaaaaggattgaagggatgttagggatgatggagaatgactaggcaggctggctgtcggtagatttgggtcgatggtattagctgggatgcattggctgcgatacgtgcgcattcgctcgcaaagacgtggacaataaat

SEQ ID NO: 20309 - DNA, 1311 bp, Muscodor strobelii
  misc_feature: SGI cDNA ID NO. 566852
  misc_feature: Encodes the peptide sequence at SEQ ID NO 20310
atgtcatcccttgcgaatgtgatgaggccggttcttcggcgggccaccagagtatcaccacgatgcgcccgtccgtctagatcactcaatgtgcaacagtggagggcactatctgctacgcctcgccgccagttcgacatctccgagatcccccctacaccaataacgcacatgtccgagaccgagactgctatgcaggaagcggtttctaagttcgccagcgacgccatcttgcccaaggtccgcgaaatggatgagaacgaaaagatggatccggcgcttgtagagcagcttttcgaacagggtctgatgggtgtcgagatcccggaagagtacggcggcgctggcatgaacttcacgtccgccattgttggtattgaggagctagcacgcgtagatcctagtgtcagtgtcatggtcgacgtccacaacacgttggtcaacaccgctgtcatcaaatacggcagcaacgagatcaagaagaagtatctcccggctctagcgaccaacacggtcggcagcttctgcttgagcgaacctgtatcaggatccgacgccttcaagctggccaccaaggctaccaagactagcgacggctacactatctccggcagcaagatgtggattacaaactcgatggaggccaacttcttcatcgtgtttgctaatctcgatcccagcaagggccaccgcggtatcacggccttcatcgtagagaaggacgccaagggattcgagatcgcaaagaaagaaaagaagctaggtatcaaggccagcagcacttgcgtgctcaacttcgacgacgtgcagattcccaaggagaacttgcttggtgaggaggggcaaggctacaaatatgccattggtcttctcaacgaaggtcgtattggtattgccgcacagatgaccggtcttgccctcggtgcttgggagaacgcggtcaagtatgtctggaacgaccgcaagcagttcggccagcttgttggtgagtttcagggcatgcagcaccagattgctcagtcctacaccgagatcgcggccgctcgtgcccttgtctacaatgccgccaggaagaaggaagcgggtgaggatttcgtcatggacgccgccatggccaagttgtatgcctcgcaggtcgccggtcgcgtcagtggtctagcagtcgagtggatgggtggtatgggtttcgtccgtgaaggtcttgctgagaagttctggagagatagcaagattggtgccatctatgagggaacaagcaatattcaactcaacaccattgccaagctcctgcagaaggaatacactgcttag

SEQ ID NO: 20310 - protein, 436 aa, Muscodor strobelii
  misc_feature: SGI Peptide ID NO. 566852
  misc_feature (174)..(225): Pfam Id: PF02770 Pfam Desc: Acyl-CoA dehydrogenase, middle domain
  misc_feature (281)..(431): Pfam Id: PF00441 Pfam Desc: Acyl-CoA dehydrogenase, C-terminal domain
  misc_feature (296)..(420): Pfam Id: PF08028 Pfam Desc: Acyl-CoA dehydrogenase, C-terminal domain
  misc_feature (59)..(171): Pfam Id: PF02771 Pfam Desc: Acyl-CoA dehydrogenase, N-terminal domain
  misc_feature (1)..(436): NCBI GI: 85106801 Blast Desc: acyl-CoA dehydrogenase, mitochondrial precursor [Neurospora crassa OR74A] gi|28923851|gb|EAA33014.1| acyl-CoA dehydrogenase, mitochondrial precursor [Neurospora crassa OR74A]
  misc_feature (1)..(435): NCBI GI: 116195064 Blast Desc: conserved [Chaetomium globosum CBS 148.51] gi|88180043|gb|EAQ87511.1| conserved [Chaetomium globosum CBS 148.51]
  misc_feature (1)..(436): NCBI GI: 145601203 Blast Desc: conserved [Magnaporthe grisea 70-15] gi|145009233|gb|EDJ93944.1| conserved [Magnaporthe grisea 70-15]
  misc_feature (1)..(436): NCBI GI: 170940105 Blast Desc: protein product [Podospora anserina]
  misc_feature (1)..(434): NCBI GI: 156031211 Blast Desc: conserved [Sclerotinia sclerotiorum 1980] gi|154699429|gb|EDN99167.1| conserved [Sclerotinia sclerotiorum 1980]
  misc_feature (1)..(434): NCBI GI: 154309163 Blast Desc: conserved [Botryotinia fuckeliana B05.10] gi|150852519|gb|EDN27711.1| conserved [Botryotinia fuckeliana B05.10]
  misc_feature (1)..(436): NCBI GI: 256726812 Blast Desc: [Nectria haematococca mpVI 77-13-4]
  misc_feature (1)..(435): NCBI GI: 169622111 Blast Desc: SNOG_14270 [Phaeosphaeria nodorum SN15] gi|111057387|gb|EAT78507.1| SNOG_14270 [Phaeosphaeria nodorum SN15]
  misc_feature (1)..(435): NCBI GI: 240108565 Blast Desc: short/branched chain specific acyl-CoA dehydrogenase, [Coccidioides posadasii C735 delta SOWgp]
  misc_feature (1)..(435): NCBI GI: 119186447 Blast Desc: conserved [Coccidioides immitis RS]
  misc_feature (27)..(434): SWISSPROT Homolog: EC 1.3.99.2 Butyryl-CoA dehydrogenase
  misc_feature: Useful for introducing or modulating the production of volatile compounds
  misc_feature: Useful for fungicidal and/or biocontrol applications
MSSLANVMRPVLRRATRVSPRCARPSRSLNVQQWRALSATPRRQFDISEIPPTPITHMSETETAMQEAVSKFASDAILPKVREMDENEKMDPALVEQLFEQGLMGVEIPEEYGGAGMNFTSAIVGIEELARVDPSVSVMVDVHNTLVNTAVIKYGSNEIKKKYLPALATNTVGSFCLSEPVSGSDAFKLATKATKTSDGYTISGSKMWITNSMEANFFIVFANLDPSKGHRGITAFIVEKDAKGFEIAKKEKKLGIKASSTCVLNFDDVQIPKENLLGEEGQGYKYAIGLLNEGRIGIAAQMTGLALGAWENAVKYVWNDRKQFGQLVGEFQGMQHQIAQSYTEIAAARALVYNAARKKEAGEDFVMDAAMAKLYASQVAGRVSGLAVEWMGGMGFVREGLAEKFWRDSKIGAIYEGTSNIQLNTIAKLLQKEYTA

SEQ ID NO: 20311 - DNA, 2066 bp, Muscodor strobelii
  misc_feature: SGI EST ID NO. CUFF.47519.0
  misc_feature: Variant of the nucleotide sequence at SEQ ID NO 20309
gccgattgaaggagacaagggtctctctcattgccgtcgctacctaccactaagaatgcccttccgcgaactcgggtttcacatgtcactcaagttcagtataattagagctaagttgtctctctcgccgccaattcgtcccaactttaaggtttgtcactcgggacttgtgtagaggtagttggtaagaggactgcccgtttccaacccattttctaagatatttcccaagctatgtatatatggtgaatgtagaagtattgtattgcagtcttagcaggtcagctggctcgccttggccgcgtttcgccgtttccccagctggagatcctggagcggtgggtagctgcgctctgccgcggctgtagggtgggtaggcggaactcttgctctctagacgtcacctacgtgctattatcgaaacttttattgttaccttttttcttccattcccttgccactgatttccattccttgtgagccactatctgtagaatatcgtaaccctacaaccacgacttttgttagcgttcactcataccattgctttccaaaatgtcatcccttgcgaatgtgatgaggccggttcttcggcgggccaccagagtatcaccacgatgcgcccgtccgtctagatcactcaatgtgcaacagtggagggcactatctgctacgcctcgccgccagttcgacatctccgagatcccccctacaccaataacgcacatgtccgagaccgagactgctatgcaggaagcggtttctaagttcgccagcgacgccatcttgcccaaggtccgcgaaatggatgagaacgaaaagatggatccggcgcttgtagagcagcttttcgaacagggtctgatgggtgtcgagatcccggaagagtacggcggcgctggcatgaacttcacgtccgccattgttggtattgaggagctagcacgcgtagatcctagtgtcagtgtcatggtcgacgtccacaacacgttggtcaacaccgctgtcatcaaatacggcagcaacgagatcaagaagaagtatctcccggctctagcgaccaacacggtcggcagcttctgcttgagcgaacctgtatcaggatccgacgccttcaagctggccaccaaggctaccaagactagcgacggctacactatctccggcagcaagatgtggattacaaactcgatggaggccaacttcttcatcgtgtttgctaatctcgatcccagcaagggccaccgcggtatcacggccttcatcgtagagaaggacgccaagggattcgagatcgcaaagaaagaaaagaagctaggtatcaaggccagcagcacttgcgtgctcaacttcgacgacgtgcagattcccaaggagaacttgcttggtgaggaggggcaaggctacaaatatgccattggtcttctcaacgaaggtcgtattggtattgccgcacagatgaccggtcttgccctcggtgcttgggagaacgcggtcaagtatgtctggaacgaccgcaagcagttcggccagcttgttggtgagtttcagggcatgcagcaccagattgctcagtcctacaccgagatcgcggccgctcgtgcccttgtctacaatgccgccaggaagaaggaagcgggtgaggatttcgtcatggacgccgccatggccaagttgtatgcctcgcaggtcgccggtcgcgtcagtggtctagcagtcgagtggatgggtggtatgggtttcgtccgtgaaggtcttgctgagaagttctggagagatagcaagattggtgccatctatgagggaacaagcaatattcaactcaacaccattgccaagctcctgcagaaggaatacactgcttaggcaaaagaaatgggaagcttcgcagaatataaacaattctgtccattttcggtcatttattttgcccctttggcaacttagcatcatggagttctgcgcaatgtggcatggtagaaatctgatttgcataccaatataaataaagttaaaaactcacaatcgtcacgttctgagcgtacaggtgctctttcgagcctctg

SEQ ID NO: 20312 - DNA, 459 bp, Muscodor strobelii
  misc_feature: SGI cDNA ID NO. 566853
  misc_feature: Encodes the peptide sequence at SEQ ID NO 20313
atgaagtttgccgcactcctatctttggcctgggttacggctgcgacagctaaaggcttcgccgtcgcgaacgcagccgccaacgcaacaaatggcattgccaacaacagcagtctcgcggacggcgcaggctccatccaaaacatcggtcagaacggcctggaagacgctattctacaactaatgctttcgatgggcatctgcaacttcaatctcaatagtattcagaacctcggtggcaacaatgagcttcaactactccttcagctacaacaactcagtcagttggaggccatcggcgccatcaacccaattgtggtcgaccagctcattcagcaagaaataatagctcagaattttaatcttaatgtcattaagcggagtatcgatgcgtccgtcaaacgagccgctcatagcagagctcgccctttcatcgcaaagcgagcgggacaatgttga

SEQ ID NO: 20313 - protein, 152 aa, Muscodor strobelii
  misc_feature: SGI Peptide ID NO. 566853
MKFAALLSLAWVTAATAKGFAVANAAANATNGIANNSSLADGAGSIQNIGQNGLEDAILQLMLSMGICNFNLNSIQNLGGNNELQLLLQLQQLSQLEAIGAINPIVVDQLIQQEIIAQNFNLNVIKRSIDASVKRAAHSRARPFIAKRAGQC

SEQ ID NO: 20314 - DNA, 465 bp, Muscodor strobelii
  misc_feature: SGI cDNA ID NO. 566854
  misc_feature: Elevated expression when VOC is produced
  misc_feature: Encodes the peptide sequence at SEQ ID NO 20315
atgaagccctccatgatcatcggcgcattcgctgctcttgtcagcgctgcccctactactgtcgagacccgcagctctgtggatctcaacgcattcaaccagtttgcgtttgccaaccaagatctccagtacctcctggccatcaaccagtttgatcttcaggcattcgcgcagttgtctgcgttcaacaatctccaaattggcaacttccagagcctcttttccaacaacgtctttgatgtcaacgctctgctccagttgcaacaggtcgctatgctggcccagcttgcccagctcggtgtcttcagcaacttcgatctctcaactgttaacttcaacgtcttcgatctcggtcttgccaacgccattggtggtttcaacgttggatccgtcattgactccagccttatcccccagatccagactgtcattgcacaaacacaattccaaaccatagttgtatga

SEQ ID NO: 20315 - protein, 154 aa, Muscodor strobelii
  misc_feature: SGI Peptide ID NO. 566854
  misc_feature (33)..(154): NCBI GI: 46111463 Blast Desc: FG02613.1 [Gibberella zeae PH-1]
  misc_feature (33)..(146): NCBI GI: 256727946 Blast Desc: NECHADRAFT_122734 [Nectria haematococca mpVI 77-13-4]
  misc_feature (4)..(148): NCBI GI: 39951779 Blast Desc: [Magnaporthe grisea 70-15] gi|145020626|gb|EDK04755.1| [Magnaporthe grisea 70-15]
  misc_feature (20)..(146): NCBI GI: 261352333 Blast Desc: [Verticillium albo-atrum VaMs.102]
  misc_feature: Useful for introducing or modulating the production of volatile compounds
MKPSMIIGAFAALVSAAPTTVETRSSVDLNAFNQFAFANQDLQYLLAINQFDLQAFAQLSAFNNLQIGNFQSLFSNNVFDVNALLQLQQVAMLAQLAQLGVFSNFDLSTVNFNVFDLGLANAIGGFNVGSVIDSSLIPQIQTVIAQTQFQTIVV

SEQ ID NO: 20316 - DNA, 3363 bp, Muscodor strobelii
  misc_feature: SGI EST ID NO. CUFF.47521.0
  misc_feature: Variant of the nucleotide sequence at SEQ ID NO 20314
gcttcgctaaccgtacaaagatctctgcttgatcacttgtgatcctagtcgatgatcaatctcttcggcagatatggaagtcatctagccgcctggaaggaatgagaagtttccggtactgatgagaccggtccctcaggagtttccagccgcttagggaccatgtcgaatgggggaactgagagaggatcatgttccaagtactcaaagatctcaaaatactcaagatcaaggcacctatgcctcaaggtcgacgcctagatgagcggtccctgtaatttaggaccaaagatgggcatgccgtgtatgccgagatacgatcatcagcttgtcaagccacgatggagcctatgatgatgtgtttcttgcccggcatcgtttctgccaagagcatcaatatcttccgcatttgctcgatggcccctgccaagcatttgttttatcccactttcacccgttaagtcatgactgcctcctggggcaaccggatcactccttcaatggcattccgagatgttgtttgcctccgtgatcttggcgctgtttcttcgccttatgccatcccatcatatcatcatgcaacttggtatataagtgcattggctagcccccagtgacacctcgatcttgtttcccactaccacaccacaaagacacctcccgatcttcaatcactctttccattcactccttcagagctgtgctcgttgttcaatttcactcttttaaagtaacggccgtgctgaactttcgagctgtgctcacttataattaatattttaatatatcaacctttccgactttaccctcattcaaaatgaagccctccatgatcatcggcgcattcgctgctcttgtcagcgctgcccctactactgtcgagacccgcagctctgtggatctcaacgcattcaaccagtttgcgtttgccaaccaagatctccagtacctcctggccatcaaccagtttgatcttcaggcattcgcgcagttgtctgcgttcaacaatctccaaattggcaacttccagagcctcttttccaacaacgtctttgatgtcaacgctctgctccagttgcaacaggtcgctatgctggcccagcttgcccagctcggtgtcttcagcaacttcgatctctcaactgttaacttcaacgtcttcgatctcggtcttgccaacgccattggtggtttcaacgttggatccgtcattgactccagccttatcccccagatccagactgtcattgcacaaacacaattccaaaccatagttgtatgagtggttatggaaatgtaacaagatcgctaccctcactgggaattctttgacagacatcagggtttctacaatctcttttccttactacggagagctgttgcggagttgtatagcagagaaggcaagatccctctgtaggatgagattattaaaggcaagggacatttggggagataggagatcgattacgaaatagaatatataagttgaacctggatatcggtgtttctgctttagccttgccaattacctctttaggtcacaagatactatacaatgttctatttctcaactcttacatgacttgcgtcaactcaaacggcagcccgggttcctgagctgctgtgacgcaatactcacgtgattgttatagttcgagagtgatgttcattgtatttgagcttagtgtaatgcgagatatctaaataagcgagggtacagacacatttttgtgtcgctcactttccacgaatagctgctcgtgggactgccgccttaccacctccctcatggcagcatcgctccatccggttatgttctggaagacgagaagaagtctgaccgataagacaatgtggatcatgatcatcgtatcagcagagcatatgatcgagacatattttttctcctttctcgttcaggcaagatgcttgtcgccaaggaaacgtgcacacacctaacctacctaacggcttgatttcgtgcagcacatgcacatgctaccgatgatcgcctgcctacatttccgacgcctactatacggcttataatatgggtatacataaaggcggtattcgtcagctagtgaggcgggttcgcgaagcagcacataatcagggcatatcgacgtcaccattaccacaattgactcccacaacaatcatcgattggtgtacctctgctacgaataggatctgtacttcatgtagtcaccagggttggatgattgggtagtcatttcaacaggttgtgccttgctttatagaagataagctgccatcacgcccatgatgcgatttcatttcgtcatctaagagatacttcttctagcgtattgtaggatccgtgcctccccttacttgaaaccgaagccgggcgattatcactttcaagcgtgatcaggtggtctacaacgccaatgaggaggaacatgcatctgtgtgcagaatactgatcacgaagacttgtcgaacgccagtgaaaaggctcaattgtaagtgaggtgcttatgaagcgttgccaagcgcggaagcgaaggaggcctaactgaacagtatctattagattcaagcatctacattgtgaaacacctataataagtcatggcttgtgagttctatagccaaaagcgtagtcttccagtacgctagtttcaacgttaccatgaaatttttgacaggagatccggctatcaacccgtcgtgaaaggatggagttatgggattagcagcgagcgctagtaacaaaccccgcaaccctggtatcgtattatcctggcacgctttgattattatctcataggcgcgttactattgcacgataatgaaacgctcgggggatggtcaggtgagcggatttctgggagcaaagcaagcgtcagatgtattgtaggtaccgtgccgacgatatggtttctttccggccttagtgatggggctcctctgtgactcaagagccaagagagatcgattgcccctcattacagtggtcgcgtagttgtgaatgtcggtctacgtccgaggtagggctgcagaacaggccacgccttgccttgcgtaaagattttcttcccttttttttttgcctttccgcacactctcaatagatgttactcggcggagggcggctatgttaggcataaaccgaattgccaacctgaagttggacagatcaactcgaccttgggtcatattgatattaatccatgcctgacccgccgtgctggcacgcaggaggatgtcggtgattgcgtccttggtgcgtcgtgcagactcgtgggttggctccataacgtccaggtttgcacattagctgccgtaaccagagcaggaattaaacaggcagctagcccaagacaggca

SEQ ID NO: 20317 - DNA, 2139 bp, Muscodor strobelii
  misc_feature: SGI cDNA ID NO. 566855
  misc_feature: Reduced expression when VOC is produced
  misc_feature: Encodes the peptide sequence at SEQ ID NO 20318
atgtcacagaatgacggtagtgaacgagaacactcgatcaaaccaaaaacaacgaagagtatcacggagcgtgtgttacaatggtgtaagtctggggatagtgtgacatctcttctcgccgcagattcttccctgtctcctggtgatgcttgggcgaagctttatcatggtcatgttccgggtagtaatggtcgtggtgatgatcatgctcgaaaagattcaaagatctctattgactatcagccgcttttgagggctcgcgaatgtggcaaatggggtgagaatgaaccaagtgagctgttccaacaaatatatcatgatgcgctctgtactctagacgacgatccggggcgcgccatggtcagtccatccctaatggggagatcagggactgtgcctctgacagtgctttcagtcgtacccgacatcgtacgacacatgtcaaacctcatcgtgcgggctgagactgaagtctttctcgcaacgaatttctgggcaagtggtgtggctacaaagtacatcaccaacgctatcctcgagctgtctaggagagctgaagcgagaggcaagcgtgttgtcatgaagattctatacgaccgtggcaatccaaggcaagttatcgatccgcatcacatcgtcccagaaaaagactatgtgggtggcgcggtcaaacttccggcagccaaagacataccgtttgtcgatctcgaggtcatgaattatcatcaacctgttctcggcacattccatgcgaagtacatggtggtcgatcgtcgaattgctgtgattcagagcaataatatccaagaaattgacaatctcgagatgatggtccatgttgagggaccgattgtggattcgctgtacgatatggcgttgataagctggcacaaagtcttgaagccgcccttgccatgtcttcggtctgcttctgccagcagcgagaagacgaaatctgtactgccgcagagtgggttattctctgagaaaggttgcatcaaaggacactcggcagttgtcgatcctgaccagatgccctcgcagccaccatacggtaaagaggcggccgtagaaggatggaacagcgagacatattccaatccggctcttcgaaatagagataatggcgtggtaaagtcacaagaagccgaaccttacaaaaaaataccggagcacaccatagaagacccccactacgatgacgatattgcgggtgaagtgttccgcgtgcaagctgcggtgtcagcgaagccagatgaaacaacgatgcaggctgttgcaaaacatctaaatcatacgataaacgttggttttctgggcgatgcacccgaatgcaatcctatcgatgaaatgactccatacataccattaccagagcatgagccattcccaatggctctcgtttgtagacctccgtttggacctcctacccattcttcgatagtgaaccctcagaacgaagcttggttgtcggcgctgcgcaatgcaaaactcaacgtcttcattcagacaccgacgttgaacgctaagcctcttattccggctatcattgaggcatgtgaaagaggcgttgatgtgtactgctatatatgtcttggatacaacgatgcgggtgagctgctccccatgcaaggtggccacaacgacaaaattgtgaaccaaatgtacaagaccttatcatctgaaggacggcagcatctgaaatggtactggtacgtagccaaggaccaaacaaggccagttcacgcagggaagaaaaaacgtagctgccatgttaaactcatgatcgtcgatgagcatgtcgccatacagggcaacgggaatcaagatacgcagtcatggtatcacagtcaggagatcaatatcatgtacgatagtcctaaactgtgccgtgggtggatcgaggctttgagacgtaaccagaacacgggatcatatggtgcagttagtcaggaggacgggatctggagggatgaacatggaaatactgcggatggcgcaatgggtcctgattctggacattttgcttgggcgaagggaattataggagctgtcaaaagggtacaaggcacgggggcttttgatgagtatgctttgattttggatacaattacgggtctgtatcccgattttgtatag

SEQ ID NO: 20318 - protein, 712 aa, Muscodor strobelii
  misc_feature: SGI Peptide ID NO. 566855
  misc_feature (19)..(694): NCBI GI: 145607681 Blast Desc: MGG_10172 [Magnaporthe grisea 70-15] gi|145015188|gb|EDJ99756.1| MGG_10172 [Magnaporthe grisea 70-15]
  misc_feature (21)..(694): NCBI GI: 116195322 Blast Desc: CHGG_04259 [Chaetomium globosum CBS 148.51] gi|88180172|gb|EAQ87640.1| CHGG_04259 [Chaetomium globosum CBS 148.51]
  misc_feature (21)..(694): NCBI GI: 119481587 Blast Desc: phospholipase D Active site motif protein [Neosartorya fischeri NRRL 181] gi|119408976|gb|EAW18925.1| phospholipase D Active site motif protein [Neosartorya fischeri NRRL 181]
  misc_feature (21)..(694): NCBI GI: 146322980 Blast Desc: IQ calmodulin-binding motif protein [Aspergillus fumigatus Af293] gi|129558556|gb|EBA27500.1| IQ calmodulin-binding motif protein [Aspergillus fumigatus Af293]
  misc_feature (1)..(693): NCBI GI: 67538768 Blast Desc: AN5554.2 [Aspergillus nidulans FGSC A4] gi|40743069|gb|EAA62259.1| AN5554.2 [Aspergillus nidulans FGSC A4]
  misc_feature (14)..(692): NCBI GI: 259484989 Blast Desc: TPA: IQ calmodulin-binding motif protein (AFU_orthologue; AFUA_2G13615) [Aspergillus nidulans FGSC A4]
  misc_feature (21)..(694): NCBI GI: 171691344 Blast Desc: protein product [Podospora anserina] gi|170945620|emb|CAP71733.1| protein product [Podospora anserina]
  misc_feature (21)..(675): NCBI GI: 121716028 Blast Desc: MmgE/PrpD family protein [Aspergillus clavatus NRRL 1] gi|119403780|gb|EAW14197.1| MmgE/PrpD family protein [Aspergillus clavatus NRRL 1]
  misc_feature (21)..(694): NCBI GI: 159129753 Blast Desc: conserved [Aspergillus fumigatus A1163]
  misc_feature (21)..(694): NCBI GI: 240111037 Blast Desc: Phospholipase D active site motif containing protein [Coccidioides posadasii C735 delta SOWgp]
  misc_feature: Useful for introducing or modulating the production of volatile compounds
MSQNDGSEREHSIKPKTTKSITERVLQWCKSGDSVTSLLAADSSLSPGDAWAKLYHGHVPGSNGRGDDHARKDSKISIDYQPLLRARECGKWGENEPSELFQQIYHDALCTLDDDPGRAMVSPSLMGRSGTVPLTVLSVVPDIVRHMSNLIVRAETEVFLATNFWASGVATKYITNAILELSRRAEARGKRVVMKILYDRGNPRQVIDPHHIVPEKDYVGGAVKLPAAKDIPFVDLEVMNYHQPVLGTFHAKYMVVDRRIAVIQSNNIQEIDNLEMMVHVEGPIVDSLYDMALISWHKVLKPPLPCLRSASASSEKTKSVLPQSGLFSEKGCIKGHSAVVDPDQMPSQPPYGKEAAVEGWNSETYSNPALRNRDNGVVKSQEAEPYKKIPEHTIEDPHYDDDIAGEVFRVQAAVSAKPDETTMQAVAKHLNHTINVGFLGDAPECNPIDEMTPYIPLPEHEPFPMALVCRPPFGPPTHSSIVNPQNEAWLSALRNAKLNVFIQTPTLNAKPLIPAIIEACERGVDVYCYICLGYNDAGELLPMQGGHNDKIVNQMYKTLSSEGRQHLKWYWYVAKDQTRPVHAGKKKRSCHVKLMIVDEHVAIQGNGNQDTQSWYHSQEINIMYDSPKLCRGWIEALRRNQNTGSYGAVSQEDGIWRDEHGNTADGAMGPDSGHFAWAKGIIGAVKRVQGTGAFDEYALILDTITGLYPDFV

SEQ ID NO: 20319 - DNA, 5830 bp, Muscodor strobelii
  misc_feature: SGI EST ID NO. CUFF.47787.4
  misc_feature: Variant of the nucleotide sequence at SEQ ID NO 20317
gttgaactctaaagagttgttgaagcaaatgattggtcgtgtacgggcttaaatagttattgtaaactcttcatttagagtatcaaccaaaacaactaaaaaaacaaaaccgtttgctctttcaataggtattgacctcgcgacggcgaacagcgaatataacaacaggcggacagggatctgtggagtgtggggatgaaacgtcatgtctgagaccagttgggagactggggagtgtctgggtggataggcaaccgccgaggtgccgtcagcgatacagctagcataggtatctacagctcacctggccaagctcagctgaccaactccaacatcaaacatcgtcctcatcatctggtatccttgctgctcgttagggattttgggatttattcacaatcttccaagcgaagtcttcatcttggaggactcttctcgtttacctttgtctctccgtcggcatcgtacatctctctttacatcctccgattccgctgccgtccgagctggtcgccatgaagtcgtctttactctcgtctctgcttctgcctctggcagctagcgctcgcttcatccaggccgatgaggcgcaacccgtctatatcaacaccgacgcgctgtctggcgaaaacacagctacttctatcgagaagtttctcatcgagttctctcccgacgaccagcgctgggtcaccgaggatgaaaaatgggagctgcgccgcgtacgctcgccccgtctccagcttgaaagatacgatgctgacaaactcccgcacaggccggccaccgctttatggacataactgagacccgtgacctgggcgcctatggtatcgcctcgtcgcggcgaacccccgtcttccccaagaaagtcgcactccaagacactatccaccccttactgtccaacttgtccaagaccgagatgcaggaccatctcgagaagctgacgagcttccacacccgttattacaagtcggactacggccgccaatcttccgaatggctcctgcagcaggtccagaacaccattgccgaagctggcgccgacgagtatggcgtcaaggccgagcacttccgccactcgtggggccagcactccattatcgcaacgatccctggcaagtctaagtccacgatcgtcataggcgcgcaccaggactcaatcaacctctggctaccctcgattttggctgctcctggtgccgacgatgatggtagcggtaccgtcaccatcctggaggctttcagagtcttgctgtcgtcgaaagacgtgatcgagggtaatgcgcccaacacgatcgagtttcactggtactctgccgaggagggcgggttactgggtagtcaagcaatcttttctgagtatgagaagcaaggccgagatgtcaaagctatgctacagcaagacatgaccggcttcgtacagaagaccatcgaggctggcaagcccgagagcgtcggcgtcattactgatttcgtggacccggctctgaccgccttcatcaagaaggtcattgaggagtattgcgagattccgtgggttgagactaaatgcggatatgcctgctccgaccacgcatctgcctccaaagccggctatccctctgcttttgtcatcgagtcgacgttcggtgactcggacgaccatatccacagcaccgaagatctgattaagtatctgtcgtttgatcatatgttacagcatgcgcgcatgacactttcattggtctacgagctaggattcacggacttcaagaagctggagaagacacagtttggtgaactatagaaatccgattttaagcgacaatgatttcgtaagaatatgacttatagtgccttatgccttagctcgaaacgcgtaccaaatgtgtaccgaatgcgtaccaaatgcgtgtccgtccgaccctcctctcgcatacaatagatgaatatacaataagtgcagtatttaaggtataattgagaatatgcagtgtgaaccccacgacttgcaagaatatgatattggaggaaatggaagttattaagtttagcgctagatcagataaataactaaattttgcagtttcaaacattgcccctcaaaccttgctcggacgatagcagaactaggtggatctcaatactgaccgtgccatgaacgtactccttatcgcggtttcgaatcgtttcgaagatttgaacgccgttggtcttttggaatttttcacaactaaaaactagttgtattggaacgttgcgatgacgacgtaccctcatggcttgcactacataagataagtaaaccaaatgaccaaacaagtctaaaattttgcaacgcctatgtctaacgactgtcgcatccattcctttccacagtcacgacggcaatagttcacgcatggtgcgtcattcgtagaccgttcggcatcgttgtgccggatcagcctcctcggatctgacttaccatggtgagggaggctaacaaaaagaagcagcctatcagacgagccgaacccccgagatcctagtctgaaataggcattttctcaagggttgatctgacttggtgggcctaaaagtttcgctgcagtcgtcaaaacaggctttgccaagaaatttggaactatgatgccaagatttgaggtttaacaccttcagctcgtccacgatgcatactctcttacgaaatgcgtgattgttggaaatatgagggtggatgcgctttggtaacgtagggatattatgttttgccttttcctgaatatgttttcattctctcgccatcgacgtctcactcctgaatacaattcattgttgctgtacttgaaagcttagtagtctgtccatactcgttttcagtagacatactatcaaagcacttgaccagattgagagttcgattcgaaagtacgaattcttaaactttcatcccttacctgtcggaagctcgtgacaaaggctggaactgaaagaattagcgcagagaaccaggccgatacaatgtcacagaatgacggtagtgaacgagaacactcgatcaaaccaaaaacaacgaagagtatcacggagcgtgtgttacaatggtgtaagtctggggatagtgtgacatctcttctcgccgcagattcttccctgtctcctggtgatgcttgggcgaagctttatcatggtcatgttccgggtagtaatggtcgtggtgatgatcatgctcgaaaagattcaaagatctctattgactatcagccgcttttgagggctcgcgaatgtggcaaatggggtgagaatgaaccaagtgagctgttccaacaaatatatcatgatgcgctctgtactctagacgacgatccggggcgcgccatggtcagtccatccctaatggggagatcagggactgtgcctctgacagtgctttcagtcgtacccgacatcgtacgacacatgtcaaacctcatcgtgcgggctgagactgaagtctttctcgcaacgaatttctgggcaagtggtgtggctacaaagtacatcaccaacgctatcctcgagctgtctaggagagctgaagcgagaggcaagcgtgttgtcatgaagattctatacgaccgtggcaatccaaggcaagttatcgatccgcatcacatcgtcccagaaaaagactatgtgggtggcgcggtcaaacttccggcagccaaagacataccgtttgtcgatctcgaggtcatgaattatcatcaacctgttctcggcacattccatgcgaagtacatggtggtcgatcgtcgaattgctgtgattcagagcaataatatccaagaaattgacaatctcgagatgatggtccatgttgagggaccgattgtggattcgctgtacgatatggcgttgataagctggcacaaagtcttgaagccgcccttgccatgtcttcggtctgcttctgccagcagcgagaagacgaaatctgtactgccgcagagtgggttattctctgagaaaggttgcatcaaaggacactcggcagttgtcgatcctgaccagatgccctcgcagccaccatacggtaaagaggcggccgtagaaggatggaacagcgagacatattccaatccggctcttcgaaatagagataatggcgtggtaaagtcacaagaagccgaaccttacaaaaaaataccggagcacaccatagaagacccccactacgatgacgatattgcgggtgaagtgttccgcgtgcaagctgcggtgtcagcgaagccagatgaaacaacgatgcaggctgttgcaaaacatctaaatcatacgataaacgttggttttctgggcgatgcacccgaatgcaatcctatcgatgaaatgactccatacataccattaccagagcatgagccattcccaatggctctcgtttgtagacctccgtttggacctcctacccattcttcgatagtgaaccctcagaacgaagcttggttgtcggcgctgcgcaatgcaaaactcaacgtcttcattcagacaccgacgttgaacgctaagcctcttattccggctatcattgaggcatgtgaaagaggcgttgatgtgtactgctatatatgtcttggatacaacgatgcggtaagttgatcaacatttcccctctaggttctcgggaatattaccatttcgtgatcccaatggtgagctgctccccatgcaaggtggccacaacgacaaaattgtgaaccaaatgtacaagaccttatcatctgaaggacggcagcatctgaaatggtactggtacgtagccaaggaccaaacaaggccagttcacgcagggaagaaaaaacgtagctgccatgttaaactcatgatcgtcgatgagcatgtcgccatacagggcaacgggaatcaagatacgcagtcatggtatcacagtcaggagatcaatatcatgtacgatagtcctaaactgtgccgtgggtggatcgaggctttgagacgtaaccagaacacgggatcatatggtgcagttagtcaggaggacgggatctggagggatgaacatggaaatactgcggatggcgcaatgggtcctgattctggacattttgcttgggcgaagggaattataggagctgtcaaaagggtacaaggcacgggggcttttgatgagtatgctttgattttggatacaattacgggtctgtatcccgattttgtatagtgttcaaacggagaggtagaatgggaatcgtaggagtacctaagctatacttgttgaagcgctttggagcgtgtatatgtctggtattgaatttttcccgcgtctgtagtacaatgatgtcagcctatggatctcataaacagatgaactagacgaactgaagtgtagatttcaatcctcctgctctatgctagctcacttcctcgcgtacattaagactcttttctctagaactatacgtctagaatctgccaaataactcatgccaacttgttcagttgttagcaatgccgtcatgtttgggaacgtgactattcgttgagaagaagttccgtctattccgaggatgaattctgatcttgttcctatttccagcacggtaccaaagttgaacggaaatacttcgagctgattattagtttgaatttctctgaacggaaagcgagcgtcataagtctcgatttagttagaatgcctccgttttagaagtgggagtatctcatagtttgaactggcgtgatgtgcttttaatgccctctgaggacaagtaacgcatacttgttgtctgttcagttgaagttctgtttcaaactgggtccttatctttagtcacttattataaagttttgaggtacacatctt

SEQ ID NO: 20320 - DNA, 1221 bp, Muscodor strobelii
  misc_feature: SGI cDNA ID NO. 566856
  misc_feature: Encodes the peptide sequence at SEQ ID NO 20321
atgaagtcgtctttactctcgtctctgcttctgcctctggcagctagcgctcgcttcatccaggccgatgaggcgcaacccgtctatatcaacaccgacgcgctgtctggcgaaaacacagctacttctatcgagaagtttctcatcgagttctctcccgacgaccagcgctgggtcaccgaggatgaaaaatgggagctgcgccgcgccggccaccgctttatggacataactgagacccgtgacctgggcgcctatggtatcgcctcgtcgcggcgaacccccgtcttccccaagaaagtcgcactccaagacactatccaccccttactgtccaacttgtccaagaccgagatgcaggaccatctcgagaagctgacgagcttccacacccgttattacaagtcggactacggccgccaatcttccgaatggctcctgcagcaggtccagaacaccattgccgaagctggcgccgacgagtatggcgtcaaggccgagcacttccgccactcgtggggccagcactccattatcgcaacgatccctggcaagtctaagtccacgatcgtcataggcgcgcaccaggactcaatcaacctctggctaccctcgattttggctgctcctggtgccgacgatgatggtagcggtaccgtcaccatcctggaggctttcagagtcttgctgtcgtcgaaagacgtgatcgagggtaatgcgcccaacacgatcgagtttcactggtactctgccgaggagggcgggttactgggtagtcaagcaatcttttctgagtatgagaagcaaggccgagatgtcaaagctatgctacagcaagacatgaccggcttcgtacagaagaccatcgaggctggcaagcccgagagcgtcggcgtcattactgatttcgtggacccggctctgaccgccttcatcaagaaggtcattgaggagtattgcgagattccgtgggttgagactaaatgcggatatgcctgctccgaccacgcatctgcctccaaagccggctatccctctgcttttgtcatcgagtcgacgttcggtgactcggacgaccatatccacagcaccgaagatctgattaagtatctgtcgtttgatcatatgttacagcatgcgcgcatgacactttcattggtctacgagctaggattcacggacttcaagaagctggagaagacacagtttggtgaactatag

SEQ ID NO: 20321 - protein, 406 aa, Muscodor strobelii
  misc_feature: SGI Peptide ID NO. 566856
  misc_feature (188)..(377): Pfam Id: PF04389 Pfam Desc: Peptidase family M28
  misc_feature (16)..(400): NCBI GI: 116195320 Blast Desc: CHGG_04258 [Chaetomium globosum CBS 148.51] gi|88180171|gb|EAQ87639.1| CHGG_04258 [Chaetomium globosum CBS 148.51]
  misc_feature (8)..(404): NCBI GI: 145607679 Blast Desc: MGG_10171 [Magnaporthe grisea 70-15] gi|145015187|gb|EDJ99755.1| MGG_10171 [Magnaporthe grisea 70-15]
  misc_feature (18)..(400): NCBI GI: 85083102 Blast Desc: NCU04479 [Neurospora crassa OR74A] gi|28918132|gb|EAA27812.1| NCU04479 [Neurospora crassa OR74A]
  misc_feature (18)..(392): NCBI GI: 156049821 Blast Desc: LAP2 [Sclerotinia sclerotiorum 1980] gi|154693016|gb|EDN92754.1| LAP2 [Sclerotinia sclerotiorum 1980]
  misc_feature (2)..(395): NCBI GI: 256726837 Blast Desc: [Nectria haematococca mpVI 77-13-4]
  misc_feature (47)..(400): NCBI GI: 171691342 Blast Desc: protein product [Podospora anserina] gi|170945619|emb|CAP71732.1| protein product [Podospora anserina]
  misc_feature (2)..(406): NCBI GI: 46121733 Blast Desc: FG05245.1 [Gibberella zeae PH-1]
  misc_feature (16)..(395): NCBI GI: 145583571 Blast Desc: aminopeptidase [Hypocrea lixii]
  misc_feature (7)..(396): NCBI GI: 169618822 Blast Desc: SNOG_12603 [Phaeosphaeria nodorum SN15] gi|111058781|gb|EAT79901.1| SNOG_12603 [Phaeosphaeria nodorum SN15]
  misc_feature (40)..(396): NCBI GI: 189210549 Blast Desc: leucine aminopeptidase 2 [Pyrenophora tritici-repentis Pt-1C-BFP] gi|187977699|gb|EDU44325.1| leucine aminopeptidase 2 [Pyrenophora tritici-repentis Pt-1C-BFP]
  misc_feature (96)..(391): SWISSPROT Homolog: EC 3.4.11.10 Bacterial leucyl aminopeptidase
MKSSLLSSLLLPLAASARFIQADEAQPVYINTDALSGENTATSIEKFLIEFSPDDQRWVTEDEKWELRRAGHRFMDITETRDLGAYGIASSRRTPVFPKKVALQDTIHPLLSNLSKTEMQDHLEKLTSFHTRYYKSDYGRQSSEWLLQQVQNTIAEAGADEYGVKAEHFRHSWGQHSIIATIPGKSKSTIVIGAHQDSINLWLPSILAAPGADDDGSGTVTILEAFRVLLSSKDVIEGNAPNTIEFHWYSAEEGGLLGSQAIFSEYEKQGRDVKAMLQQDMTGFVQKTIEAGKPESVGVITDFVDPALTAFIKKVIEEYCEIPWVETKCGYACSDHASASKAGYPSAFVIESTFGDSDDHIHSTEDLIKYLSFDHMLQHARMTLSLVYELGFTDFKKLEKTQFGEL

SEQ ID NO: 20322 - DNA, 5830 bp, Muscodor strobelii; identical to SEQ ID NO: 20319
  misc_feature: SGI EST ID NO. CUFF.47787.4
  misc_feature: Variant of the nucleotide sequence at SEQ ID NO 20320

SEQ ID NO: 20323 - DNA, 483 bp, Muscodor strobelii
  misc_feature: SGI cDNA ID NO. 566857
  misc_feature: Encodes the peptide sequence at SEQ ID NO 20324
atgcagattcatatcaaactcgctgcttggtggctgctcagcacagaagccgcagcatggatcttggcctacccgcctgcgctcgggaatctacctggcgacgaggcaccttgcggtggtttggcgccagaagatatttccgtattcacagaatggccaagtgctggactcgatatcagcatcaccaacttcagcgatgcctccaacgctggattttacgtcaaggtggcactactcgaagatgagctgacttttgagacagtcaaggattggggtcagcctccatcagggtcgggttccctctgttatccacgtgtccatggcaagacggatgaggagtggctgggcaagaaagccatcctccagatctgggaaactctaggaggtcctaataactataaattccagtgcgctggggttacgttcattaataaagatgataatcctggtccgaatgtttgtgatcggggagggggaaagtga

SEQ ID NO: 20324 - protein, 160 aa, Muscodor strobelii
  misc_feature: SGI Peptide ID NO. 566857
MQIHIKLAAWWLLSTEAAAWILAYPPALGNLPGDEAPCGGLAPEDISVFTEWPSAGLDISITNFSDASNAGFYVKVALLEDELTFETVKDWGQPPSGSGSLCYPRVHGKTDEEWLGKKAILQIWETLGGPNNYKFQCAGVTFINKDDNPGPNVCDRGGGK

SEQ ID NO: 20325 - DNA, 1083 bp, Muscodor strobelii
  misc_feature: SGI cDNA ID NO. 566858
  misc_feature: Encodes the peptide sequence at SEQ ID NO 20326
atggaacaacaggaaggaattatctctgaaaagggggctcagataccaagaagaccagttcatcgtccagcacaagacagcaattcggctggaccatcagaaagtacacatgaagaagaggccgaatcttcacatcaacagtcttttgagcctccgccatactccggtccaaccacaagcgccgccgccgcggctgcttcttcgtctcgtcaacagaacccgaagggtccgcagtattacccggggctgccgttattagattaccggcaatatgctccaccaatgtttgatctgtcggccgacggcacgaccatcaccagcaaggcgacttatttatccgagaacgtcaaagcattgtcgcagttgatacaaacactggccactgtaccgccgaaaccgcaggttctcatccacggtgctcgaggtcggcatgtggatttcagcttaaagctcaacttaatgagccttttggtgccagataacccgcggaatcgcatggattatctgcgctgcgtaacgaaagatgagatggcttatcgcggaagcaacgagccgtcgttgcgaccggagctcccgggcggcgatgacgggctagaggcctggtgcgcccgcttcacgaaagatcaatctagtgtcaagacctttacgctggagcgtgtggtggcaaatctcgatacgaactggttggaaggccagattcgcagcttgattgcatctcttagctacaagggatctgtgaccgtttcatttcctgttacgcatgctcgcgtaacggttcagaaccctgataaagtgaataagttctttacgagtgttactacacttttcaccggcaaagcaaaatatgaggtcgttaaagccgtgtggccgttcgcaaatgcaaggaatggcgagaccggaaggaaatgcattgttcaaagcgagaagacgtggtgggaggagtggagagatccaatcaaatacgctatcgcgcagaagagacaaggatgggtcacgaatgaggacaagctagagagccttatggagagaaaagggaacggcgcgatgatcgattggggtccggaacctccgatgtatggttaa

SEQ ID NO: 20326 - protein, 360 aa, Muscodor strobelii
  misc_feature: SGI Peptide ID NO. 566858
  misc_feature (22)..(355): NCBI GI: 256720981 Blast Desc: NECHADRAFT_85805 [Nectria haematococca mpVI 77-13-4]
  misc_feature (47)..(341): NCBI GI: 212532095 Blast Desc: PMAA_067560 [Penicillium marneffei ATCC 18224] gi|210071568|gb|EEA25657.1| PMAA_067560 [Penicillium marneffei ATCC 18224]
  misc_feature (83)..(341): NCBI GI: 242774694 Blast Desc: conserved [Talaromyces stipitatus ATCC 10500] gi|218722111|gb|EED21529.1| conserved [Talaromyces stipitatus ATCC 10500]
  misc_feature (1)..(353): NCBI GI: 238845083 Blast Desc: conserved [Microsporum canis CBS 113480]
  misc_feature (23)..(314): NCBI GI: 154321782 Blast Desc: [Botryotinia fuckeliana B05.10] gi|150850285|gb|EDN25478.1| [Botryotinia fuckeliana B05.10]
  misc_feature (146)..(346): NCBI GI: 156045854 Blast Desc: SS1G_09203 [Sclerotinia sclerotiorum 1980] gi|154693599|gb|EDN93337.1| SS1G_09203 [Sclerotinia sclerotiorum 1980]
  misc_feature (21)..(347): NCBI GI: 156062246 Blast Desc: SS1G_01239 [Sclerotinia sclerotiorum 1980] gi|154696575|gb|EDN96313.1| SS1G_01239 [Sclerotinia sclerotiorum 1980]
  misc_feature (92)..(322): NCBI GI: 154315852 Blast Desc: BC1G_04498 [Botryotinia fuckeliana B05.10] gi|150846894|gb|EDN22087.1| BC1G_04498 [Botryotinia fuckeliana B05.10]
  misc_feature (113)..(323): NCBI GI: 154314530 Blast Desc: BC1G_03974 [Botryotinia fuckeliana B05.10] gi|150848596|gb|EDN23789.1| BC1G_03974 [Botryotinia fuckeliana B05.10]
  misc_feature (119)..(335): NCBI GI: 256727881 Blast Desc: NECHADRAFT_5512 [Nectria haematococca mpVI 77-13-4]
MEQQEGIISEKGAQIPRRPVHRPAQDSNSAGPSESTHEEEAESSHQQSFEPPPYSGPTTSAAAAAASSSRQQNPKGPQYYPGLPLLDYRQYAPPMFDLSADGTTITSKATYLSENVKALSQLIQTLATVPPKPQVLIHGARGRHVDFSLKLNLMSLLVPDNPRNRMDYLRCVTKDEMAYRGSNEPSLRPELPGGDDGLEAWCARFTKDQSSVKTFTLERVVANLDTNWLEGQIRSLIASLSYKGSVTVSFPVTHARVTVQNPDKVNKFFTSVTTLFTGKAKYEVVKAVWPFANARNGETGRKCIVQSEKTWWEEWRDPIKYAIAQKRQGWVTNEDKLESLMERKGNGAMIDWGPEPPMYG

SEQ ID NO: 20327 - DNA, 1455 bp, Muscodor strobelii
  misc_feature: SGI EST ID NO. CUFF.47540.0
  misc_feature: Variant of the nucleotide sequence at SEQ ID NO 20325
cgcttcaagaatcatcaaataagtactgcacggctcctgaaatttgtttttctaggccaagcatttgctgttttgtggtgtgattgatacttcgcctcaattggtctgagcgcagcttgtcttcgtcgtgccgatcatggaacaacaggaaggaattatctctgaaaagggggctcagataccaagaagaccagttcatcgtccagcacaagacagcaattcggctggaccatcagaaagtacacatgaagaagaggccgaatcttcacatcaacagtcttttgagcctccgccatactccggtccaaccacaagcgccgccgccgcggctgcttcttcgtctcgtcaacagaacccgaagggtccgcagtattacccggggctgccgttattagattaccggcaatatgctccaccaatgtttgatctgtcggccgacggcacgaccatcaccagcaaggcgacttatttatccgagaacgtcaaagcattgtcgcagttgatacaaacactggccactgtaccgccgaaaccgcaggttctcatccacggtgctcgaggtcggcatgtggatttcagcttaaagctcaacttaatgagccttttggtgccagataacccgcggaatcgcatggattatctgcgctgcgtaacgaaagatgagatggcttatcgcggaagcaacgagccgtcgttgcgaccggagctcccgggcggcgatgacgggctagaggcctggtgcgcccgcttcacgaaagatcaatctagtgtcaagacctttacgctggagcgtgtggtggcaaatctcgatacgaactggttggaaggccagattcgcagcttgattgcatctcttagctacaagggatctgtgaccgtttcatttcctgttacgcatgctcgcgtaacggttcagaaccctgataaagtgaataagttctttacgagtgttactacacttttcaccggcaaagcaaaatatgaggtcgttaaagccgtgtggccgttcgcaaatgcaaggaatggcgagaccggaaggaaatgcattgttcaaagcgagaagacgtggtgggaggagtggagagatccaatcaaatacgctatcgcgcagaagagacaaggatgggtcacgaatgaggacaagctagagagccttatggagagaaaagggaacggcgcgatgatcgattggggtccggaacctccgatgtatggttaattgtcaagtgtaataatagaataatgatagtatatctagagctaggactattgccgaaaagggaatgttcgcatcacagcatatggatggtcgaaaattatgagtatcatcttttatgctgactttttagatatcccaggtgatctgctgacggcgattctttcttcaaggctcaatgagtcgttgcctcagcaatatggaacagcgagactcccggcgtaaatggtatctcacgg

SEQ ID NO: 20328 - DNA, 1362 bp, Muscodor strobelii
  misc_feature: SGI cDNA ID NO. 566859
  misc_feature: Encodes the peptide sequence at SEQ ID NO 20329
atgtctgatatgtctacatctgcagtgctctatcggagtttgagcgggcatttccctcacatcactggtggtgagggaaattatgtcgtgttggaagacggccggcgaatcttcgatgcttctggtggtgcagctgttgcttgtattgggcatggggactcccgagtccaggatgccatcattagccagctcaagaaaatatcttattgttccacgatattctatacaactgatgtttgcgagaagctgtgccgagagttggtggattctgccggtggttacatgaaacgggcctacattgttaattctggttccgaagcgatggaggctgctatgaaactcgcaagacaatattttctcgaaaagagtaccccagaacctgaacgtgttcggttcatcgcccgagagagttcatatcatgggacaactctgggatcgctgtcgatgggtggccacgtttaccggcgtgcgaagtacgaaccaatgcttcttgactgtatatctcgcgtgtctcgttgttttacatatcgcgacaaaggattgaatgaaaccgatggagaatatgtcaacaggcttgcccgtcagttggacgaagagttccagagggtcggacaacaaactgtttgtgcatttgttgcagaacctatcgtgggagctgcacttggctgtgtgccatttatccccggttatttaaaagcgatgaggacagtctgtgataagtatggtgccttactcatacttgacgaatgtgtggcatggggcgttcggggacatttcatgcatgggaacaagacgacactccgccagatattcagacgcttggaaaatgtttggggcggaggataccaacccattgcaggtgtgcttgtaagcaacaaagtgatcgatgtcttcgaacaaggaagcggaagtttcgtccacggccatacctaccaggggcaccccataacgtgcgccgctgcgctcgaagtccagaaaatcattcgtgaggagaagctgataagcaacgtggctgagatgggcaaagtgctgtcacagaggctggtagaattgctcggtgagcatccaaacgttggggatatccgcgggcgagggctcttctggggggtcgaatttgttgcggatagagcgacaaaacagccgtttccagcgacagacaacgtggccctcgacttggccgagatggggctacaggaaccctatcacatagcagtgtacccatcttcgggaacggcagatggtgtcaatggcgaccatattatcatctcgcccccatataacatcacagaagatgatattgagaagatcgccactacggttcagagactagtcgtcgattattttgctcgcaagatggcgtag

SEQ ID NO: 20329 - protein, 453 aa, Muscodor strobelii
  misc_feature: SGI Peptide ID NO. 566859
  misc_feature (20)..(374): Pfam Id: PF00202 Pfam Desc: Aminotransferase class-III
  misc_feature (20)..(151): Pfam Id: PF00202 Pfam Desc: Aminotransferase class-III
  misc_feature (279)..(374): Pfam Id: PF00202 Pfam Desc: Aminotransferase class-III
  misc_feature (208)..(249): Pfam Id: PF00202 Pfam Desc: Aminotransferase class-III
  misc_feature (4)..(453): NCBI GI: 116195916 Blast Desc: CHGG_04556 [Chaetomium globosum CBS 148.51] gi|88180469|gb|EAQ87937.1| CHGG_04556 [Chaetomium globosum CBS 148.51]
  misc_feature (7)..(451): NCBI GI: 85108965 Blast Desc: NCU08011 [Neurospora crassa OR74A] gi|28924292|gb|EAA33445.1| NCU08011 [Neurospora crassa OR74A] gi|39979145|emb|CAE85519.1| conserved [Neurospora crassa]
  misc_feature (4)..(449): NCBI GI: 171690906 Blast Desc: protein product [Podospora anserina] gi|170945401|emb|CAP71513.1| protein product [Podospora anserina]
  misc_feature (5)..(449): NCBI GI: 239612602 Blast Desc: aminotransferase [Ajellomyces dermatitidis ER-3]
  misc_feature (5)..(449): NCBI GI: 261191630 Blast Desc: aminotransferase [Ajellomyces dermatitidis SLH14081] gi|239589989|gb|EEQ72632.1| aminotransferase [Ajellomyces dermatitidis SLH14081]
  misc_feature (6)..(448): NCBI GI: 258578485 Blast Desc: UREG_02940 [Uncinocarpus reesii 1704] gi|237903690|gb|EEP78091.1| UREG_02940 [Uncinocarpus reesii 1704]
  misc_feature (6)..(448): NCBI GI: 240111621 Blast Desc: aminotransferase class III family protein [Coccidioides posadasii C735 delta SOWgp]
  misc_feature (6)..(448): NCBI GI: 119185905 Blast Desc: CIMG_03000 [Coccidioides immitis RS]
  misc_feature (4)..(448): NCBI GI: 242778751 Blast Desc: aminotransferase, class III [Talaromyces stipitatus ATCC 10500] gi|218722921|gb|EED22339.1| aminotransferase, class III [Talaromyces stipitatus ATCC 10500]
  misc_feature (4)..(448): NCBI GI: 212533731 Blast Desc: aminotransferase, class III [Penicillium marneffei ATCC 18224] gi|210072386|gb|EEA26475.1| aminotransferase, class III [Penicillium marneffei ATCC 18224]
  misc_feature (21)..(451): SWISSPROT Homolog: EC 2.6.1.62 Adenosylmethionine--8-amino-7-oxononanoate transaminase
MSDMSTSAVLYRSLSGHFPHITGGEGNYVVLEDGRRIFDASGGAAVACIGHGDSRVQDAIISQLKKISYCSTIFYTTDVCEKLCRELVDSAGGYMKRAYIVNSGSEAMEAAMKLARQYFLEKSTPEPERVRFIARESSYHGTTLGSLSMGGHVYRRAKYEPMLLDCISRVSRCFTYRDKGLNETDGEYVNRLARQLDEEFQRVGQQTVCAFVAEPIVGAALGCVPFIPGYLKAMRTVCDKYGALLILDECVAWGVRGHFMHGNKTTLRQIFRRLENVWGGGYQPIAGVLVSNKVIDVFEQGSGSFVHGHTYQGHPITCAAALEVQKIIREEKLISNVAEMGKVLSQRLVELLGEHPNVGDIRGRGLFWGVEFVADRATKQPFPATDNVALDLAEMGLQEPYHIAVYPSSGTADGVNGDHIIISPPYNITEDDIEKIATTVQRLVVDYFARKMA

SEQ ID NO: 20330 - DNA, 1869 bp, Muscodor strobelii
  misc_feature: SGI cDNA ID NO. 566860
  misc_feature: Encodes the peptide sequence at SEQ ID NO 20331
atggcggtgggcgtgaacgacgaggagacgcgcgccgaggtcgatgtgctgaactcgcgcctcgagaagacgacgcagctcaccaagaagatccaggcgtgtctgacgaggctcgagacgacgggcaagagcgtgcgcgacgtgtcggggccgctcaacggcgagaccaagaagctgcagatcctcggcaacaacgtcgacgccgtcatcgccgccatcgagaagctgcgccagcccgccgactccaaggacgacgaggagaacatcatccgccagggccccgacaaggccgggctggccacctacctcaactccatcaagcgcctgcagaaggccctcgagaacatgcagacctccaacctgcgcgccaaccagcagaccatctcagacctccagcgcctcatccgcaccggcaacacccagctcgagagctccttcgacaggctgctccgtgccgacaccccgcgctccgtcgagccgctgaacttcatcaccaagaacaagcccttccctctgctcgcccaggacgccctgtccaagctgagcctaatgaactcgtacgtctccggcaacagctccgccgacaaccccctcgtcaagatctacgcagatgttcggggttcctatctgtcccagaccctcgtcaacctggcctatgcgagcgtgaacacggccaagaagaagagccaggacgccatctacaagcccggcaccaacggcatcggtatgtacgcacaagccatggagggcctgctcgttgccgagtacgaaaacatctgcaacatcttcatgaggcaggattggggtcccactttccagacaacctgtcaggctcccatggccgaactggcccggactattcgggaactaaataatcacatcaaatcccaccttagcactgattgctatctagcttacgaggtgacggagatcatgtctggcctttcaaacaaccttgagacgcggacaggcgagctcaaagcgacactggctgctgccctgaagcccgtacgagagactggcaagatgtccctgtcagagctgctagacgatacaaagcgcaaggtcagctccatacaagccttgccatccgacggcgctccaatgccgattgtttccgaaactatgcagcgtctccagaccatggtaaactttctacgcccgatatcaagtattatgatatccttaggcgatggtggatggagatcatctgcgccgtcaactacaagctcagatggcatacctagcctagcgtcatttgacatcggggcagacggaaaacaaatatttgctcattattgcacagatacaattgacacgctgatgacggcactagaacagaaagctagggtcctgttgaagggcaagtctgtgttgggagtcttcttagccaattccgttaccatcatcgagcgtatgatacgggattccgatctcaagccgctccttgaaggtcggcttggtagcctggagaattggcggaaaaaggcaaaatcgctctattccgaagcctgcaaagatgtgtcaatgcatctatttgatgttattcacacaaatcgttcgcaacgaccaccatccggctccaatgagtcagcttcgattgtcaagggccttagtagtaaggataaggatagtatcaaagccaaattccaagtcttcaacacaagcttcgacgagctcgtggcccgccacaagacgtacagcatggagcgcgaggtgcgacagatgtttgccaaagatgtgcagcaggtgctcgaacccctctacaaccgcttttgggatcggtatcacgaagtagacaagggcagaggcaagtacattaaatacgacaaatcctccatcgccgccgtcttccttagtctgtattaa

SEQ ID NO: 20331 - protein, 622 aa, Muscodor strobelii
  misc_feature: SGI Peptide ID NO. 566860
  misc_feature (54)..(622): Pfam Id: PF03081 Pfam Desc: Exo70 exocyst complex subunit
  misc_feature (537)..(622): Pfam Id: PF03081 Pfam Desc: Exo70 exocyst complex subunit
  misc_feature (5)..(622): NCBI GI: 261355786 Blast Desc: exocyst complex protein EXO70 [Verticillium albo-atrum VaMs.102]
  misc_feature (1)..(622): NCBI GI: 116195918 Blast Desc: CHGG_04557 [Chaetomium globosum CBS 148.51] gi|88180470|gb|EAQ87938.1| CHGG_04557 [Chaetomium globosum CBS 148.51]
  misc_feature (1)..(622): NCBI GI: 74611308 Blast Desc: EXO70_NEUCR RecName: Full=Exocyst complex protein EXO70 gi|39979144|emb|CAE85518.1| related to exocyst complex 70 kDa component [Neurospora crassa]
  misc_feature (7)..(621): NCBI GI: 46110074 Blast Desc: FG01919.1 [Gibberella zeae PH-1] gi|83288132|sp|Q4ILI9.1|EXO70_GIBZE RecName: Full=Exocyst complex protein EXO70
  misc_feature (1)..(622): NCBI GI: 164423651 Blast Desc: exocyst complex protein EXO70 [Neurospora crassa OR74A] gi|157070182|gb|EAA33446.2| exocyst complex protein EXO70 [Neurospora crassa OR74A]
  misc_feature (1)..(561): NCBI GI: 171690904 Blast Desc: protein product [Podospora anserina] gi|170945400|emb|CAP71512.1| protein product [Podospora anserina]
  misc_feature (14)..(622): NCBI GI: 145613271 Blast Desc: MGG_01760 [Magnaporthe grisea 70-15] gi|145020388|gb|EDK04517.1| MGG_01760 [Magnaporthe grisea 70-15]
  misc_feature (1)..(621): NCBI GI: 154293132 Blast Desc: BC1G_14518 [Botryotinia fuckeliana B05.10] gi|150845663|gb|EDN20856.1| BC1G_14518 [Botryotinia fuckeliana B05.10]
  misc_feature (1)..(605): NCBI GI: 156034819 Blast Desc: SS1G_13345 [Sclerotinia sclerotiorum 1980] gi|154698748|gb|EDN98486.1| SS1G_13345 [Sclerotinia sclerotiorum 1980]
  misc_feature (9)..(621): NCBI GI: 169620531 Blast Desc: SNOG_13465 [Phaeosphaeria nodorum SN15] gi|111058229|gb|EAT79349.1| SNOG_13465 [Phaeosphaeria nodorum SN15]
MAVGVNDEETRAEVDVLNSRLEKTTQLTKKIQACLTRLETTGKSVRDVSGPLNGETKKLQILGNNVDAVIAAIEKLRQPADSKDDEENIIRQGPDKAGLATYLNSIKRLQKALENMQTSNLRANQQTISDLQRLIRTGNTQLESSFDRLLRADTPRSVEPLNFITKNKPFPLLAQDALSKLSLMNSYVSGNSSADNPLVKIYADVRGSYLSQTLVNLAYASVNTAKKKSQDAIYKPGTNGIGMYAQAMEGLLVAEYENICNIFMRQDWGPTFQTTCQAPMAELARTIRELNNHIKSHLSTDCYLAYEVTEIMSGLSNNLETRTGELKATLAAALKPVRETGKMSLSELLDDTKRKVSSIQALPSDGAPMPIVSETMQRLQTMVNFLRPISSIMISLGDGGWRSSAPSTTSSDGIPSLASFDIGADGKQIFAHYCTDTIDTLMTALEQKARVLLKGKSVLGVFLANSVTIIERMIRDSDLKPLLEGRLGSLENWRKKAKSLYSEACKDVSMHLFDVIHTNRSQRPPSGSNESASIVKGLSSKDKDSIKAKFQVFNTSFDELVARHKTYSMEREVRQMFAKDVQQVLEPLYNRFWDRYHEVDKGRGKYIKYDKSSIAAVFLSLY

SEQ ID NO: 20332 - DNA, 3325 bp, Muscodor strobelii
  misc_feature: SGI EST ID NO. CUFF.47666.0
  misc_feature: Variant of the nucleotide sequence at SEQ ID NO 20330
tttaggtacctggttagaaggtagattaggtagctgtcatcatcaacatcaacgccactttgctatcgactacactcgctttccaatctcgcccacgacctctatccacacatcgtcgcatctctaacacagcctcgccagctgaccaccgccttcgcacagctagcaccggcctgtggggctggtctctcggcaccatggcggtgggcgtgaacgacgaggagacgcgcgccgaggtcgatgtgctgaactcgcgcctcgagaagacgacgcagctcaccaagaagatccaggcgtgtctgacgaggctcgagacgacgggcaagagcgtgcgcgacgtgtcggggccgctcaacggcgagaccaagaagctgcagatcctcggcaacaacgtcgacgccgtcatcgccgccatcgagaagctgcgccagcccgccgactccaaggacgacgaggagaacatcatccgccagggccccgacaaggccgggctggccacctacctcaactccatcaagcgcctgcagaaggccctcgagaacatgcagacctccaacctgcgcgccaaccagcagaccatctcagacctccagcgcctcatccgcaccggcaacacccagctcgagagctccttcgacaggctgctccgtgccgacaccccgcgctccgtcgagccgctgaacttcatcaccaagaacaagcccttccctctgctcgcccaggacgccctgtccaagctgagcctaatgaactcgtacgtctccggcaacagctccgccgacaaccccctcgtcaagatctacgcagatgttcggggttcctatctgtcccagaccctcgtcaacctggcctatgcgagcgtgaacacggccaagaagaagagccaggacgccatctacaagcccggcaccaacggcatcggtatgtacgcacaagccatggagggcctgctcgttgccgagtacgaaaacatctgcaacatcttcatgaggcaggattggggtcccactttccagacaacctgtcaggctcccatggccgaactggcccggactattcgggaactaaataatcacatcaaatcccaccttagcactgattgctatctagcttacgaggtgacggagatcatgtctggcctttcaaacaaccttgagacgcggacaggcgagctcaaagcgacactggctgctgccctgaagcccgtacgagagactggcaagatgtccctgtcagagctgctagacgatacaaagcgcaaggtcagctccatacaagccttgccatccgacggcgctccaatgccgattgtttccgaaactatgcagcgtctccagaccatggtaaactttctacgcccgatatcaagtattatgatatccttaggcgatggtggatggagatcatctgcgccgtcaactacaagctcagatggcatacctagcctagcgtcatttgacatcggggcagacggaaaacaaatatttgctcattattgcacagatacaattgacacgctgatgacggcactagaacagaaagctagggtcctgttgaagggcaagtctgtgttgggagtcttcttagccaattccgttaccatcatcgagcgtatgatacgggattccgatctcaagccgctccttgaaggtcggcttggtagcctggagaattggcggaaaaaggcaaaatcgctctattccgaagcctgcaaagatgtgtcaatgcatctatttgatgttattcacacaaatcgttcgcaacgaccaccatccggctccaatgagtcagcttcgattgtcaagggccttagtagtaaggataaggatagtatcaaagccaaattccaagtcttcaacacaagcttcgacgagctcgtggcccgccacaagacgtacagcatggagcgcgaggtgcgacagatgtttgccaaagatgtgcagcaggtgctcgaacccctctacaaccgcttttgggatcggtatcacgaagtagacaagggcagaggcaagtacattaaatacgacaaatcctccatcgccgccgtcttccttagtctgtattaatggtaatgcactggtcgatccgaatacaacactgttgtcggcaagaacctgcctctctcagataaatgcagaagtgatgtctgggatggccaattccacgctaatcacctgggctttattcggccttcggcctcggtcagacactccaagactggggttgggtcggcgttggtttctcgcttgtcgcaatcaaacttcttttcgcatatttcatgatgtatgatgtaaataatgttaccctgtcgaagcagctggtgttatgggagccgctcagagtggctgagagagtttcatgctcgttttatatcttggtaatagaaatacaatgaagcttgaatctcccgtgtaatcgaggcattgaatgacatcaactcggtatcgcgcaagtgataagagaagtggacatgtgcacgacctgctaaaaccgactacatacaggacaaatgccgtctgatgtaaccctactgtttccatgggggatataaatgccggctgcaggtactgtgctccgcgcccgttgtagagcatcgttttgtttaaattatactctattagatctttcgtcattttgacgtcaatcgaaacatcactcaaaatgtacaatgctcaacgatccccacctttcactgtccccctttgcttcgaacctacgcgaacaagttagattacatattccagtcgttaaagcttgtcagatgtgggagtgagagacgatctcttacaacaataaatggcaaacttatctttgcctaagtcgaatagcgccagtaagtacctaccaagaaatggtgttgtacatcagtgtcatgatttgttcaaaatgtatgctcgatcgctgtatcacacacattgccctgaactgtataatcgactactgtatatgagaggaggatcgaacgcgcacctatttcgaataaggaaaaacacactatgatgtaatgatttcccggattaatgcagttgataattcggacaacgtatcattgaactattcatcattctggcatttggtatattagctaatgaggtattcgggggtgctgtttatcttgactcctgcctgaggaatgagattaagtcgcaatggttgttcctactcatatttcctgaacaaagataccatagacggcgaaacaagacgtatttatgcttacagcttctcagtcaagtcggtcagatcaaacctttccaacacttctctccccagtgtgacaatgggcatgaatttcattcagggtttattaccaacttcttttatc

SEQ ID NO: 20333 - DNA, 1032 bp, Muscodor strobelii
  misc_feature: SGI cDNA ID NO. 566861
  misc_feature: Reduced expression when VOC is produced
  misc_feature: Encodes the peptide sequence at SEQ ID NO 20334
atggccgaactggcccggactattcgggaactaaataatcacatcaaatcccaccttagcactgattgctatctagcttacgaggtgacggagatcatgtctggcctttcaaacaaccttgagacgcggacaggcgagctcaaagcgacactggctgctgccctgaagcccgtacgagagactggcaagatgtccctgtcagagctgctagacgatacaaagcgcaaggtcagctccatacaagccttgccatccgacggcgctccaatgccgattgtttccgaaactatgcagcgtctccagaccatggtaaactttctacgcccgatatcaagtattatgatatccttaggcgatggtggatggagatcatctgcgccgtcaactacaagctcagatggcatacctagcctagcgtcatttgacatcggggcagacggaaaacaaatatttgctcattattgcacagatacaattgacacgctgatgacggcactagaacagaaagctagggtcctgttgaagggcaagtctgtgttgggagtcttcttagccaattccgttaccatcatcgagcgtatgatacgggattccgatctcaagccgctccttgaaggtcggcttggtagcctggagaattggcggaaaaaggcaaaatcgctctattccgaagcctgcaaagatgtgtcaatgcatctatttgatgttattcacacaaatcgttcgcaacgaccaccatccggctccaatgagtcagcttcgattgtcaagggccttagtagtaaggataaggatagtatcaaagccaaattccaagtcttcaacacaagcttcgacgagctcgtggcccgccacaagacgtacagcatggagcgcgaggtgcgacagatgtttgccaaagatgtgcagcaggtgctcgaacccctctacaaccgcttttgggatcggtatcacgaagtagacaagggcagaggcaagtacattaaatacgacaaatcctccatcgccgccgtcttccttagtctgtattaa

SEQ ID NO: 20334 - protein, 343 aa, Muscodor strobelii
  misc_feature: SGI Peptide ID NO. 566861
  misc_feature (258)..(343): Pfam Id: PF03081 Pfam Desc: Exo70 exocyst complex subunit
  misc_feature (1)..(343): NCBI GI: 261355786 Blast Desc: exocyst complex protein EXO70 [Verticillium albo-atrum VaMs.102]
  misc_feature (1)..(343): NCBI GI: 116195918 Blast Desc: CHGG_04557 [Chaetomium globosum CBS 148.51] gi|88180470|gb|EAQ87938.1| CHGG_04557 [Chaetomium globosum CBS 148.51]
  misc_feature (1)..(342): NCBI GI: 46110074 Blast Desc: FG01919.1 [Gibberella zeae PH-1] gi|83288132|sp|Q4ILI9.1|EXO70_GIBZE RecName: Full=Exocyst complex protein EXO70
  misc_feature (1)..(343): NCBI GI: 164423651 Blast Desc: exocyst complex protein EXO70 [Neurospora crassa OR74A] gi|157070182|gb|EAA33446.2| exocyst complex protein EXO70 [Neurospora crassa OR74A]
  misc_feature (1)..(343): NCBI GI: 74611308 Blast Desc: EXO70_NEUCR RecName: Full=Exocyst complex protein EXO70 gi|39979144|emb|CAE85518.1| related to exocyst complex 70 kDa component [Neurospora crassa]
  misc_feature (1)..(343): NCBI GI: 145613271 Blast Desc: MGG_01760 [Magnaporthe grisea 70-15] gi|145020388|gb|EDK04517.1| MGG_01760 [Magnaporthe grisea 70-15]
  misc_feature (1)..(342): NCBI GI: 154293132 Blast Desc: BC1G_14518 [Botryotinia fuckeliana B05.10] gi|150845663|gb|EDN20856.1| BC1G_14518 [Botryotinia fuckeliana B05.10]
  misc_feature (1)..(326): NCBI GI: 156034819 Blast Desc: SS1G_13345 [Sclerotinia sclerotiorum 1980] gi|154698748|gb|EDN98486.1| SS1G_13345 [Sclerotinia sclerotiorum 1980]
  misc_feature (1)..(282): NCBI GI: 171690904 Blast Desc: protein product [Podospora anserina] gi|170945400|emb|CAP71512.1| protein product [Podospora anserina]
  misc_feature (1)..(342): NCBI GI: 169620531 Blast Desc: SNOG_13465 [Phaeosphaeria nodorum SN15] gi|111058229|gb|EAT79349.1| SNOG_13465 [Phaeosphaeria nodorum SN15]
  misc_feature: Useful for introducing or modulating the production of volatile compounds
MAELARTIRELNNHIKSHLSTDCYLAYEVTEIMSGLSNNLETRTGELKATLAAALKPVRETGKMSLSELLDDTKRKVSSIQALPSDGAPMPIVSETMQRLQTMVNFLRPISSIMISLGDGGWRSSAPSTTSSDGIPSLASFDIGADGKQIFAHYCTDTIDTLMTALEQKARVLLKGKSVLGVFLANSVTIIERMIRDSDLKPLLEGRLGSLENWRKKAKSLYSEACKDVSMHLFDVIHTNRSQRPPSGSNESASIVKGLSSKDKDSIKAKFQVFNTSFDELVARHKTYSMEREVRQMFAKDVQQVLEPLYNRFWDRYHEVDKGRGKYIKYDKSSIAAVFLSLY

SEQ ID NO: 20335 - DNA, 3325 bp, Muscodor strobelii; identical to SEQ ID NO: 20332
  misc_feature: SGI EST ID NO. CUFF.47666.0
  misc_feature: Variant of the nucleotide sequence at SEQ ID NO 20333

SEQ ID NO: 20336 - DNA, 1491 bp, Muscodor strobelii
  misc_feature: SGI cDNA ID NO. 566862
  misc_feature: Encodes the peptide sequence at SEQ ID NO 20337
atgaggcgacaccgtcacgcaaataagcgcaagcatggggaacgagacggcgatgacggcgatgggaacggcgacgacgacgacgatgacgatggcgatgacgatgatgataatggcgatgatagcaaggacggtgacggtgacataaagcaaagcggcaatagcggccctggttatcctgaaagtacaacaacatcaacatcatcaagcacaacacagagtacggtctcacataccaccacgatgtccagctcagagagttcaactactttgccgaccacctcaataacacctttacccgactcatcactgcccgtgacttcaagctcgacggtcgctgacggaggtgttactactcaaattacatccactaccggtactactaatcctctcccaaccaccagcagcacgccgacgaacttggttaaccaggctgggggagcaaccaatcccgccggcgatcccggtcgcactgatgatggtccgagcccgaacgaagaagtcaaaatgaatcgaccggccgatgccaggattgccggtggcgtcgttggaggcatcctcctcttgcttggtctattcttcatactatactgcgtcagaatccgacgaaagagaagagaatggctgaagcaagagaaagcagcgtcaaccagtgactctgacatagaaagcaacagtcacataaccgtggacttgagaaactggccagcgccgtctgtcaatgggacacggactagcaacgagatatcaagttactcaaatctatcacggcctcgcaataacgttctagttcctggatcatcatcatctacgagtagaatcgtcgaccaacagagcactcctatcactcctccagaacccatcagcatccatactagtgcaaatggatcgccgctcgtgggttctgttcagagagacttgaaccatcattcgcaagtctcaaacctacctccaaatcctagctacaacgatccttttgccgacatatacgggacgccaagtccaacctacagccaagcatctcttcatacttaccacactcattcctactcagctactccaccaagagtgatgccagtacacgctcctataataatgccgaacttgccgacatccgcccacttcaactcggtgtccattcccgttgacggaccaccaccacctcaatatccagaagccatgaggtctcccccgttacgctgttgcagctctcattcgactctcccgccaccactccctatatcgcccctgacacctcctcccctcccaatatctgaccttgacgcggttcttggaagaaagccggaagcaccgcctccacttccacgtcccgagatcgtgtcgcctattcaccagctaggccagacatctgcatcacttgcggaatttgatgaggcggcaatcgtggatggcaggcctccacctgcgccccttgcttataatgacgaaaaacaatctattgacccgcaagagggaacgagccgcaactaa

SEQ ID NO: 20337 - protein, 496 aa, Muscodor strobelii
  misc_feature: SGI Peptide ID NO. 566862
MRRHRHANKRKHGERDGDDGDGNGDDDDDDDGDDDDDNGDDSKDGDGDIKQSGNSGPGYPESTTTSTSSSTTQSTVSHTTTMSSSESSTTLPTTSITPLPDSSLPVTSSSTVADGGVTTQITSTTGTTNPLPTTSSTPTNLVNQAGGATNPAGDPGRTDDGPSPNEEVKMNRPADARIAGGVVGGILLLLGLFFILYCVRIRRKRREWLKQEKAASTSDSDIESNSHITVDLRNWPAPSVNGTRTSNEISSYSNLSRPRNNVLVPGSSSSTSRIVDQQSTPITPPEPISIHTSANGSPLVGSVQRDLNHHSQVSNLPPNPSYNDPFADIYGTPSPTYSQASLHTYHTHSYSATPPRVMPVHAPIIMPNLPTSAHFNSVSIPVDGPPPPQYPEAMRSPPLRCCSSHSTLPPPLPISPLTPPPLPISDLDAVLGRKPEAPPPLPRPEIVSPIHQLGQTSASLAEFDEAAIVDGRPPPAPLAYNDEKQSIDPQEGTSRN

SEQ ID NO: 20338 - DNA, 2694 bp, Muscodor strobelii
  misc_feature: SGI EST ID NO. CUFF.47559.0
  misc_feature: Variant of the nucleotide sequence at SEQ ID NO 20336
aggttgcatgccacgagacgccagcccctgccgtccatcacatggcgacagccttgccgatcagcacctaaaaggtaaagggttcaaccttgttcctgtcttcaatgatgtctagacgatggaaacctaggtgcggtccgaagcggcatcacttccaggccaatggaagtcccctgtctacccactccaaatattggcggccatacctataacgcggaattagcgaaagcagttcatcatgtttaaacatcaggaataaacgaccactcagagcttatcacttaggaagccattggccaggtgttcgaaagcacgatcgcccccgaacgcacagctcgctaattcgggaacttcctcgcgatgcagccaagttttttctagcacgacccaagagaggcgttagcgaggcgttgtcccgtagcctactccccaatcagcccgcaatgtaacagctggcttatctataggactgcctcggaaatgtaagataactatatgaggcactatgtatctgtttctctatagaacgaaaacttgcctattctagttcttgactatacatgtgtgatttgtttgatctgctatgtggcgaacttcatccctgatgtctaacttctatgagccacgctacatcttgttcatctaagaagtgcatgttattcaagcagaaccaatactttagttctgtttcttcgttttatatggtaccgagacttggcttattctctaattatctcacgataccgtggatgcaaccggttgagacaccttctctacttattttcgttttaagacaggggctggctactttcaggtagtttattacgatgaatcgtatattagctttatcagtgttgtcgacagttgtcttcttaccatcagatgcgactcaagtaaatactgagaacgatgaagatgattcaacgactccttcactacaacgattagtaaggatgaggcgacaccgtcacgcaaataagcgcaagcatggggaacgagacggcgatgacggcgatgggaacggcgacgacgacgacgatgacgatggcgatgacgatgatgataatggcgatgatagcaaggacggtgacggtgacataaagcaaagcggcaatagcggccctggttatcctgaaagtacaacaacatcaacatcatcaagcacaacacagagtacggtctcacataccaccacgatgtccagctcagagagttcaactactttgccgaccacctcaataacacctttacccgactcatcactgcccgtgacttcaagctcgacggtcgctgacggaggtgttactactcaaattacatccactaccggtactactaatcctctcccaaccaccagcagcacgccgacgaacttggttaaccaggctgggggagcaaccaatcccgccggcgatcccggtcgcactgatgatggtccgagcccgaacgaagaagtcaaaatgaatcgaccggccgatgccaggattgccggtggcgtcgttggaggcatcctcctcttgcttggtctattcttcatactatactgcgtcagaatccgacgaaagagaagagaatggctgaagcaagagaaagcagcgtcaaccagtgactctgacatagaaagcaacagtcacataaccgtggacttgagaaactggccagcgccgtctgtcaatgggacacggactagcaacgagatatcaagttactcaaatctatcacggcctcgcaataacgttctagttcctggatcatcatcatctacgagtagaatcgtcgaccaacagagcactcctatcactcctccagaacccatcagcatccatactagtgcaaatggatcgccgctcgtgggttctgttcagagagacttgaaccatcattcgcaagtctcaaacctacctccaaatcctagctacaacgatccttttgccgacatatacgggacgccaagtccaacctacagccaagcatctcttcatacttaccacactcattcctactcagctactccaccaagagtgatgccagtacacgctcctataataatgccgaacttgccgacatccgcccacttcaactcggtgtccattcccgttgacggaccaccaccacctcaatatccagaagccatgaggtctcccccgttacgctgttgcagctctcattcgactctcccgccaccactccctatatcgcccctgacacctcctcccctcccaatatctgaccttgacgcggttcttggaagaaagccggaagcaccgcctccacttccacgtcccgagatcgtgtcgcctattcaccagctaggccagacatctgcatcacttgcggaatttgatgaggcggcaatcgtggatggcaggcctccacctgcgccccttgcttataatgacgaaaaacaatctattgacccgcaagagggaacgagccgcaactaaacgcacattatgcgtgtggatacacaatgttgtgattatgcagagttgtgtatcatatcaggattgtaaccataattataattcggcgcaaattgagcgacccatattttgtgctgagaatatatgtatgctaaatatacgttttgggttcagaggcgttgtcctgtgtttagatatttatggatgtgcgcatatggcttggtcttgtgcatttgttaggtagctaggtactcaaaatcaggaaacaaac

SEQ ID NO: 20339 - DNA, 2529 bp, Muscodor strobelii
  misc_feature: SGI cDNA ID NO. 566863
  misc_feature: Encodes the peptide sequence at SEQ ID NO 20340
atggcctcctcgcagtacggctctggctcgcagcgttacaggcgcaggcgccacacagcgtcgtcggagacgcatgattgggagccaaggcgggacgagtcgcgccattcgctcccctatcgcgcccgccagcccgaagtacaaaggcccgatggcaggagacccaagcagccatcccatcgcccacgggtctccgacgactttctcgccaaccgccccatgcctcccacgccacgccggtcggcgaacgacatcacgcggcggagcagtcgcagccacctgtatcacgacggcgaccacgacgacgatgacgagagcgacgagcaggagcgcctgagaggacggctgcgctccaagtccaggggcgccacatccaccgcccgctccagagtcaggaccaggcccagctccccgaacagcgactcgagcggctcgacacacgtcttgaccccgactccctcctcctatccgcgccgctccgcaccgccttctgctccctctgtcccctcggtgaactcgctgtctgacaccgacagcaacgactccgactcctcagactccacccaggaccatcggatgcaggctcgtacgctgaaagagcggatgaatggcgccccggatccggatccggaaccgacaccggcctcgacgaaccgggcgagaccgacccgcaagtctcgaaagcctgttgtgcatgagtcagatagcgattcgggggattcgtcggacgacgttgtctcccgtcaccctcgtgtcgttgtcaagagagctgccacgacgccacgctcccagagacagaaacagcgccaagccaggtcatctgtgagcccttcaaggagtcaccggcatcatgaccgacgtagtgaaggacacctcagttctccctccaagagatcaaccacgagatattatcattctgacatctcgtacaatggacgaccgtcgatgtcaagatcgagaacaacgtccagttcgcgtctgacatctcccagccctgtctcttcgtcaaagcgctcttcttctttccagctcttccagacaactccgcttcggcgctctcgtgacaaaatctcaaaatttgccgaatgcatcatttgcactgacccgtttcctgccagcgacctagctaaactcaaatgcgggcatcggatgtgtagatcgtgtttgaaaagagccttcgagctctcggtcaaaaaacccgagaacatgccgccaaagtgttgcacaccagattgtatcccacccaagcttgccgaccatttattcaagaacgacttcaagagaaaatggaataaaaaatacagacagttctccaatcgggatcacattacctgcccgagcaagagatgcggtcaattgattcgaccaagccagatacatcaccatcgcaatggacgctccagtgcacgatgcagctgcggtaccaaagtttgctgccactgctatgcgaaatggcacgaatcaaagcaatgcccagttgatgaagaaactatccagtttctgcagaaagcacaggaagaaggatggaagtcttgctataagtgtcgtgccatggttgagttggcagaaggttgcaaccacatgacatgtcgatgcggtgcggaattctgcatgatttgtggaagcaaatggaggacctgtgaatgcccttatttcaactatgaccacctgactgacatagatgatgagttcgaccacgttgacatacccattccgatgctagatcgcgagccgctaggtggtagcgacggattgccacgagggcgactcggaggcggccgggtcagggtacgacctcgtcgtggcagctacgacgaagtccttatctcgaagcctttccagcaataccgaaacgttgacccaggtcgccggcgtcaccatatcgatttcgatgatgatgaagacgacgatgaggacgactatttaggagatatgggtgaggttgttggtttgggcaatgctgcgcgccatcacctgaatagtgattataggagatcgcagagcgccatagcccagccgggtcctccacccgtggctcccccgcctccttcggccgcatttgaacgcggtggctctggtaccaattatgtttctggtgtgaacaaagcccgaggggtacgagcaagttcaatggagagacgacttgcggaccggttctctgaccaacgccagggccctggcgcgaccttccgtccgtttggtcatggtggtccgcctcatccaccccctcaaggcatgggcccgtcatcaccaggactccctatggtaccgagtccaatttcgagacgccacacaatggacgatgacatgtacgatagcccgcgcaaccccctcctgcccagccatcccatgctacggagaacgacgacccgtgattatgcagatgatttctccccacctatgcagacaggacgtagacgacaacgcaacgtcgaatcgcctcagtcctccgagcttgcaggactcactggtcctggaagcgggatgcatagagtatatgaatggatgacccacgtgcctgtaaactga

SEQ ID NO: 20340 - protein, 842 aa, Muscodor strobelii
  misc_feature: SGI Peptide ID NO. 566863
  misc_feature (363)..(412): Pfam Id: PF00097 Pfam Desc: Zinc finger, C3HC4 type (RING finger)
  misc_feature (363)..(407): Pfam Id: PF00097 Pfam Desc: Zinc finger, C3HC4 type (RING finger)
  misc_feature (359)..(839): NCBI GI: 156035507 Blast Desc: SS1G_12957 [Sclerotinia sclerotiorum 1980] gi|154698362|gb|EDN98100.1| SS1G_12957 [Sclerotinia sclerotiorum 1980]
  misc_feature (231)..(710): NCBI GI: 154312511 Blast Desc: BC1G_05858 [Botryotinia fuckeliana B05.10] gi|150849959|gb|EDN25152.1| BC1G_05858 [Botryotinia fuckeliana B05.10]
  misc_feature (207)..(688): NCBI GI: 171690568 Blast Desc: protein product [Podospora anserina] gi|170945232|emb|CAP71343.1| protein product [Podospora anserina]
  misc_feature (357)..(569): NCBI GI: 226283489 Blast Desc: IBR domain-containing protein [Paracoccidioides brasiliensis Pb01]
  misc_feature (363)..(577): NCBI GI: 239609115 Blast Desc: IBR domain-containing protein [Ajellomyces dermatitidis ER-3]
  misc_feature (363)..(577): NCBI GI: 261188163 Blast Desc: IBR domain-containing protein [Ajellomyces dermatitidis SLH14081] gi|239593373|gb|EEQ75954.1| IBR domain-containing protein [Ajellomyces dermatitidis SLH14081]
  misc_feature (357)..(567): NCBI GI: 225683078 Blast Desc: IBR domain-containing protein [Paracoccidioides brasiliensis Pb03]
  misc_feature (357)..(567): NCBI GI: 226288463 Blast Desc: IBR domain-containing protein [Paracoccidioides brasiliensis Pb18]
  misc_feature (344)..(839): NCBI GI: 256727483 Blast Desc: NECHADRAFT_66361 [Nectria haematococca mpVI 77-13-4]
  misc_feature (254)..(579): NCBI GI: 238840310 Blast Desc: IBR domain-containing protein [Microsporum canis CBS 113480]
MASSQYGSGSQRYRRRRHTASSETHDWEPRRDESRHSLPYRARQPEVQRPDGRRPKQPSHRPRVSDDFLANRPMPPTPRRSANDITRRSSRSHLYHDGDHDDDDESDEQERLRGRLRSKSRGATSTARSRVRTRPSSPNSDSSGSTHVLTPTPSSYPRRSAPPSAPSVPSVNSLSDTDSNDSDSSDSTQDHRMQARTLKERMNGAPDPDPEPTPASTNRARPTRKSRKPVVHESDSDSGDSSDDVVSRHPRVVVKRAATTPRSQRQKQRQARSSVSPSRSHRHHDRRSEGHLSSPSKRSTTRYYHSDISYNGRPSMSRSRTTSSSRLTSPSPVSSSKRSSSFQLFQTTPLRRSRDKISKFAECIICTDPFPASDLAKLKCGHRMCRSCLKRAFELSVKKPENMPPKCCTPDCIPPKLADHLFKNDFKRKWNKKYRQFSNRDHITCPSKRCGQLIRPSQIHHHRNGRSSARCSCGTKVCCHCYAKWHESKQCPVDEETIQFLQKAQEEGWKSCYKCRAMVELAEGCNHMTCRCGAEFCMICGSKWRTCECPYFNYDHLTDIDDEFDHVDIPIPMLDREPLGGSDGLPRGRLGGGRVRVRPRRGSYDEVLISKPFQQYRNVDPGRRRHHIDFDDDEDDDEDDYLGDMGEVVGLGNAARHHLNSDYRRSQSAIAQPGPPPVAPPPPSAAFERGGSGTNYVSGVNKARGVRASSMERRLADRFSDQRQGPGATFRPFGHGGPPHPPPQGMGPSSPGLPMVPSPISRRHTMDDDMYDSPRNPLLPSHPMLRRTTTRDYADDFSPPMQTGRRRQRNVESPQSSELAGLTGPGSGMHRVYEWMTHVPVN

SEQ ID NO: 20341 - DNA, 4794 bp, Muscodor strobelii
  misc_feature: SGI EST ID NO. CUFF.47563.0
  misc_feature: Variant of the nucleotide sequence at SEQ ID NO 20339
tgggccctgtggtgggagctagctgagtgatgtgatcgatgcctgcggcctaatgcgctggtctctaaagtcaaggatcaggtaccaattctatgggatgatacgatagaaccttttcatcatggaagaagcaaatggcgagtgatgcagcatggtgacacagggctgatggacccaagcgttcgttggtgctatgaacaagtattgctccatatcatactagtagtaaccaggcattcttaaccatgggtacaatgaatgacagttgatgtcgtttcgtaacatgacatatagatatcatacttcaaaagatgacccccagcaaagttgtacatataatcttgtaagcgtcagtgcctaggacataatctggtggtagggatgtagtcaatttcgaataagcgtgtcgtagaatgttgcaataacgaatggcctagctatgtgtaatgaatatatagcctttcgacattgacacaggatccgaatagaccatcgcaatcaaccaaaatggcgagtcacgttatcggctgttctgttctgtccatagcttgccattctctgtatcacttgatactacagattatattgcccagagccgtgggaggccccatgcatgtgagagctcaccacactgcttcgtcaggtggtgtgacagggatgtaaccacgaaagaggttgggagcaacgacggtgatgagcacttgtgagaagtgactgaagttctgagccaaagacgagcgccgacaggttccttgacaagggtgcgtatggggccagactcgccaggatggggaagaggggtcagtgggaagggagccggcgctgtgcccgcctgtgcccgcgacgggatcagccacggcgctatccatttggcagcacttgccagtgtatttgcccactcggccagcatttggcatgtcgatttgctcggatttggcattaggggcagggtcggggtcgcgaaataagggtctcggacgctcagccaaccaacaggaacaaacaggaacaagccaggtcagacgagagacgagcaagacagcagtcggcgcatgcggatctatggagaagtagtaattctgcgggtgggatcatcggcatggcaagggaagacctgctgtttcatttgtttcattaacagacgagaagagcagtgactttgtttgatattgctgtgttccgtcctctctctctcagtgctcactcacttgacgctcactcacactcactgcgtgtcggatacgatacgacgctgttgtggactacccaagttggccgtattcacttatcatcaccctcgcctgatattaccttaggtagctggccaccacctttctcgtgttcggctgtcagaagggaattgcaacctggaagcctgagggccataaggcagcaatcggacagatcgatttaccgggagagacaggcgaggtcagcaacgcatagcaagtggtgtctcccagggcgccatccttgcggccaagcctagagacacgacgcgtaccctcctcgccatcaccttctcgcggagcgttggccatcatcgccatcgacgtcgtcttgaggccgccgtgctgcagatggactgctgcgtctgtgctcgccctgccctctgagtgcctgtcgattggcggttgcgacgcactccgtccgctgctgctgccacctcgtctcctgctctaatgcacagtcggaccctgtgggccaatcaccgccgggccctgcacagcacgacggccactcacgagccaccagctgtctcgccctcgttgcccatatcggcacgtcgtcgtcgtcgcagccagcagccctccgcacctcccatcgccggggctgacgcgggtaaagtctacgcagtgctccaggacgaatggcctcctcgcagtacggctctggctcgcagcgttacaggcgcaggcgccacacagcgtcgtcggagacgcatgattgggagccaaggcgggacgagtcgcgccattcgctcccctatcgcgcccgccagcccgaagtacaaaggcccgatggcaggagacccaagcagccatcccatcgcccacgggtctccgacgactttctcgccaaccgccccatgcctcccacgccacgccggtcggcgaacgacatcacgcggcggagcagtcgcagccacctgtatcacgacggcgaccacgacgacgatgacgagagcgacgagcaggagcgcctgagaggacggctgcgctccaagtccaggggcgccacatccaccgcccgctccagagtcaggaccaggcccagctccccgaacagcgactcgagcggctcgacacacgtcttgaccccgactccctcctcctatccgcgccgctccgcaccgccttctgctccctctgtcccctcggtgaactcgctgtctgacaccgacagcaacgactccgactcctcagactccacccaggaccatcggatgcaggctcgtacgctgaaagagcggatgaatggcgccccggatccggatccggaaccgacaccggcctcgacgaaccgggcgagaccgacccgcaagtctcgaaagcctgttgtgcatgagtcagatagcgattcgggggattcgtcggacgacgttgtctcccgtcaccctcgtgtcgttgtcaagagagctgccacgacgccacgctcccagagacagaaacagcgccaagccaggtcatctgtgagcccttcaaggagtcaccggcatcatgaccgacgtagtgaaggacacctcagttctccctccaagagatcaaccacgagatattatcattctgacatctcgtacaatggacgaccgtcgatgtcaagatcgagaacaacgtccagttcgcgtctgacatctcccagccctgtctcttcgtcaaagcgctcttcttctttccagctcttccagacaactccgcttcggcgctctcgtgacaaaatctcaaaatttgccgaatgcatcatttgcactgacccgtttcctgccagcgacctagctaaactcaaatgcgggcatcggatgtgtagatcgtgtttgaaaagagccttcgagctctcggtcaaaaaacccgagaacatgccgccaaagtgttgcacaccagattgtatcccacccaagcttgccgaccatttattcaagaacgacttcaagagaaaatggaataaaaaatacagacagttctccaatcgggatcacattacctgcccgagcaagagatgcggtcaattgattcgaccaagccagatacatcaccatcgcaatggacgctccagtgcacgatgcagctgcggtaccaaagtttgctgccactgctatgcgaaatggcacgaatcaaagcaatgcccagttgatgaagaaactatccagtttctgcagaaagcacaggaagaaggatggaagtcttgctataagtgtcgtgccatggttgagttggcagaaggttgcaaccacatgacatgtcgatgcggtgcggaattctgcatgatttgtggaagcaaatggaggacctgtgaatgcccttatttcaactatgaccacctgactgacatagatgatgagttcgaccacgttgacatacccattccgatgctagatcgcgagccgctaggtggtagcgacggattgccacgagggcgactcggaggcggccgggtcagggtacgacctcgtcgtggcagctacgacgaagtccttatctcgaagcctttccagcaataccgaaacgttgacccaggtcgccggcgtcaccatatcgatttcgatgatgatgaagacgacgatgaggacgactatttaggagatatgggtgaggttgttggtttgggcaatgctgcgcgccatcacctgaatagtgattataggagatcgcagagcgccatagcccagccgggtcctccacccgtggctcccccgcctccttcggccgcatttgaacgcggtggctctggtaccaattatgtttctggtgtgaacaaagcccgaggggtacgagcaagttcaatggagagacgacttgcggaccggttctctgaccaacgccagggccctggcgcgaccttccgtccgtttggtcatggtggtccgcctcatccaccccctcaaggcatgggcccgtcatcaccaggactccctatggtaccgagtccaatttcgagacgccacacaatggacgatgacatgtacgatagcccgcgcaaccccctcctgcccagccatcccatgctacggagaacgacgacccgtgattatgcagatgatttctccccacctatgcagacaggacgtagacgacaacgcaacgtcgaatcgcctcagtcctccgagcttgcaggactcactggtcctggaagcgggatgcatagagtatatgaatggatgacccacgtgcctgtaaactgaggacatgcctaatgaatagccacgaagacatggtctactgccttggaacttacttgaattatctccgtaagagttggagcagccgttgttggatccttgtaaacagataccaattttttgcatttttctagggccatgtatttatcgactttgcataggtacatgtagtatccggtatcattcttttgtaggctagatcccagtagccgtcctttcacttagactggcgctttgcgaaatggttcatgatcggaatatgtatagccggcatcagtcagtcgcttttgaagttcaattaacttattgacttatttatatgttttaccaggcgtttgaattggtgctagtctacacaacgaaagccgcatctctaggttgcacacgttgaatgaaag

SEQ ID NO: 20342 - DNA, 3315 bp, Muscodor strobelii
  misc_feature: SGI cDNA ID NO. 566864
  misc_feature: Encodes the peptide sequence at SEQ ID NO 20343
atgctgctcctacaccaagtaggcagcgtcaagatcggcgaggtagtgcggtacacggtcacctacacgccctcgcacgaccgcatcctgccctctcccgagttcctctacctgcgcatccgcaacacctcgcctctgcccctgcgcgcagccttcatccacggcccctacaccctctgcgtctccgcctgtccttcgcactacgatccgaacgccaagttcgacaacccccgccgctatggcgtccccgagttcgagcctatgctgaaggctgctggcacctgggcctgtcgcctcgtcgtccccgagcacattcgcgagcgtgccggcctcggtgcggcaagaggcgacttttccaagagctccctgaacgccgacgacgccatcagtgccagttgggttgtcgaagtctcgagccaggtcatcttctccaccagcgcggctgtcggctacgagatcttgctcgcgcgtgacgagaagagcctgagtctgggcagcacgcccctcgccaagggacaggccgcagtccaccagcccggcaaggtaggcgacttccaggagagcgtaggggccagagaccatcacccagcccagcccaagggtgtcttctccaaggccgttgctttgaaagtggaggacacggcgagcctgtggaacacaccgaaactgcccggcagcgacgatcataagcacgaaggagccaagacatcggagaccagcccttctgcggatgcagttgaccgggaggaaggcgcactgaagcaacagaggctcaagaaggtccatttggtagtcctgacgcatggcattcacagcaacgttggtgctgatctgctgtatttgaaagaaaacatcgacgcgaccgtcaggcaagccaagattgacgcaaaagctaggagggctaaggctcgcgaggaaacaaagcaaggaaccgatcaagacaaccagcactcatcaaacgaggaaagtcctgaagatggcgactcggatgaagtggaggttattgtacgaggcttttctggaaacgcaacgcgaacggagcgaggcgttaaattccttgggaaacgcctagcccgttacatactgtccatgacttaccccgatcagccattcttgccaactctggaaaaggcatccgacggcctcgcaagtgttctgcgcagcgagactgggaaagagacttctacgggaccaccatcccataaacacagcacaatacacgcaagtcacgatcaaataaacacacgaaaatttcaaatcactagtatcagcttgatcgctcattccttgggcggcttggtccagacttacgccattgcttatattcagaaacactcgcctcagttctttgatcttattcgacccataaacttcataactctggctactccatttctaggcttgagcaatgagaatcctatgtacgtgaagtttgcgctggacttcggcttagtgggaaggacgggccaggaccttggactcacgtggagggcacccactatcgccaggagtggctggggtgccattgttgggacactgggcgagagtgcccataagaaggtcatgggcgaaacacagccggaatcaaagccgttgttgagaatattacccactggaccggcacatacggctttgaagaagttccgtaatcggaccgtgtattcaaatgttgtcaatgatggcatcgtccctctgcgaacaagctgcctactgttcctagattggcaaggccttgaacgagtagaaaaggcgcgcagagaagccgggttagtggaaactatggtaggtttcggatgggccgagctgactggcactggtatgtcttcgcgcaaggctctgtggacgccagatgctgaggagccgccaactcttcctcaatccgtgtccacccctgaggattctcatgacgactctcacgaagttccgcagccctcgagcaacgcaactgtcgaagatgacaggcagagtttgaaccttgccactcctacggcacatgaatctctcggacagagctctcaaacagatgggccattttctggtttcttcaacttcttcaaaggaggtgatacatcaaaagcgtccaatccaaaaccatcgtcccgatctccgcgtgagaataagatataccaacgaagtcagacattgaaatttgatgaatccactagcaattcggcatcgtccagtaaaacgggtgtctcttcaggccaagagcttgaaggggaatctagtactggcatgtctgcccctccccggaccactttcttcgagtcggcaggcgacttacttaacccaaagctaccgcctgtggagtttttagttgatccatcaaaacgtgctcggactatattccacgaccgggtctatcatccttcggacatcccgccgccgcccttgaaaaggaagagttcgggggctttggccatacggaggaggaacactagccgaagcagctctgtaccaaggagctcagacagcggagacggaacggcttcgtccggacaatcaccccagaccgtacgccaagcatctctcctgtcaacgcgggattatgatgatcgcctacacaccgacccagagcgcgagcccgatcagatagtagacggttccaacatgagagtagaggagaagattgcaagagcttatcaccgtggcttgagctggcgtaaagtcctcgtcaaactagagcccgacgcgcacaacaatatcatcgtacgtcggcaatttgccaatgcattcggatggcccgttatcaaacatcttgtcgaggctcattttagtgatgaggctactgcccggaagcgggacgaagacgaggataatactgaaaacgccaaggcattgagtgaacagcctgacgagactggtaaagagactaaatcggacgaacctcgctccagctcgacccagcacagtcgttccgcaagcgagacccgcgaagccacggacgctgtgccagacctacctacgacgcaggaaagccagagccaggcttcacatagtttccaccagtcctcaccacgagcgacgcaagatactggctcagagcccgccacttggagcgatcatgacttcgctgacagtggcgacgatagcgagatcgattacgacatggcgtatggtcatccctttatacaacatgcacaggatcagaagggaaaagcgaaggagcgtgatggaagtaggagcccagtgtggaattggactgagaagatagtagggaaaggcgccacgaagaaagccagaggggaggactctccgagtcctgcgagatctcgacctggtagtggtggagctcccaccgccactacggactga

SEQ ID NO: 20343 - protein, 1104 aa, Muscodor strobelii
  misc_feature: SGI Peptide ID NO. 566864
  misc_feature (257)..(570): Pfam Id: PF05057 Pfam Desc: serine esterase (DUF676)
  misc_feature (423)..(570): Pfam Id: PF05057 Pfam Desc: serine esterase (DUF676)
  misc_feature (257)..(285): Pfam Id: PF05057 Pfam Desc: serine esterase (DUF676)
  misc_feature (323)..(366): Pfam Id: PF05057 Pfam Desc: serine esterase (DUF676)
  misc_feature (1)..(1081): NCBI GI: 256727483 Blast Desc: NECHADRAFT_66361 [Nectria haematococca mpVI 77-13-4]
  misc_feature (1)..(1078): NCBI GI: 46121381 Blast Desc: FG05069.1 [Gibberella zeae PH-1]
  misc_feature (1)..(1095): NCBI GI: 85104361 Blast Desc: NCU07691 [Neurospora crassa OR74A] gi|28923280|gb|EAA32490.1| conserved [Neurospora crassa OR74A]
  misc_feature (1)..(959): NCBI GI: 116196024 Blast Desc: CHGG_04610 [Chaetomium globosum CBS 148.51] gi|88180523|gb|EAQ87991.1| CHGG_04610 [Chaetomium globosum CBS 148.51]
  misc_feature (1)..(1090): NCBI GI: 171690600 Blast Desc: protein product [Podospora anserina] gi|170945248|emb|CAP71359.1| protein product [Podospora anserina]
  misc_feature (1)..(1082): NCBI GI: 261352286 Blast Desc: revertant of glycogen synthase kinase mutation [Verticillium albo-atrum VaMs.102]
  misc_feature (1)..(1076): NCBI GI: 154312509 Blast Desc: BC1G_05857 [Botryotinia fuckeliana B05.10] gi|150849958|gb|EDN25151.1| BC1G_05857 [Botryotinia fuckeliana B05.10]
  misc_feature (1)..(1078): NCBI GI: 145613337 Blast Desc: MGG_01727 [Magnaporthe grisea 70-15] gi|145020429|gb|EDK04558.1| MGG_01727 [Magnaporthe grisea 70-15]
  misc_feature (1)..(1086): NCBI GI: 156035509 Blast Desc: SS1G_12958 [Sclerotinia sclerotiorum 1980] gi|154698363|gb|EDN98101.1| SS1G_12958 [Sclerotinia sclerotiorum 1980]
  misc_feature (1)..(984): NCBI GI: 154272968 Blast Desc: [Ajellomyces capsulatus NAm1] gi|150415848|gb|EDN11192.1| [Ajellomyces capsulatus NAm1]
MLLLHQVGSVKIGEVVRYTVTYTPSHDRILPSPEFLYLRIRNTSPLPLRAAFIHGPYTLCVSACPSHYDPNAKFDNPRRYGVPEFEPMLKAAGTWACRLVVPEHIRERAGLGAARGDFSKSSLNADDAISASWVVEVSSQVIFSTSAAVGYEILLARDEKSLSLGSTPLAKGQAAVHQPGKVGDFQESVGARDHHPAQPKGVFSKAVALKVEDTASLWNTPKLPGSDDHKHEGAKTSETSPSADAVDREEGALKQQRLKKVHLVVLTHGIHSNVGADLLYLKENIDATVRQAKIDAKARRAKAREETKQGTDQDNQHSSNEESPEDGDSDEVEVIVRGFSGNATRTERGVKFLGKRLARYILSMTYPDQPFLPTLEKASDGLASVLRSETGKETSTGPPSHKHSTIHASHDQINTRKFQITSISLIAHSLGGLVQTYAIAYIQKHSPQFFDLIRPINFITLATPFLGLSNENPMYVKFALDFGLVGRTGQDLGLTWRAPTIARSGWGAIVGTLGESAHKKVMGETQPESKPLLRILPTGPAHTALKKFRNRTVYSNVVNDGIVPLRTSCLLFLDWQGLERVEKARREAGLVETMVGFGWAELTGTGMSSRKALWTPDAEEPPTLPQSVSTPEDSHDDSHEVPQPSSNATVEDDRQSLNLATPTAHESLGQSSQTDGPFSGFFNFFKGGDTSKASNPKPSSRSPRENKIYQRSQTLKFDESTSNSASSSKTGVSSGQELEGESSTGMSAPPRTTFFESAGDLLNPKLPPVEFLVDPSKRARTIFHDRVYHPSDIPPPPLKRKSSGALAIRRRNTSRSSSVPRSSDSGDGTASSGQSPQTVRQASLLSTRDYDDRLHTDPEREPDQIVDGSNMRVEEKIARAYHRGLSWRKVLVKLEPDAHNNIIVRRQFANAFGWPVIKHLVEAHFSDEATARKRDEDEDNTENAKALSEQPDETGKETKSDEPRSSSTQHSRSASETREATDAVPDLPTTQESQSQASHSFHQSSPRATQDTGSEPATWSDHDFADSGDDSEIDYDMAYGHPFIQHAQDQKGKAKERDGSRSPVWNWTEKIVGKGATKKARGEDSPSPARSRPGSGGAPTATTD

SEQ ID NO: 20344 - DNA, 4702 bp, Muscodor strobelii
  misc_feature: SGI EST ID NO. CUFF.47565.0
  misc_feature: Variant of the nucleotide sequence at SEQ ID NO 20342
cgcccattgccttgtttctataccacaagcttgataatgagcgggtgcttcttccgcaatcgctaaccaaggtggctatccgagactttccaagaccgtccacgctcatctcgaaatgctttcttttgtggctagcgaattgtcattctcttgggtcgtcaagccctctcagctcaggtacagtttcagagttagaagtccagctgtggcagggtaagagacaacaatctgcaaccccggctcttcagctacggacagtaccttactatgtccaacgcagaagacatcatcagcttgctttcgaactcgaagtagaaagatgaaggagatgtattgaatggttaatatggacaaatctggtcttaaatcaacggcagcatactttaataaaagcattgctcaagatttctgcattccgtttgacgtccttcaccgtacttggtgctgttaatctgataaggcgtcatatgagtgttgctggtatgtgtgactctgggcaggggaagcatgcctattggcaaagccggtcgcagttgtacgggtctctctgcaggagctggaacacaccgatacgcgctgcttggccctaatttgtcttttcatgattctttaggcttgtgactgagagctgttactatgcagtaccgctgagtaggtagtgcatgttggtgttggtgcaggtgctgttagagtaaggtaggattcagagggtcccatttcgtcatatccaacctcatcctccagcatcctctagcttagctaagaatctgcatgccactcgtccataccgaggacatccagctgttccggcctctgcaacaccaccaaagactttctagaaacccaagggtgctgtttatgtatacctacctacatgtgcttggagaaatagtagtaccacctggttttggtgcttgtgagactaccatctcacgcaaaacggtgtgagccttgcaagggcgctgccagccatcactgcagcctcgcggtccgttagcatcagagacgggcacctaaacgacagtatatctcgtagtagagcgtgctgcagctttttgcccctagttgactccgacgatgaacgatcacagccgctagcacctactatcatgctgctcctacaccaagtaggcagcgtcaagatcggcgaggtagtgcggtacacggtcacctacacgccctcgcacgaccgcatcctgccctctcccgagttcctctacctgcgcatccgcaacacctcgcctctgcccctgcgcgcagccttcatccacggcccctacaccctctgcgtctccgcctgtccttcgcactacgatccgaacgccaagttcgacaacccccgccgctatggcgtccccgagttcgagcctatgctgaaggctgctggcacctgggcctgtcgcctcgtcgtccccgagcacattcgcgagcgtgccggcctcggtgcggcaagaggcgacttttccaagagctccctgaacgccgacgacgccatcagtgccagttgggttgtcgaagtctcgagccaggtcatcttctccaccagcgcggctgtcggctacgagatcttgctcgcgcgtgacgagaagagcctgagtctgggcagcacgcccctcgccaagggacaggccgcagtccaccagcccggcaaggtaggcgacttccaggagagcgtaggggccagagaccatcacccagcccagcccaagggtgtcttctccaaggccgttgctttgaaagtggaggacacggcgagcctgtggaacacaccgaaactgcccggcagcgacgatcataagcacgaaggagccaagacatcggagaccagcccttctgcggatgcagttgaccgggaggaaggcgcactgaagcaacagaggctcaagaaggtccatttggtagtcctgacgcatggcattcacagcaacgttggtgctgatctgctgtatttgaaagaaaacatcgacgcgaccgtcaggcaagccaagattgacgcaaaagctaggagggctaaggctcgcgaggaaacaaagcaaggaaccgatcaagacaaccagcactcatcaaacgaggaaagtcctgaagatggcgactcggatgaagtggaggttattgtacgaggcttttctggaaacgcaacgcgaacggagcgaggcgttaaattccttgggaaacgcctagcccgttacatactgtccatgacttaccccgatcagccattcttgccaactctggaaaaggcatccgacggcctcgcaagtgttctgcgcagcgagactgggaaagagacttctacgggaccaccatcccataaacacagcacaatacacgcaagtcacgatcaaataaacacacgaaaatttcaaatcactagtatcagcttgatcgctcattccttgggcggcttggtccagacttacgccattgcttatattcagaaacactcgcctcagttctttgatcttattcgacccataaacttcataactctggctactccatttctaggcttgagcaatgagaatcctatgtacgtgaagtttgcgctggacttcggcttagtgggaaggacgggccaggaccttggactcacgtggagggcacccactatcgccaggagtggctggggtgccattgttgggacactgggcgagagtgcccataagaaggtcatgggcgaaacacagccggaatcaaagccgttgttgagaatattacccactggaccggcacatacggctttgaagaagttccgtaatcggaccgtgtattcaaatgttgtcaatgatggcatcgtccctctgcgaacaagctgcctactgttcctagattggcaaggccttgaacgagtagaaaaggcgcgcagagaagccgggttagtggaaactatggtaggtttcggatgggccgagctgactggcactggtatgtcttcgcgcaaggctctgtggacgccagatgctgaggagccgccaactcttcctcaatccgtgtccacccctgaggattctcatgacgactctcacgaagttccgcagccctcgagcaacgcaactgtcgaagatgacaggcagagtttgaaccttgccactcctacggcacatgaatctctcggacagagctctcaaacagatgggccattttctggtttcttcaacttcttcaaaggaggtgatacatcaaaagcgtccaatccaaaaccatcgtcccgatctccgcgtgagaataagatataccaacgaagtcagacattgaaatttgatgaatccactagcaattcggcatcgtccagtaaaacgggtgtctcttcaggccaagagcttgaaggggaatctagtactggcatgtctgcccctccccggaccactttcttcgagtcggcaggcgacttacttaacccaaagctaccgcctgtggagtttttagttgatccatcaaaacgtgctcggactatattccacgaccgggtctatcatccttcggacatcccgccgccgcccttgaaaaggaagagttcgggggctttggccatacggaggaggaacactagccgaagcagctctgtaccaaggagctcagacagcggagacggaacggcttcgtccggacaatcaccccagaccgtacgccaagcatctctcctgtcaacgcgggattatgatgatcgcctacacaccgacccagagcgcgagcccgatcagatagtagacggttccaacatgagagtagaggagaagattgcaagagcttatcaccgtggcttgagctggcgtaaagtcctcgtcaaactagagcccgacgcgcacaacaatatcatcgtacgtcggcaatttgccaatgcattcggatggcccgttatcaaacatcttgtcgaggctcattttagtgatgaggctactgcccggaagcgggacgaagacgaggataatactgaaaacgccaaggcattgagtgaacagcctgacgagactggtaaagagactaaatcggacgaacctcgctccagctcgacccagcacagtcgttccgcaagcgagacccgcgaagccacggacgctgtgccagacctacctacgacgcaggaaagccagagccaggcttcacatagtttccaccagtcctcaccacgagcgacgcaagatactggctcagagcccgccacttggagcgatcatgacttcgctgacagtggcgacgatagcgagatcgattacgacatggcgtatggtcatccctttatacaacatgcacaggatcagaagggaaaagcgaaggagcgtgatggaagtaggagcccagtgtggaattggactgagaagatagtagggaaaggcgccacgaagaaagccagaggggaggactctccgagtcctgcgagatctcgacctggtagtggtggagctcccaccgccactacggactgagcttactcagagcgtgcattttgagaaggacagcaagcgtttcgcatcgatatcacactttggagtatacaggactcggcattgcatagcggaagacggcatgtattgtataactggtcactggcataaacagtacagaaaacatagacagttgtaatataccttttcaagatatattagcagaactataggacgaagggctggcatacacgaggtacttacaaaggcgttttggtccatgggaacatagatagatgggttggcttcgagagtacaat

SEQ ID NO: 20345 - DNA, 1179 bp, Muscodor strobelii
  misc_feature: SGI cDNA ID NO. 566865
  misc_feature: Encodes the peptide sequence at SEQ ID NO 20346
atgtcaaccgaagacactggagatggccaaacgccagcgccattctcatggctagagcctcacccccttttctgcatcatactcgtcggggaggcggaagaggcatttggggtccaaaaggactttctatgtgccaagtcagctcattttcggaagtacttcgctgagaaaaaggaacaacaagtcgaagaagtcatccgcttcccaaacactgagccagtcgtgtttgggctagcacagctcttcatgttcaccggcaacatatcactggctccccagccgttacctggttatgacttgttgatcgctctatggaagttagggaatgagatggaaattgacggtctctgcgaggaggccctcaaggtcatggcagaatatcgcgcagcaactaacagcatcccagccactgaacttcttgtcaaagcctggaacgagaccccggagggttcacaaatccgcactttacttctgtcttggacggctgaatatattcgctcctctgaatcccgtaccgaattcaccaaatcacttcctcaagaggtactcagtgagctagtcgtggctatgagccatctcaacgagcccaagccagtgacccactccacgcaacataagaacgtacactatatggaacaggacagtgaggaacgagagaagaaggtgaccaaacaccgtcattcagatggcttgtcaaatcgaggaaaaaaggcatctacgccgagatcctccctacctgctgctcgaaaaccactcggtgtaaaacgagcaaatgctaacattagcgacgatctccaattttcacaaaagcacaaattggccttctgctctgatcttctcacaagaatgttatctggtcccgggttttggactcgcctagttggacccttcaaggaaccggtccgaccggttgaagacggcgtaccggactactttgagaagatcaaaagccctatggatctaggtacaatcaaaagaaggatggacaatggcgaatatgagtcggcagaagacttcgaatcggacatcaagcaaatctttgaaaactgctacgcctattggggtcgaacacacgacatgtcagtcgctgccgagcgcttccaaaaatctttcgaagaaaagtacgcggagatgacgaagtggctaactaggaacgcggatggctctgaggaagcttag

SEQ ID NO: 20346 - protein, 392 aa, Muscodor strobelii
  misc_feature: SGI Peptide ID NO. 566865
  misc_feature (271)..(366): Pfam Id: PF00439 Pfam Desc: Bromodomain
  misc_feature (296)..(366): Pfam Id: PF00439 Pfam Desc: Bromodomain
  misc_feature (14)..(384): NCBI GI: 46136403 Blast Desc: FG09717.1 [Gibberella zeae PH-1]
  misc_feature (14)..(384): NCBI GI: 256726928 Blast Desc: TFIID associated protein [Nectria haematococca mpVI 77-13-4]
  misc_feature (14)..(384): NCBI GI: 171683335 Blast Desc: protein product [Podospora anserina] gi|170941627|emb|CAP67281.1| protein product [Podospora anserina]
  misc_feature (5)..(384): NCBI GI: 145613680 Blast Desc: MGG_01443 [Magnaporthe grisea 70-15] gi|145020723|gb|EDK04852.1| MGG_01443 [Magnaporthe grisea 70-15]
  misc_feature (1)..(384): NCBI GI: 116194624 Blast Desc: CHGG_03910 [Chaetomium globosum CBS 148.51] gi|88179823|gb|EAQ87291.1| CHGG_03910 [Chaetomium globosum CBS 148.51]
  misc_feature (14)..(384): NCBI GI: 164423286 Blast Desc: NCU08809 [Neurospora crassa OR74A] gi|157070028|gb|EAA32760.2| conserved [Neurospora crassa OR74A]
  misc_feature (14)..(384): NCBI GI: 261352427 Blast Desc: conserved [Verticillium albo-atrum VaMs.102]
  misc_feature (264)..(382): NCBI GI: 121707746 Blast Desc: transcription regulator BDF1, [Aspergillus clavatus NRRL 1] gi|119400076|gb|EAW10502.1| transcription regulator BDF1, [Aspergillus clavatus NRRL 1]
  misc_feature (221)..(384): NCBI GI: 213405871 Blast Desc: bromodomain-containing protein [Schizosaccharomyces japonicus yFS275] gi|212001754|gb|EEB07414.1| bromodomain-containing protein [Schizosaccharomyces japonicus
  misc_feature (232)..(378): NCBI GI: 221105660 Blast Desc: : similar to Bromodomain testis-specific protein [Hydra magnipapillata]
MSTEDTGDGQTPAPFSWLEPHPLFCIILVGEAEEAFGVQKDFLCAKSAHFRKYFAEKKEQQVEEVIRFPNTEPVVFGLAQLFMFTGNISLAPQPLPGYDLLIALWKLGNEMEIDGLCEEALKVMAEYRAATNSIPATELLVKAWNETPEGSQIRTLLLSWTAEYIRSSESRTEFTKSLPQEVLSELVVAMSHLNEPKPVTHSTQHKNVHYMEQDSEEREKKVTKHRHSDGLSNRGKKASTPRSSLPAARKPLGVKRANANISDDLQFSQKHKLAFCSDLLTRMLSGPGFWTRLVGPFKEPVRPVEDGVPDYFEKIKSPMDLGTIKRRMDNGEYESAEDFESDIKQIFENCYAYWGRTHDMSVAAERFQKSFEEKYAEMTKWLTRNADGSEEA

SEQ ID NO: 20347 - DNA, 1850 bp, Muscodor strobelii
  misc_feature: SGI EST ID NO. CUFF.47568.0
  misc_feature: Variant of the nucleotide sequence at SEQ ID NO 20345
ttttgctctgaacataaggtgcaacaagctggcagtgacttcgttacaataacactactgcactttgctggaatctcgtgagcctagtgaaacgtgatgtcaaccgaagacactggagatggccaaacgccagcgccattctcatggctagagcctcacccccttttctgcatcatactcgtcggggaggcggaagaggcatttggggtccaaaaggactttctatgtgccaagtcagctcattttcggaagtacttcgctgagaaaaaggaacaacaagtcgaagaagtcatccgcttcccaaacactgagccagtcgtgtttgggctagcacagctcttcatgttcaccggcaacatatcactggctccccagccgttacctggttatgacttgttgatcgctctatggaagttagggaatgagatggaaattgacggtctctgcgaggaggccctcaaggtcatggcagaatatcgcgcagcaactaacagcatcccagccactgaacttcttgtcaaagcctggaacgagaccccggagggttcacaaatccgcactttacttctgtcttggacggctgaatatattcgctcctctgaatcccgtaccgaattcaccaaatcacttcctcaagaggtactcagtgagctagtcgtggctatgagccatctcaacgagcccaagccagtgacccactccacgcaacataagaacgtacactatatggaacaggacagtgaggaacgagagaagaaggtgaccaaacaccgtcattcagatggcttgtcaaatcgaggaaaaaaggcatctacgccgagatcctccctacctgctgctcgaaaaccactcggtgtaaaacgagcaaatgctaacattagcgacgatctccaattttcacaaaagcacaaattggccttctgctctgatcttctcacaagaatgttatctggtcccgggttttggactcgcctagttggacccttcaaggaaccggtccgaccggttgaagacggcgtaccggactactttgagaagatcaaaagccctatggatctaggtacaatcaaaagaaggatggacaatggcgaatatgagtcggcagaagacttcgaatcggacatcaagcaaatctttgaaaactgctacgcctattggggtcgaacacacgacatgtcagtcgctgccgagcgcttccaaaaatctttcgaagaaaagtacgcggagatgacgaagtggctaactaggaacgcggatggctctgaggaagcttagagaactgcctcgattttagctgaggctcaatctctcaagcagacgaagaagcaaataaagatggagatgaaaagaagcccttgaggcttcgaacactgttcatatttctggtcctcttcatctttctcgaaacgaaagctacgaagcgtcctgatcgaaggaatatgcttcgagtattgtggcttcaagccgttatataatcggcgtcctggcgcgtatgatcccggcggtggcgtcttcttatttcctaattatccttctggaatgccacagtatgtgcatctatctagtggccattgaaaagcagatggcggctggtcagcgttgggacctatctttgttctccagcgcttctgttcgaggattcgaagaccttgatgttcaacaattcgacaccgtactttgtcggaattcggagactgtatcctaacttactgttttactagcctagggtttaactagtgaagtgtattctgtcacaaagtggccctcttatttgggttaccacctgaggtgatacggtacgctccagggaccatgatacaggggtctatgtgtatatatacaggtgttat

SEQ ID NO: 20348 - DNA, 1434 bp, Muscodor strobelii
  misc_feature: SGI cDNA ID NO. 566866
  misc_feature: Encodes the peptide sequence at SEQ ID NO 20349
atgcttcgtcgagacaggcgagagcttgacgagcgagattccaataatgatgaaatgcctgatgaaaccacaattgacgcattgatcttgacaaatgatcaacagaaagtcttgagagctctattccgccgagctttgttgtggcatcgcgtctggattatgcaggagctctctgtctcggagaatattcttctcgtagctggaagggaaaccttggactgggctgtagtgtcctcatttttacaagacgataataagccttatgccgatgccttccacattactgggggtcattccactgtgtacaggctcgtgtcaattttcagccaaatacagactttacagcaacagaggcgcatcatgcgcgatgttgcgaataatggttatgagtccaagttacttgacgtcctagcacgtttcaaacatgccgaggcaagagatccacgagacctgatatacggccttctgggactggtctctgagaagcatcctatcaaagtcgattacagcagatcattctgtgatgttgcaactgacttggcccgattcgttatcaaccaggctgagaatctagatatcatcttccagaatccctggcttggaggcagtgagacggtcaaaggactaccttcttgggttccagacttgacggatcaaaggcgattcaatcagtttgaacagagactcacattgatactctttgctcaaagaggtatcttttctgcgggagcacctcgctgtgctgtaccgtgtgaagtcctgagcggcaaactactccgaactcaaggtgttatatttgatcaagtagcccccgtactacaccaaggatacgatgagatagataaagatcgcgttgtcagggtttcccgctcttatgacgagaggatacgtctaccggtgcagtggatgaagcagtattttggtgataccttatttaccgaatcgagtgtctaccctgtgacagaagaacaccaattccgggcttactggagaactctcgtcatggattgcaaggcctatcccattcagagactttctctggaagagatagattcagacgacgaagtgttcaagaggcttctcaaggtcgactttggcatcgaaggcaagaataaagagaaccgtacagttaccgaacaatgcattaaacaacttgcatctagcacaatggtatggcgactttttggcgagtggacattcgcgagttcaaagtcaggattgatgctcatggtcagggaaggcgtgaaagagggagacgttcttgcggtactagatggtggaaaagtcccatgcgtgctacgcccaatgataagctctgaggccctacagtatcaattcattaacaccgcttatgtacatggatacatggatgggcaagcagcagtacatacacttgagggattgcatgagaagcaagagatcgtccttatctag

SEQ ID NO: 20349 - protein, 477 aa, Muscodor strobelii
  misc_feature: SGI Peptide ID NO. 566866
  misc_feature (2)..(476): NCBI GI: 256722306 Blast Desc: NECHADRAFT_87938 [Nectria haematococca mpVI 77-13-4]
  misc_feature (29)..(459): NCBI GI: 145605928 Blast Desc: MGG_11850 [Magnaporthe grisea 70-15] gi|145013675|gb|EDJ98316.1| MGG_11850 [Magnaporthe grisea 70-15]
  misc_feature (29)..(459): NCBI GI: 39977809 Blast Desc: MGG_06789 [Magnaporthe grisea 70-15] gi|145013684|gb|EDJ98325.1| MGG_06789 [Magnaporthe grisea 70-15]
  misc_feature (29)..(356): NCBI GI: 46139489 Blast Desc: FG11259.1 [Gibberella zeae PH-1]
  misc_feature (37)..(447): NCBI GI: 156061203 Blast Desc: SS1G_02744 [Sclerotinia sclerotiorum 1980] gi|154700148|gb|EDN99886.1| SS1G_02744 [Sclerotinia sclerotiorum 1980]
  misc_feature (48)..(477): NCBI GI: 169616049 Blast Desc: SNOG_11196 [Phaeosphaeria nodorum SN15] gi|111060575|gb|EAT81695.1| SNOG_11196 [Phaeosphaeria nodorum SN15]
  misc_feature (48)..(459): NCBI GI: 256722259 Blast Desc: NECHADRAFT_86864 [Nectria haematococca mpVI 77-13-4]
  misc_feature (48)..(434): NCBI GI: 256724252 Blast Desc: NECHADRAFT_87550 [Nectria haematococca mpVI 77-13-4]
  misc_feature (15)..(477): NCBI GI: 256730775 Blast Desc: NECHADRAFT_30134 [Nectria haematococca mpVI 77-13-4]
  misc_feature (48)..(466): NCBI GI: 169617620 Blast Desc: SNOG_11993 [Phaeosphaeria nodorum SN15] gi|111059285|gb|EAT80405.1| SNOG_11993 [Phaeosphaeria nodorum SN15]
MLRRDRRELDERDSNNDEMPDETTIDALILTNDQQKVLRALFRRALLWHRVWIMQELSVSENILLVAGRETLDWAVVSSFLQDDNKPYADAFHITGGHSTVYRLVSIFSQIQTLQQQRRIMRDVANNGYESKLLDVLARFKHAEARDPRDLIYGLLGLVSEKHPIKVDYSRSFCDVATDLARFVINQAENLDIIFQNPWLGGSETVKGLPSWVPDLTDQRRFNQFEQRLTLILFAQRGIFSAGAPRCAVPCEVLSGKLLRTQGVIFDQVAPVLHQGYDEIDKDRVVRVSRSYDERIRLPVQWMKQYFGDTLFTESSVYPVTEEHQFRAYWRTLVMDCKAYPIQRLSLEEIDSDDEVFKRLLKVDFGIEGKNKENRTVTEQCIKQLASSTMVWRLFGEWTFASSKSGLMLMVREGVKEGDVLAVLDGGKVPCVLRPMISSEALQYQFINTAYVHGYMDGQAAVHTLEGLHEKQEIVLI

SEQ ID NO: 20350 - DNA, 1117 bp, Muscodor strobelii
  misc_feature: SGI EST ID NO. CUFF.47596.0
  misc_feature: Variant of the nucleotide sequence at SEQ ID NO 20348
ctcacattgatactctttgctcaaagaggtatcttttctgcgggagcacctcgctgtgctgtaccgtgtgaagtcctgagcggcaaactactccgaactcaaggtgttatatttgatcaagtagcccccgtactacaccaaggatacgatgagatagataaagatcgcgttgtcagggtttcccgctcttatgacgagaggatacgtctaccggtgcagtggatgaagcagtattttggtgataccttatttaccgaatcgagtgtctaccctgtgacagaagaacaccaattccgggcttactggagaactctcgtcatggattgcaaggcctatcccattcagagactttctctggaagagatagattcagacgacgaagtgttcaagaggcttctcaaggtcgactttggcatcgaaggcaagaataaagagaaccgtacagttaccgaacaatgcattaaacaacttgcatctagcacaatggtatggcgactttttggcgagtggacattcgcgagttcaaagtcaggattgatgctcatggtcagggaaggcgtgaaagagggagacgttcttgcggtactagatggtggaaaagtcccatgcgtgctacgcccaatgataagctctgaggccctacagtatcaattcattaacaccgcttatgtacatggatacatggatgggcaagcagcagtacatacacttgagggattgcatgagaagcaagagatcgtccttatctaggcgtcgacctattcctctattagcctgcaacacggcgaaacgtcactagtattctcacacaacattaacccttcctccctcgtagttctttgtatagggtactatgattgaaggaaatgatacaccctgtgtgattggatataatgagatatgaaggacgtgtttcgagacgtgacgtcggatatcatcggtatcacacaagtactcatctcacttctctgtctcgttctgtatgtcaagaagacgtcggacctctgactcttatctccctcgtattctctcgatcgttgccaaagcttataactatgttcatacaatcagttgaccaagtatctctatctgccgcggcctaggcgttgaaatttcc

SEQ ID NO: 20351 - DNA, 1473 bp, Muscodor strobelii
  misc_feature: SGI cDNA ID NO. 566867
  misc_feature: Encodes the peptide sequence at SEQ ID NO 20352
atggattccttcgctcatatagaggagggtctattcccatcgttggacttcttatcatcagccaagttctggtggatcaccttttgggttatttggatctatcgttatttccgtctcatcgtccatactttgagccattggctatatagatcaaaacctatttcggacaaacctactttcactgagcaagatgtcacggtcatcattcctacgattcataatatccttgaagaacttcgtccttctttagagagtattttggcctgtaggcctcgtgaacttatcctggttacaacagtagataaacacggctcacttgagaaacttgctcggagtctgccctcgccaaatgttcgtgtattattcacgcccattgccaacaagcgtcttcaagtctgcgaagccctaccaaaagtcaagacgcccatcaccatcatggctgatgacgatgttacatggcccgccacccttatgccatggattctagcccctttcgaggatccacgaatgggcggtgttgttactagccaacgggtgcgtcgcgagccaaacgcaccttggtctacacagatttggaactggttaggcgcggcctatattgagcgtcgaaacttcgagatatccgccacgcacaatattgacggtggcacttcttgtatgtctggccgaacaggagcataccgctcagagatcctctcaagccatgatttccttgagggcttcaaaactgagcgctggcgacactacattcttaacgccgacgacgacaacttcgtgactcgctggctcgtcaatcaccagtggaagacgtgggtgcagtatgaccctgagtgcgagatcgagacaacactggaaaatggcataaagttcctctaccagtgcacaagatggtctcgtagtaattggcgcagtaattggacgagtctcgttcgcgagcgatacgtccttaatcagcaactgtggtgcagctacgccttgcatttagcaacctttacatccctcgccttcgttgttgatcctcttttgctagttgcactttggtggggaactgatgggtgggatatggacactcgtcggcacctgttctgggctcaagtcgtctttctttttgctttcactaaagtcataaagcttgtcggtctcttccgacgacagccaagcgacatattgttcctcccgatttccatcgcattcgggtattttcacggcttaatcaagctatatgctctggctactctaaacatgacttcttggggcagtcggccagatggtgacgcaaatgacgctcttcgcatgtcaccacgtcctcgaagaagcgatagcattgccacaccatcaccgcgaccagatgatcttgatcgtttcattggtcccagaatgcgcagcgtttcaacaccgttatcggaaaaaaggacatttaccgacgcggagcgagaggtaccatcgatcgctatggttgccggattctcttga

SEQ ID NO: 20352 - protein, 490 aa, Muscodor strobelii
  misc_feature: SGI Peptide ID NO. 566867
  misc_feature (12)..(455): NCBI GI: 46107638 Blast Desc: FG00702.1 [Gibberella zeae PH-1]
  misc_feature (12)..(455): NCBI GI: 256735470 Blast Desc: glycosyltransferase family 2 [Nectria haematococca mpVI 77-13-4]
  misc_feature (11)..(455): NCBI GI: 261358823 Blast Desc: conserved [Verticillium albo-atrum VaMs.102]
  misc_feature (11)..(476): NCBI GI: 171694902 Blast Desc: protein product [Podospora anserina] gi|170947693|emb|CAP59855.1| protein product [Podospora anserina]
  misc_feature (44)..(445): NCBI GI: 145614026 Blast Desc: MGG_01191 [Magnaporthe grisea 70-15] gi|145021013|gb|EDK05142.1| MGG_01191 [Magnaporthe grisea 70-15]
  misc_feature (12)..(455): NCBI GI: 154295304 Blast Desc: BC1G_13233 [Botryotinia fuckeliana B05.10] gi|150844100|gb|EDN19293.1| BC1G_13233 [Botryotinia fuckeliana B05.10]
  misc_feature (18)..(455): NCBI GI: 156040621 Blast Desc: SS1G_12327 [Sclerotinia sclerotiorum 1980] gi|154696383|gb|EDN96121.1| SS1G_12327 [Sclerotinia sclerotiorum 1980]
  misc_feature (4)..(445): NCBI GI: 116182608 Blast Desc: conserved [Chaetomium globosum CBS 148.51] gi|88186229|gb|EAQ93697.1| conserved [Chaetomium globosum CBS 148.51]
  misc_feature (117)..(452): NCBI GI: 85068552 Blast Desc: NCU00911 [Neurospora crassa OR74A] gi|28925535|gb|EAA34564.1| conserved [Neurospora crassa OR74A] gi|38636455|emb|CAE81990.1| [Neurospora crassa]
  misc_feature (27)..(435): NCBI GI: 242824380 Blast Desc: polysaccharide synthase Cps1, [Talaromyces stipitatus ATCC 10500] gi|242824390|ref|XP_002488248.1| polysaccharide synthase Cps1, [Talaromyces stipitatus ATCC 10500] polysaccharide
MDSFAHIEEGLFPSLDFLSSAKFWWITFWVIWIYRYFRLIVHTLSHWLYRSKPISDKPTFTEQDVTVIIPTIHNILEELRPSLESILACRPRELILVTTVDKHGSLEKLARSLPSPNVRVLFTPIANKRLQVCEALPKVKTPITIMADDDVTWPATLMPWILAPFEDPRMGGVVTSQRVRREPNAPWSTQIWNWLGAAYIERRNFEISATHNIDGGTSCMSGRTGAYRSEILSSHDFLEGFKTERWRHYILNADDDNFVTRWLVNHQWKTWVQYDPECEIETTLENGIKFLYQCTRWSRSNWRSNWTSLVRERYVLNQQLWCSYALHLATFTSLAFVVDPLLLVALWWGTDGWDMDTRRHLFWAQVVFLFAFTKVIKLVGLFRRQPSDILFLPISIAFGYFHGLIKLYALATLNMTSWGSRPDGDANDALRMSPRPRRSDSIATPSPRPDDLDRFIGPRMRSVSTPLSEKRTFTDAEREVPSIAMVAGFS

SEQ ID NO: 20353 - DNA, 2665 bp, Muscodor strobelii
  misc_feature: SGI EST ID NO. CUFF.47783.1
  misc_feature: Variant of the nucleotide sequence at SEQ ID NO 20351
ggggtcgtatgggtccatctgcctatatatccttgcctcctctcccgggtctaggccatatgccttgcctcgatgacttgcctgatatttattctagtcgatgctgctgttgcgttcatcggatatatttctcttgtcattatggcttcgttgatttgaggacaaaccactcttctcctcagtctgttgaacttgagtgtgtgtatattatagtgtgcgatcccacttctgcacgcctccctcccggtttcgagttgttgaataactacactttgcattgcccaacgcggccgcaactcaacttatattaacaacacgaaaagtgtcaaacgcgcaagattaccgccatcatttctgttttgttcagtattagaaatcttcaagcacctcacactcaacaacgacaatatctcgtccccctctcgtaaggattatatctcacaacgattatcgtcagatacgtggtgagcgaactgtggggagcaatcgcagttattatccttcgtttctgtcttgttcttttctgcctgagcatttttgcctcgagcattgggagccacattgtattggcatctacggaatctgtgaaatggattccttcgctcatatagaggagggtctattcccatcgttggacttcttatcatcagccaagttctggtggatcaccttttgggttatttggatctatcgttatttccgtctcatcgtccatactttgagccattggctatatagatcaaaacctatttcggacaaacctactttcactgagcaagatgtcacggtcatcattcctacgattcataatatccttgaagaacttcgtccttctttagagagtattttggcctgtaggcctcgtgaacttatcctggttacaacagtagataaacacggctcacttgagaaacttgctcggagtctgccctcgccaaatgttcgtgtattattcacgcccattgccaacaagcgtcttcaagtctgcgaagccctaccaaaagtcaagacgcccatcaccatcatggctgatgacgatgttacatggcccgccacccttatgccatggattctagcccctttcgaggatccacgaatgggcggtgttgttactagccaacgggtgcgtcgcgagccaaacgcaccttggtctacacagatttggaactggttaggcgcggcctatattgagcgtcgaaacttcgagatatccgccacgcacaatattgacggtggcacttcttgtatgtctggccgaacaggagcataccgctcagagatcctctcaagccatgatttccttgagggcttcaaaactgagcgctggcgacactacattcttaacgccgacgacgacaacttcgtgactcgctggctcgtcaatcaccagtggaagacgtgggtgcagtatgaccctgagtgcgagatcgagacaacactggaaaatggcataaagttcctctaccagtgcacaagatggtctcgtagtaattggcgcagtaattggacgagtctcgttcgcgagcgatacgtccttaatcagcaactgtggtgcagctacgccttgcatttagcaacctttacatccctcgccttcgttgttgatcctcttttgctagttgcactttggtggggaactgatgggtgggatatggacactcgtcggcacctgttctgggctcaagtcgtctttctttttgctttcactaaagtcataaagcttgtcggtctcttccgacgacagccaagcgacatattgttcctcccgatttccatcgcattcgggtattttcacggcttaatcaagctatatgctctggctactctaaacatgacttcttggggcagtcggccagatggtgacgcaaatgacgctcttcgcatgtcaccacgtcctcgaagaagcgatagcattgccacaccatcaccgcgaccagatgatcttgatcgtttcattggtcccagaatgcgcagcgtttcaacaccgttatcggaaaaaaggacatttaccgacgcggagcgagaggtaccatcgatcgctatggttgccggattctcttgatccttggcctgagggccgcaattgcttcacattctccccttgcatcaatgcatagatgcgtgagagcgaaacgagactacggatttatgatttacgattgcctttgtatgcacatactacctattctatctggggctgcagaaaaggaaaccggggtatttcctctcaaagcattacaacattattcaacttctcctcaaggtaatccacttgggataagtgacccttcttcgtcatatttgttggctctaaaagctttttatctccacggtataggaacggaaaatcatttctaggtcagacatgatgaaagaatcggagtttggtatcattttggctgcacaggattgatagggacggtatttcatttcggatatcaaattttggcttggaccgtggctctgcttctttaaaagattggttcacaatatttatggcgacaagagagggagacttaagatcataataaaagagcttagattgagattgcaacaatatgttctcagtctctaatagacttagagagaaacataatacaatattatgggtctgggcaaattatctacgatactcaagcgtcgggatcattggtgaagactgctg

SEQ ID NO: 20354 - DNA, 4350 bp, Muscodor strobelii
  misc_feature: SGI cDNA ID NO. 566868
  misc_feature: Encodes the peptide sequence at SEQ ID NO 20355
atgggcgaaaaccatgttggcgacgcaaagccttacgaaaaatcgactgagacgttccgaaagctttttgagatacttcctaatcatttgaaagacacgctcaacatctatatgacagattcgcatgttgttgcaaatctgactgaacgaggctcggtatggtctggcaaaagggctgcgcgattgggctcgttcatccgtgccgccaaacccttcttcaccgcaatggatcttttcgcttccgtcgatccgattcacattgcgacggtgtggggtgctttgcgccttggtttcggttatgttcaatttttggacaaatttgtgattagcttagagaagatcgcgagcgaaatggctttcttcggcgacataggggatcttcgagacagagatcagattccatcatccgcgaggcttgtgaagctgctcgaggctgtattcgaagagcttgcacagtaccttctgagcgtcttcaagatattttaccaccctgatggacgctctaaaaacgggcttcgaatacttgggaaggccgtgatcaatcctttgcggttcgacgagactatacaacgcatgaaagaataccgcgaagaaatctttgaagaattttcattgctagatttcattaattctcacaatttccaaaaagcagcagaggaagaatacaggtcggctttagacgaaaggcaacggactgtggcaggcaatcgcgaactacgatcaggtctccttgagcttgagaaactatcccacagggaagccaaacatacatttatacatcgcgcaagaaagtggctcgcgccgcaggactttgccgataggtacgaagatgctttgggcttacgcgaagagggaacaggtgcatggctgttgcaacatccagactatgtacattgggttaagcaagtcgccgaaggaagacagaccctttggattaaaggcaatccgggctcagggaaaacagtcctggcagcttcggttatcgaaaacctagctgatgattatcctgatgtccctgtttgctactatttcttcaactccagacaaaccgacgcaagtggactgaatgatagctccactacgtctgcatatcgagccatattagctcaaatactacaacaaaatcttgacaatgaaagcctcattgatctctactcgttcacaatgtactttggatcttctgggcagcaacaagcttcgcgagaagagctctttgacctaatagagctgtcattacactgcttagatgatgtataccttgttttcgacgctgttgacgaatgcagcgcagcaaaagagctggtactcaagctgcgaaacctcgcaatgaaaacttctacgcgcctcattcttttcagtcgcccaacagttactaaattaagggagctgatacctaacttagtgcaattaccaattggcctgtcgaacgcaggtgatataacactctatcttcatcgaagcgtcgaacgccttcaggaggaacggttgctaccttccaggtcagctgctaaacaaattgcggacactctctcgattcgagcggacgggatgttcctttgggcgaggctaatgatcgcatatctcgcttcgcctgcccttttccctgccgaacgcgaaaaggcgattgaacaagttgcggtgccggaaggcttaaacataatgttcgatcgtatcattgatctactcgagcggaatgacgcgccaatgcaaaaacttgcggagcagacatttctgtggctagtatatagcaggcgcaaaatgattccaatcgagcttgagagcgcattcgtgccgatggatacatctcccgcggacgcagagctatggaagctaccggatttcgacaataccgttgtccaagcatgcggcgggctcgtagatcaagatcctcgccccagcaccttttgtggacacacattctacccctttcggttgatacacgctgccgtaagggattatctactctctccagatggccggcaaaagcggaaactgggaatgccatcatcgacattgttaccaccgccatttcccgaggctcatgctcaaatggctaagctttgtgtctcctacctcttatatcagaccccagcccaacctctatctacaaagctaggtgaaaatgcacgacacgatgacctttggagaatgtttccactctgtaattatgcctggttgaactggactcaccatctaaaactagctggggactcgcttctcaagccgacgatacttgtgccaaatctgctcaaaaatttgggcgatttttttcgccaacctaaagttttgatggcatgggttgaaggctgctacacgtttggaaagcacccacctcacagtgagctgcaggcatgggcctcggaagtatctgcaagtacagttaagaaacaaggacaagaaaatatcgagaacgtcgttgctatggcccggaactttggggactatctcgcgagactcgaagtggagtggggcaatcaattggtcaaacagccagccatcgtttggcaagaagccacagtcttcactccgagtccaatgcttttgaagcacggaggaatagatgttctgcctctcaaaacgaagatcccgccaaattttgggtacggtcctctctctcgcgtatcgcagctgtctcccaacggaatacacgatgtggtcctgagtgtctacccctctagcttgttcagcgaattcgccagaaagccccaacatcatgatccccactggcgggatagaattcttgaagacaaatcgctgtcaaagggttggacggcacgatacgagatcgttcaaattcaggatcagacccatatcggcttcgttgatatctctctttcctacatagatgtatgggtattcgtcgtgttgaatactctgtaccgtgtcagtatcagcgctagagacggaatcttaacttaccagtccagttatctcccagtcgatccagtctcatcggacacaaaagaaacgacctacagcagacagcatttccagggtaatatgaccttcgccgattttccgcgctacacacgcagcacattcggacatgtgcctttgcactgggtttacatagacgaccaggggcaatacttgtgtttcgcaaagcagcagagaacgcttccaaccaaattccaaatcttcgagattgatgctaattctcagaccggtatccatttcactagcgtctcggaacgtagcgttttcatgaatatcgtgcccaagtcaaaacagaatgagttcgtgaatatcggtccacagccaaatcagcatgaggaaaaacagttcgaggtgtgctttcatcctatcctccctgtccttgtctattcgagctctaaaagaacgacaatatggaactttttcaatgacaagatcgctcggatcggtgatggggctctcaatattgatcgaatgacttgctctgccgatgggaaacaatgtattatcgagccacgtggaagtctgccggttgttctttctttagaagaaggtataaaagccatcgggttggctgacgacacgaaggaccaagcatatgccaacgctgccatacctgaaaatacaacgcaatcgtctctcttatctccccaaataaggcctgagcttgagccgtggtcattagcgtacagagtcctcggaaaacacaagactctgactgggagcaatgtcatgattgctccagacggcacacatagccacctatccgttacgagtgatgggagggtagcgctgatgtcgcaccagagaggggacgggaacaccgatgaattcacacttacccatctaccaagatggtccggagcagcatcagcaaaagtaagtgtcgtaagacccggtgaaggttttgatcgattgaaaattgtcctcgacaagtcgccagatacttggagcaatgttacatccaacgcaggtagggaagaagcatttccattggtagtcgagcgacaagtagcatcactttcgcgatcaactggaaaggacctgcccgcaataccaggtccgagcaaaccgccatacaaagacggaggcgggacggtaggtgttggcgcagcagagtcaacacgacccgccgtgttgctcgatcatgatttcgaaggcgggaacgtatctgacttcgaatacgacatgcacgaggattctatacctccgcgacaactaccgcttcgccactggagaccaaagactgtcttgcgcaggataaaagagagtatctctgatcgattgaaagggagtgtcacacagcaagataaccaattcgctgatgagcaagttcatatgccatggtttgtggctgctgatgagttgatcaatgttgcggatgaagatgagagagacaaactggtaatagactag

SEQ ID NO: 20355 - protein, 1449 aa, Muscodor strobelii
  misc_feature: SGI Peptide ID NO. 566868
  misc_feature (71)..(1335): NCBI GI: 46105078 Blast Desc: FG00167.1 [Gibberella zeae PH-1]
  misc_feature (55)..(785): NCBI GI: 119482337 Blast Desc: NFIA_092610 [Neosartorya fischeri NRRL 181] gi|119409351|gb|EAW19300.1| conserved [Neosartorya fischeri NRRL 181]
  misc_feature (220)..(780): NCBI GI: 256720834 Blast Desc: NECHADRAFT_85540 [Nectria haematococca mpVI 77-13-4]
  misc_feature (220)..(746): NCBI GI: 240281360 Blast Desc: ankyrin repeat protein [Ajellomyces capsulatus H143]
  misc_feature (122)..(798): NCBI GI: 212545278 Blast Desc: NACHT domain protein [Penicillium marneffei ATCC 18224] gi|210065762|gb|EEA19856.1| NACHT domain protein [Penicillium marneffei ATCC 18224]
  misc_feature (264)..(733): NCBI GI: 261188197 Blast Desc: ankyrin repeat protein [Ajellomyces dermatitidis SLH14081] gi|239593390|gb|EEQ75971.1| ankyrin repeat protein [Ajellomyces dermatitidis SLH14081]
  misc_feature (264)..(744): NCBI GI: 239609132 Blast Desc: ankyrin repeat protein [Ajellomyces dermatitidis ER-3]
  misc_feature (265)..(762): NCBI GI: 255957133 Blast Desc: Pc21g23520 [Penicillium chrysogenum Wisconsin 54-1255] gi|211591030|emb|CAP97249.1| Pc21g23520 [Penicillium chrysogenum Wisconsin 54-1255]
  misc_feature (265)..(733): NCBI GI: 255939916 Blast Desc: Pc16g03680 [Penicillium chrysogenum Wisconsin 54-1255] gi|211585350|emb|CAP93038.1| Pc16g03680 [Penicillium chrysogenum Wisconsin 54-1255]
  misc_feature (265)..(735): NCBI GI: 156054868 Blast Desc: SS1G_06282 [Sclerotinia sclerotiorum 1980] gi|154704062|gb|EDO03801.1| SS1G_06282 [Sclerotinia sclerotiorum 1980]
MGENHVGDAKPYEKSTETFRKLFEILPNHLKDTLNIYMTDSHVVANLTERGSVWSGKRAARLGSFIRAAKPFFTAMDLFASVDPIHIATVWGALRLGFGYVQFLDKFVISLEKIASEMAFFGDIGDLRDRDQIPSSARLVKLLEAVFEELAQYLLSVFKIFYHPDGRSKNGLRILGKAVINPLRFDETIQRMKEYREEIFEEFSLLDFINSHNFQKAAEEEYRSALDERQRTVAGNRELRSGLLELEKLSHREAKHTFIHRARKWLAPQDFADRYEDALGLREEGTGAWLLQHPDYVHWVKQVAEGRQTLWIKGNPGSGKTVLAASVIENLADDYPDVPVCYYFFNSRQTDASGLNDSSTTSAYRAILAQILQQNLDNESLIDLYSFTMYFGSSGQQQASREELFDLIELSLHCLDDVYLVFDAVDECSAAKELVLKLRNLAMKTSTRLILFSRPTVTKLRELIPNLVQLPIGLSNAGDITLYLHRSVERLQEERLLPSRSAAKQIADTLSIRADGMFLWARLMIAYLASPALFPAEREKAIEQVAVPEGLNIMFDRIIDLLERNDAPMQKLAEQTFLWLVYSRRKMIPIELESAFVPMDTSPADAELWKLPDFDNTVVQACGGLVDQDPRPSTFCGHTFYPFRLIHAAVRDYLLSPDGRQKRKLGMPSSTLLPPPFPEAHAQMAKLCVSYLLYQTPAQPLSTKLGENARHDDLWRMFPLCNYAWLNWTHHLKLAGDSLLKPTILVPNLLKNLGDFFRQPKVLMAWVEGCYTFGKHPPHSELQAWASEVSASTVKKQGQENIENVVAMARNFGDYLARLEVEWGNQLVKQPAIVWQEATVFTPSPMLLKHGGIDVLPLKTKIPPNFGYGPLSRVSQLSPNGIHDVVLSVYPSSLFSEFARKPQHHDPHWRDRILEDKSLSKGWTARYEIVQIQDQTHIGFVDISLSYIDVWVFVVLNTLYRVSISARDGILTYQSSYLPVDPVSSDTKETTYSRQHFQGNMTFADFPRYTRSTFGHVPLHWVYIDDQGQYLCFAKQQRTLPTKFQIFEIDANSQTGIHFTSVSERSVFMNIVPKSKQNEFVNIGPQPNQHEEKQFEVCFHPILPVLVYSSSKRTTIWNFFNDKIARIGDGALNIDRMTCSADGKQCIIEPRGSLPVVLSLEEGIKAIGLADDTKDQAYANAAIPENTTQSSLLSPQIRPELEPWSLAYRVLGKHKTLTGSNVMIAPDGTHSHLSVTSDGRVALMSHQRGDGNTDEFTLTHLPRWSGAASAKVSVVRPGEGFDRLKIVLDKSPDTWSNVTSNAGREEAFPLVVERQVASLSRSTGKDLPAIPGPSKPPYKDGGGTVGVGAAESTRPAVLLDHDFEGGNVSDFEYDMHEDSIPPRQLPLRHWRPKTVLRRIKESISDRLKGSVTQQDNQFADEQVHMPWFVAADELINVADEDERDKLVID

SEQ ID NO: 20356 - DNA, 4013 bp, Muscodor strobelii
  misc_feature: SGI EST ID NO. CUFF.47654.0
  misc_feature: Variant of the nucleotide sequence at SEQ ID NO 20354
catttatacatcgcgcaagaaagtggctcgcgccgcaggactttgccgataggtacgaagatgctttgggcttacgcgaagagggaacaggtgcatggctgttgcaacatccagactatgtacattgggttaagcaagtcgccgaaggaagacagaccctttggattaaaggcaatccgggctcagggaaaacagtcctggcagcttcggttatcgaaaacctagctgatgattatcctgatgtccctgtttgctactatttcttcaactccagacaaaccgacgcaagtggactgaatgatagctccactacgtctgcatatcgagccatattagctcaaatactacaacaaaatcttgacaatgaaagcctcattgatctctactcgttcacaatgtactttggatcttctgggcagcaacaagcttcgcgagaagagctctttgacctaatagagctgtcattacactgcttagatgatgtataccttgttttcgacgctgttgacgaatgcagcgcagcaaaagagctggtactcaagctgcgaaacctcgcaatgaaaacttctacgcgcctcattcttttcagtcgcccaacagttactaaattaagggagctgatacctaacttagtgcaattaccaattggcctgtcgaacgcaggtgatataacactctatcttcatcgaagcgtcgaacgccttcaggaggaacggttgctaccttccaggtcagctgctaaacaaattgcggacactctctcgattcgagcggacgggatgttcctttgggcgaggctaatgatcgcatatctcgcttcgcctgcccttttccctgccgaacgcgaaaaggcgattgaacaagttgcggtgccggaaggcttaaacataatgttcgatcgtatcattgatctactcgagcggaatgacgcgccaatgcaaaaacttgcggagcagacatttctgtggctagtatatagcaggcgcaaaatgattccaatcgagcttgagagcgcattcgtgccgatggatacatctcccgcggacgcagagctatggaagctaccggatttcgacaataccgttgtccaagcatgcggcgggctcgtagatcaagatcctcgccccagcaccttttgtggacacacattctacccctttcggttgatacacgctgccgtaagggattatctactctctccagatggccggcaaaagcggaaactgggaatgccatcatcgacattgttaccaccgccatttcccgaggctcatgctcaaatggctaagctttgtgtctcctacctcttatatcagaccccagcccaacctctatctacaaagctaggtgaaaatgcacgacacgatgacctttggagaatgtttccactctgtaattatgcctggttgaactggactcaccatctaaaactagctggggactcgcttctcaagccgacgatacttgtgccaaatctgctcaaaaatttgggcgatttttttcgccaacctaaagttttgatggcatgggttgaaggctgctacacgtttggaaagcacccacctcacagtgagctgcaggcatgggcctcggaagtatctgcaagtacagttaagaaacaaggacaagaaaatatcgagaacgtcgttgctatggcccggaactttggggactatctcgcgagactcgaagtggagtggggcaatcaattggtcaaacagccagccatcgtttggcaagaagccacagtcttcactccgagtccaatgcttttgaagcacggaggaatagatgttctgcctctcaaaacgaagatcccgccaaattttgggtacggtcctctctctcgcgtatcgcagctgtctcccaacggaatacacgatgtggtcctgagtgtctacccctctagcttgttcagcgaattcgccagaaagccccaacatcatgatccccactggcgggatagaattcttgaagacaaatcgctgtcaaagggttggacggcacgatacgagatcgttcaaattcaggatcagacccatatcggcttcgttgatatctctctttcctacatagatgtatgggtacgatgttgtgagacgctgaccagaggttcaatacagataccaatatctgtctcaagaaattgtcaggtattcgtcgtgttgaatactctgtaccgtgtcagtatcagcgctagagacggaatcttaacttaccagtccagttatctcccagtcgatccagtctcatcggacacaaaagaaacgacctacagcagacagcatttccagggtaatatgaccttcgccgattttccgcgctacacacgcagcacattcggacatgtgcctttgcactgggtttacatagacgaccaggggcaatacttgtgtttcgcaaagcagcagagaacgcttccaaccaaattccaaatcttcgagattgatgctaattctcagaccggtatccatttcactagcgtctcggaacgtagcgttttcatgaatatcgtgcccaagtcaaaacagaatgagttcgtgaatatcggtccacagccaaatcagcatgaggaaaaacagttcgaggtgtgctttcatcctatcctccctgtccttgtctattcgagctctaaaagaacgacaatatggaactttttcaatgacaagatcgctcggatcggtgatggggctctcaatattgatcgaatgacttgctctgccgatgggaaacaatgtattatcgagccacgtggaagtctgccggttgttctttctttagaagaaggtataaaagccatcgggttggctgacgacacgaaggaccaagcatatgccaacgctgccatacctgaaaatacaacgcaatcgtctctcttatctccccaaataaggcctgagcttgagccgtggtcattagcgtacagagtcctcggaaaacacaagactctgactgggagcaatgtcatgattgctccagacggcacacatagccacctatccgttacgagtgatgggagggtagcgctgatgtcgcaccagagaggggacgggaacaccgatgaattcacacttacccatctaccaagatggtccggagcagcatcagcaaaagtaagtgtcgtaagacccggtgaaggttttgatcgattgaaaattgtcctcgacaagtcgccagatacttggagcaatgttacatccaacgcaggtagggaagaagcatttccattggtagtcgagcgacaagtagcatcactttcgcgatcaactggaaaggacctgcccgcaataccaggtccgagcaaaccgccatacaaagacggaggcgggacggtaggtgttggcgcagcagagtcaacacgacccgccgtgttgctcgatcatgatttcgaaggcgggaacgtatctgacttcgaatacgacatgcacgaggattctatacctccgcgacaactaccgcttcgccactggagaccaaagactgtcttgcgcaggataaaagagagtatctctgatcgattgaaagggagtgtcacacagcaagataaccaattcgctgatgagcaagttcatatgccatggtttgtggctgctgatgagttgatcaatgttgcggatgaagatgagagagacaaactggtaatagactagaacgttaaacctaagcgggtggttcgaaccagttggaacccgcctcccaaagaactgatcacgcgaagcatagttgctggatacaaaaaggcacttcgagaatttgacaatgtatcttgaaattcaagatattctaagacatgattttgggacgtatgaggagcggacagaagcaacagcgaatatttcttctattggtcacatttaactgccaaggaagatggaaagcatccacagtcgtcgaagaaagaaagagaagacatagcggcgattcaccagaaactagtatagctaagccttacaacttacaagacctcaaatctagctctgacttccattcagtcacgagctggaataatagat

SEQ ID NO: 20357 - DNA, 1203 bp, Muscodor strobelii
  misc_feature: SGI cDNA ID NO. 566869
  misc_feature: Reduced expression when VOC is produced
  misc_feature: Encodes the peptide sequence at SEQ ID NO 20358
atggcgcctccctttcgaaacgaccacatcggctcactcttacgtccccaatctctcctctcagcacgtagcactctctcatcaccctctcaaatgtactcattagaaatccccgaatccgtaaaagccgcacaacaaaaagcgatccaagaagtagcctctctccaaatatccaaaggcgtgcggcccatcacagacggagaatacgcacgacacatatactacggtggattcttcgagaagctctcaggtttcgaggctcggcctgcattacctattcctgatgcgtttagaactgatttcccgactactacaaaacttaggtcgatgggcgctacgacgagagcggcctgtgtctgcatcgggaaaatcgagtataaagagtcgccttatctcgccgagtggttgactttacgggcgagtctaccggaggagttgataagtgcagcgaaaattacgcttccggcgccgtcgtatcaacatatccagcttaagccggggactgcatatacagcggagtcaggctatacatccgacgcggaatattttacagacatagcatcttgttacgcagcggaactcaagacattatacgatgagggcgtaaggaacatacagattgacgacccgcatctcacatatttcgcgtcatcacaattcttgaatgggtgcaaaaaggacggcacgaataccgacgagttactggatttatacatttcggtccataatcagctaattaaaggaaaacctaaagatctgaatatgggcgttcatctgtgtcgtggaaatatggcgggaagtgtccattgggttgacgggagctacgagaacatcgcgcagaaactattccacgagacggagtatgagacgtattatctcgagtttgatgatgtggagcgagtaggaggatttgaaccgctacgatttctaccgcgagggaagaacgttgttttgggattggtttcgacgaaagacgcgacgctggaggacggggagaagctgaaggagaagatttatgatgctgcgagggttattgcagaggcgcagggcgttagtgaggaggaagcattggactgtttggcactgagtccgcagtgtggatttagtagtagcagtctttctggagggcttggtatgacggaggcgaggatgtgggagaagttggagcttgttaagagggttgctgatgaggtctggggctaa

SEQ ID NO: 20358 - protein, 400 aa, Muscodor strobelii
  misc_feature: SGI Peptide ID NO. 566869
  misc_feature (1)..(399): NCBI GI: 145249102 Blast Desc: An14g02640 [Aspergillus niger] gi|134081566|emb|CAK46512.1| protein product [Aspergillus niger]
  misc_feature (4)..(399): NCBI GI: 256733398 Blast Desc: [Nectria haematococca mpVI 77-13-4]
  misc_feature (4)..(399): NCBI GI: 46127865 Blast Desc: FG08310.1 [Gibberella zeae PH-1]
  misc_feature (3)..(399): NCBI GI: 156066077 Blast Desc: SS1G_01050 [Sclerotinia sclerotiorum 1980] gi|154691908|gb|EDN91646.1| SS1G_01050 [Sclerotinia sclerotiorum 1980]
  misc_feature (3)..(399): NCBI GI: 154294238 Blast Desc: BC1G_13805 [Botryotinia fuckeliana B05.10] gi|150844815|gb|EDN20008.1| BC1G_13805 [Botryotinia fuckeliana B05.10]
  misc_feature (3)..(399): NCBI GI: 242782770 Blast Desc: Methionine synthase, vitamin-B12 independent, [Talaromyces stipitatus ATCC 10500] gi|242782775|ref|XP_002480067.1| Methionine synthase, vitamin-B12
  misc_feature (3)..(399): NCBI GI: 145233081 Blast Desc: An02g07800 [Aspergillus niger] gi|134056838|emb|CAK37743.1| protein product [Aspergillus niger]
  misc_feature (3)..(399): NCBI GI: 115396582 Blast Desc: conserved [Aspergillus terreus NIH2624] gi|114193499|gb|EAU35199.1| conserved [Aspergillus terreus NIH2624]
  misc_feature (3)..(399): NCBI GI: 169770881 Blast Desc: [Aspergillus oryzae RIB40] gi|238486638|ref|XP_002374557.1| Methionine synthase, vitamin-B12 independent, [Aspergillus flavus NRRL3357] protein product flavus
  misc_feature (2)..(399): NCBI GI: 67537698 Blast Desc: AN5019.2 [Aspergillus nidulans FGSC A4] gi|40741907|gb|EAA61097.1| AN5019.2 [Aspergillus nidulans FGSC A4] gi|259482105|tpe|CBF76267.1| TPA: Methionine synthase, FGSC
  misc_feature: Useful for introducing or modulating the production of volatile compounds
MAPPFRNDHIGSLLRPQSLLSARSTLSSPSQMYSLEIPESVKAAQQKAIQEVASLQISKGVRPITDGEYARHIYYGGFFEKLSGFEARPALPIPDAFRTDFPTTTKLRSMGATTRAACVCIGKIEYKESPYLAEWLTLRASLPEELISAAKITLPAPSYQHIQLKPGTAYTAESGYTSDAEYFTDIASCYAAELKTLYDEGVRNIQIDDPHLTYFASSQFLNGCKKDGTNTDELLDLYISVHNQLIKGKPKDLNMGVHLCRGNMAGSVHWVDGSYENIAQKLFHETEYETYYLEFDDVERVGGFEPLRFLPRGKNVVLGLVSTKDATLEDGEKLKEKIYDAARVIAEAQGVSEEEALDCLALSPQCGFSSSSLSGGLGMTEARMWEKLELVKRVADEVWG

SEQ ID NO: 20359 - DNA, 1493 bp, Muscodor strobelii
  misc_feature: SGI EST ID NO. CUFF.47657.0
  misc_feature: Variant of the nucleotide sequence at SEQ ID NO 20357
gctaagttacatatgaagtagtcctcagtagaatatctcaatgccttctctccattcaccgtgaaacattgaaaccactatcacaactcaccacaacaacgcacgttcaaaatggcgcctccctttcgaaacgaccacatcggctcactcttacgtccccaatctctcctctcagcacgtagcactctctcatcaccctctcaaatgtactcattagaaatccccgaatccgtaaaagccgcacaacaaaaagcgatccaagaagtagcctctctccaaatatccaaaggcgtgcggcccatcacagacggagaatacgcacgacacatatactacggtggattcttcgagaagctctcaggtttcgaggctcggcctgcattacctattcctgatgcgtttagaactgatttcccgactactacaaaacttaggtcgatgggcgctacgacgagagcggcctgtgtctgcatcgggaaaatcgagtataaagagtcgccttatctcgccgagtggttgactttacgggcgagtctaccggaggagttgataagtgcagcgaaaattacgcttccggcgccgtcgtatcaacatatccagcttaagccggggactgcatatacagcggagtcaggctatacatccgacgcggaatattttacagacatagcatcttgttacgcagcggaactcaagacattatacgatgagggcgtaaggaacatacagattgacgacccgcatctcacatatttcgcgtcatcacaattcttgaatgggtgcaaaaaggacggcacgaataccgacgagttactggatttatacatttcggtccataatcagctaattaaaggaaaacctaaagatctgaatatgggcgttcatctgtgtcgtggaaatatggcgggaagtgtccattgggttgacgggagctacgagaacatcgcgcagaaactattccacgagacggagtatgagacgtattatctcgagtttgatgatgtggagcgagtaggaggatttgaaccgctacgatttctaccgcgagggaagaacgttgttttgggattggtttcgacgaaagacgcgacgctggaggacggggagaagctgaaggagaagatttatgatgctgcgagggttattgcagaggcgcagggcgttagtgaggaggaagcattggactgtttggcactgagtccgcagtgtggatttagtagtagcagtctttctggagggcttggtatgacggaggcgaggatgtgggagaagttggagcttgttaagagggttgctgatgaggtctggggctaaggggtggagagatggggttactggctcgtgtatataggcgattcttatcaacgagatgcgatgttgctccctcattgatgtataaccactgagcacttacgcttggaaactcccaacagaaatacggtatgtgcaaagataggcccgttacatcgagtcaaatagcagaagctgtcgag

SEQ ID NO: 20360 - DNA, 444 bp, Muscodor strobelii
  misc_feature: SGI cDNA ID NO. 566870
  misc_feature: Reduced expression when VOC is produced
  misc_feature: Encodes the peptide sequence at SEQ ID NO 20361
atgcgtttctccaccgccgccgccgcccttttcggcactctagctgctgccaagccctgccgccgcgacatgaccgaagacgtcaaaatcacagaattctacgttcaccaagctcttgtcaacggaaccacccagggtgtcgtcgacgccgtatccttcattctcaacggcgagaatgcgacggatttggaatgctctgcccagactggctccccatctgaggtcatctcttgcggcgactcgccttactcctttgcgctttaccccggggagagcagcggtgattacacgctgagactctaccatgctttgggcgttggttttggtttctacggagcgggacttgtgcccgtttactgccacgctggtggcggtcccacgatcgtctgtgctcaggtcgctaacgtgactatcactatcgattctctgcctgatgcggagtaa

SEQ ID NO: 20361 - protein, 147 aa, Muscodor strobelii
  misc_feature: SGI Peptide ID NO. 566870
  misc_feature (19)..(146): NCBI GI: 261353727 Blast Desc: conserved [Verticillium albo-atrum VaMs.102]
  misc_feature (26)..(141): NCBI GI: 39970423 Blast Desc: [Magnaporthe grisea 70-15] gi|149209857|ref|XP_001522303.1| MGCH7_ch7g410 [Magnaporthe grisea 70-15] gi|86196365|gb|EAQ71003.1| MGCH7_ch7g410 grisea
  misc_feature (26)..(141): NCBI GI: 46114386 Blast Desc: FG03035.1 [Gibberella zeae PH-1]
  misc_feature (1)..(137): NCBI GI: 116179392 Blast Desc: [Chaetomium globosum CBS 148.51] gi|88184621|gb|EAQ92089.1| [Chaetomium globosum CBS 148.51]
  misc_feature (1)..(136): NCBI GI: 169594938 Blast Desc: SNOG_00200 [Phaeosphaeria nodorum SN15] gi|111070575|gb|EAT91695.1| SNOG_00200 [Phaeosphaeria nodorum SN15]
  misc_feature (23)..(120): NCBI GI: 189202924 Blast Desc: PTRG_07466 [Pyrenophora tritici-repentis Pt-1C-BFP] gi|187984897|gb|EDU50385.1| PTRG_07466 [Pyrenophora tritici-repentis Pt-1C-BFP]
  misc_feature: Useful for introducing or modulating the production of volatile compounds
MRFSTAAAALFGTLAAAKPCRRDMTEDVKITEFYVHQALVNGTTQGVVDAVSFILNGENATDLECSAQTGSPSEVISCGDSPYSFALYPGESSGDYTLRLYHALGVGFGFYGAGLVPVYCHAGGGPTIVCAQVANVTITIDSLPDAE

SEQ ID NO: 20362 - DNA, 996 bp, Muscodor strobelii
  misc_feature: SGI EST ID NO. CUFF.47674.0
  misc_feature: Variant of the nucleotide sequence at SEQ ID NO 20360
ctgacttaatactcgggagaatgcgagagttggattcctttattagatgctcaatggcctcgcttttggattgataaaaacacccacaactaccactcgctggctattcaacactacaatcttccaatctcgaaatcataccgcaaatccacagaaaaatcacgtccaaatccaaaatctcaagatgcgtttctccaccgccgccgccgcccttttcggcactctagctgctgccaagccctgccgccgcgacatgaccgaagacgtcaaaatcacagaattctacgttcaccaagctcttgtcaacggaaccacccagggtgtcgtcgacgccgtatccttcattctcaacggcgagaatgcgacggatttggaatgctctgcccagactggctccccatctgaggtcatctcttgcggcgactcgccttactcctttgcgctttaccccggggagagcagcggtgattacacgctgagactctaccatgctttgggcgttggttttggtttctacggagcgggacttgtgcccgtttactgccacgctggtggcggtcccacgatcgtctgtgctcaggtcgctaacgtgactatcactatcgattctctgcctgatgcggagtaaagtcggtccgtagaggagagcaaatggaagggaggggcagatcaatctgatagccttagatggagtgcttggatactaggaccaatgactctgatgtgggaagaagaggctatgatcgtgcgataataataccatggcactaattccgtgcatatatcggtggtgcccaactaatatcatgacaatatcaacgcaaacaatgatgtatagaaaggtttacaacgggaagaaactgtttcttccatatatagactagtatagacatcaacttgtataacacatcgtgcagatccaggtctagcgatcataaagcctcttctctcctttcattaaaccaagggtttttgagttttacatgcatcccgctg

SEQ ID NO: 20363 - DNA, 1506 bp, Muscodor strobelii
  misc_feature: SGI cDNA ID NO. 566871
  misc_feature: Encodes the peptide sequence at SEQ ID NO 20364
atgagttcctttggcgccaagaggaaagcgcgcaagattacagtccaagacgatgacgaaacagcatcctcagcagagtcactcaacccgccccccgaagagcaagaaccagctctacaacccaccttcagaaccagaaaaccaaaacagtcctcactgcgcaagaccttcactccagacgaggttaagacagacagatcacgcactaaatcagacaaccaagaagaagatggcacctccccagtcctcatccgcccggcattatcaaagtccaaacagcgccaatccaactctcgtctctctttcggtccaagcgccacagcagcagacgatgacgacgacgccatgatcctcggctcggcgcctgcgccctccaaaaagaacaacagtctagccgcttccgcgctggaaaacagcacctacaaacgaggcatgggcaaaaacctgccgctcccaacgcgatcaatggacacaaacgacgacgaccgtccaagatatagcaaagaatacctctctgagctacaatccgcaacgcccaactctcgcgatctatccaaactgaaactcaccgaagaagaaggaggagaaggagcggagatgagtctcgacccctcggaattagagggcgctacgatagtcgacactactgccacacctcgaacagcagtattgacagagtcagaaatacaagagaaaaagaaccgcagagcgaggttagctgcgcagaagggtggcgggaaggactcggaggatttcatatcgcttgacgatgacgatgatgattcgagacaagcgggcgattcatacctcactattctatcccgtcgtggcgacggtgtcacgaaaagcaagaacgacacgcggctcgtggcggaggatgaagatctgggcgaaggatttgatgccttcgttgaagacgatcccctatcacttggccggaaggcggagcgcgaagctaggaggaggaagaaattggacatggagcagcggattcgcgctgctgagggtgcggatagcgatgaagaggggggagatgattccgaagctgaacgattggctgcgtttgaggcggcgcagacgaggaagggcatggatgggttggcggaggagagagcaaatcagaagaggatgttgggcgtcagggaaggcgtggtccccgtcccgcctaggattacgccgttgccggacttgagtctacttgtgcaagcttttaaggagaaggttggtgggaaggagattgagttacggaaggcgagggcaaggattgaggagctgaagagggaaaaggagggcgtggtgaagagggagcctgaggtgcagaagttgttgaatgaggcgggtgagagatatagggcgcttatgatgcctggtggtggtgaggccaagaatggagagacgcacaggacggcgtttgatcagcttagagatggggagacgcctggtgataggggtttggagagccttgggacgacgccgctgaggcagagagtggagatggagttgtga

SEQ ID NO: 20364 - protein, 501 aa, Muscodor strobelii
  misc_feature: SGI Peptide ID NO. 566871
  misc_feature (3)..(489): NCBI GI: 46107750 Blast Desc: FG00758.1 [Gibberella zeae PH-1]
  misc_feature (1)..(494): NCBI GI: 261361362 Blast Desc: conserved [Verticillium albo-atrum VaMs.102]
  misc_feature (4)..(501): NCBI GI: 39941784 Blast Desc: MGG_10741 [Magnaporthe grisea 70-15] gi|145012192|gb|EDJ96848.1| MGG_10741 [Magnaporthe grisea 70-15]
  misc_feature (23)..(499): NCBI GI: 116182942 Blast Desc: CHGG_02099 [Chaetomium globosum CBS 148.51] gi|88186396|gb|EAQ93864.1| CHGG_02099 [Chaetomium globosum CBS 148.51]
  misc_feature (1)..(490): NCBI GI: 171694562 Blast Desc: protein product [Podospora anserina] gi|170947523|emb|CAP59684.1| protein product [Podospora anserina]
  misc_feature (75)..(500): NCBI GI: 212541214 Blast Desc: conserved [Penicillium marneffei ATCC 18224] gi|210068061|gb|EEA22153.1| conserved [Penicillium marneffei ATCC 18224]
  misc_feature (59)..(501): NCBI GI: 242799442 Blast Desc: conserved [Talaromyces stipitatus ATCC 10500] gi|218716724|gb|EED16145.1| conserved [Talaromyces stipitatus ATCC 10500]
  misc_feature (1)..(451): NCBI GI: 85090914 Blast Desc: NCU09879 [Neurospora crassa OR74A] gi|28920024|gb|EAA29410.1| [Neurospora crassa OR74A]
  misc_feature (83)..(489): NCBI GI: 225561937 Blast Desc: conserved [Ajellomyces capsulatus G186AR]
  misc_feature (45)..(493): NCBI GI: 156040263 Blast Desc: SS1G_12148 [Sclerotinia sclerotiorum 1980] gi|154696204|gb|EDN95942.1| SS1G_12148 [Sclerotinia sclerotiorum 1980]
MSSFGAKRKARKITVQDDDETASSAESLNPPPEEQEPALQPTFRTRKPKQSSLRKTFTPDEVKTDRSRTKSDNQEEDGTSPVLIRPALSKSKQRQSNSRLSFGPSATAADDDDDAMILGSAPAPSKKNNSLAASALENSTYKRGMGKNLPLPTRSMDTNDDDRPRYSKEYLSELQSATPNSRDLSKLKLTEEEGGEGAEMSLDPSELEGATIVDTTATPRTAVLTESEIQEKKNRRARLAAQKGGGKDSEDFISLDDDDDDSRQAGDSYLTILSRRGDGVTKSKNDTRLVAEDEDLGEGFDAFVEDDPLSLGRKAEREARRRKKLDMEQRIRAAEGADSDEEGGDDSEAERLAAFEAAQTRKGMDGLAEERANQKRMLGVREGVVPVPPRITPLPDLSLLVQAFKEKVGGKEIELRKARARIEELKREKEGVVKREPEVQKLLNEAGERYRALMMPGGGEAKNGETHRTAFDQLRDGETPGDRGLESLGTTPLRQRVEMEL

SEQ ID NO: 20365 - DNA, 1773 bp, Muscodor strobelii
  misc_feature: SGI EST ID NO. CUFF.47715.0
  misc_feature: Variant of the nucleotide sequence at SEQ ID NO 20363
attgttcccttccgctttgcttggctattggcattttcatgagtaatgggagcctaaagctctgggcccttcaagatgagttcctttggcgccaagaggaaagcgcgcaagattacagtccaagacgatgacgaaacagcatcctcagcagagtcactcaacccgccccccgaagagcaagaaccagctctacaacccaccttcagaaccagaaaaccaaaacagtcctcactgcgcaagaccttcactccagacgaggttaagacagacagatcacgcactaaatcagacaaccaagaagaagatggcacctccccagtcctcatccgcccggcattatcaaagtccaaacagcgccaatccaactctcgtctctctttcggtccaagcgccacagcagcagacgatgacgacgacgccatgatcctcggctcggcgcctgcgccctccaaaaagaacaacagtctagccgcttccgcgctggaaaacagcacctacaaacgaggcatgggcaaaaacctgccgctcccaacgcgatcaatggacacaaacgacgacgaccgtccaagatatagcaaagaatacctctctgagctacaatccgcaacgcccaactctcgcgatctatccaaactgaaactcaccgaagaagaaggaggagaaggagcggagatgagtctcgacccctcggaattagagggcgctacgatagtcgacactactgccacacctcgaacagcagtattgacagagtcagaaatacaagagaaaaagaaccgcagagcgaggttagctgcgcagaagggtggcgggaaggactcggaggatttcatatcgcttgacgatgacgatgatgattcgagacaagcgggcgattcatacctcactattctatcccgtcgtggcgacggtgtcacgaaaagcaagaacgacacgcggctcgtggcggaggatgaagatctgggcgaaggatttgatgccttcgttgaagacgatcccctatcacttggccggaaggcggagcgcgaagctaggaggaggaagaaattggacatggagcagcggattcgcgctgctgagggtgcggatagcgatgaagaggggggagatgattccgaagctgaacgattggctgcgtttgaggcggcgcagacgaggaagggcatggatgggttggcggaggagagagcaaatcagaagaggatgttgggcgtcagggaaggcgtggtccccgtcccgcctaggattacgccgttgccggacttgagtctacttgtgcaagcttttaaggagaaggttggtgggaaggagattgagttacggaaggcgagggcaaggattgaggagctgaagagggaaaaggagggcgtggtgaagagggagcctgaggtgcagaagttgttgaatgaggcgggtgagagatatagggcgcttatgatgcctggtggtggtgaggccaagaatggagagacgcacaggacggcgtttgatcagcttagagatggggagacgcctggtgataggggtttggagagccttgggacgacgccgctgaggcagagagtggagatggagttgtgatgtgatgtttatgatgttaatattgataccccctttttctatgatgtcgatgagcaagagatgaagattgatggtgtggagtatctcttcgcattgacacagagagtacatgtgtgatataaaaattaaaaggcattgcccttgaatcatatcatgtaggtatgtgacttagaacagaatttgaagttcgaa

SEQ ID NO: 20366 - DNA, 246 bp, Muscodor strobelii
  misc_feature: SGI cDNA ID NO. 566872
  misc_feature: Encodes the peptide sequence at SEQ ID NO 20367
atggcgcccgcacagccagaactcaagaagtacctcgacaagagactcttcgtccagctcaacggcagccgcaaggtcataggcgtcctccgaggctacgatgtcttcttgaatatcgttctagacgacgctgtcgaagagaaggacggaggcgagaaggttcgcctcggtatggtcgtcatccgcggtaactcggtcgtcatgctagaagcactcgagagaattggcggtgatcgcgacaaatga

SEQ ID NO: 20367 - protein, 81 aa, Muscodor strobelii
  misc_feature: SGI Peptide ID NO. 566872
  misc_feature (6)..(71): Pfam Id: PF01423 Pfam Desc: LSM domain
  misc_feature (1)..(78): NCBI GI: 85090916 Blast Desc: NCU09880 [Neurospora crassa OR74A] gi|28920025|gb|EAA29411.1| NCU09880 [Neurospora crassa OR74A]
  misc_feature (1)..(78): NCBI GI: 46107748 Blast Desc: FG00757.1 [Gibberella zeae PH-1]
  misc_feature (1)..(78): NCBI GI: 116182940 Blast Desc: conserved [Chaetomium globosum CBS 148.51] gi|88186395|gb|EAQ93863.1| conserved [Chaetomium globosum CBS 148.51]
  misc_feature (1)..(78): NCBI GI: 261361361 Blast Desc: conserved [Verticillium albo-atrum VaMs.102]
  misc_feature (1)..(75): NCBI GI: 171694560 Blast Desc: protein product [Podospora anserina] gi|170947522|emb|CAP59683.1| protein product [Podospora anserina]
  misc_feature (1)..(80): NCBI GI: 154300461 Blast Desc: BC1G_11054 [Botryotinia fuckeliana B05.10] gi|150856579|gb|EDN31771.1| BC1G_11054 [Botryotinia fuckeliana B05.10]
  misc_feature (1)..(80): NCBI GI: 156040265 Blast Desc: SS1G_12149 [Sclerotinia sclerotiorum 1980] gi|154696205|gb|EDN95943.1| SS1G_12149 [Sclerotinia sclerotiorum 1980]
  misc_feature (1)..(76): NCBI GI: 261198058 Blast Desc: [Ajellomyces dermatitidis SLH14081] gi|239595394|gb|EEQ77975.1| [Ajellomyces dermatitidis SLH14081] gi|239607755|gb|EEQ84742.1| [Ajellomyces dermatitidis ER-3]
  misc_feature (1)..(76): NCBI GI: 154283627 Blast Desc: small nuclear ribonucleoprotein SmG [Ajellomyces capsulatus NAm1] gi|150410789|gb|EDN06177.1| small nuclear ribonucleoprotein SmG [Ajellomyces capsulatus NAm1] HCBG_01863
  misc_feature (1)..(76): NCBI GI: 225679289 Blast Desc: conserved [Paracoccidioides brasiliensis Pb03]
MAPAQPELKKYLDKRLFVQLNGSRKVIGVLRGYDVFLNIVLDDAVEEKDGGEKVRLGMVVIRGNSVVMLEALERIGGDRDK

SEQ ID NO: 20368 - DNA, 2475 bp, Muscodor strobelii
  misc_feature: SGI EST ID NO. CUFF.47796.0
  misc_feature: Variant of the nucleotide sequence at SEQ ID NO 20366
cacgaagctcgagcttgaatgtttggacatcgacaacatccagcccgcgccttcctccattttctgtcgcaaaacatcagctccgaaccgttatcacgcagtcgtcaacatggcgcccgcacagccagaactcaagaagtacctcgacaagagactcttcgtccagctcaacggcagccgcaaggtcataggcgtcctccgaggctacgatgtcttcttgaatatcgttctagacgacgctgtcgaagagaaggacggaggcgagaaggttcgcctcggtatggtcgtcatccgcggtaactcggtcgtcatgctagaagcactcgagagaattggcggtgatcgcgacaaatgatcggtctccacgatggatcagaggaattttatgatgctgggacgcgttgatatccataccctatgactagtaaagaagttggctggcatgggataattgtagatttggcgttccggcaaatgggctaaaataggatcaagacgactgcagcatggcatactcggaaattatgattaggagccgagaagcaactatcgagaacacagatcgaggattgttgtgatggctccgattgtgctccagcaagtttggagacctagcatgaagcagcctgcagaggaaattgctccgtatcacaaagagtcccggatatctctagtccgtatgtgatgagggcgttctgcccttcgattctctggcaaaatcaacgagttcatgcggtcctcttttcattacaaaagtgctaaacaacaagccaagtgacgagaaaactgatagtagtgttatgcatggtatttgattcgacacctgttctaccggaataaacaaacaagaaaagtgaatatgctttgatcaccaagtcctggaaatcatatctacccgacccatgccgtaaagctctctcttccccctatttgcatttgtatcgatacatattgatacacgagaattacccgtcgtgagagtaatcagaccttcagtcgcgaattacccatttcctctgagcgaagcagtcagtgcgcgaaaatacacatataagttccgctctcgtctcttctaccaagcctgagcggaagaacgcatccatccagcctaaatctcctacttcgatctgctcacaccagccccaatgacgcccggcaacttctcctcgcccacactgaacagcagcccgatagcaaacgcaatggtgagaacgagggtgatggtgacgccggcaaacagccaaaagggcgtgcttacatcgcgcttctggcagatctggccgccccatcggtgcacggcgacccggcctcccttgtcgttctcgtcaaacgtcatcttgcaggagcaggagaagcacgagttctcgctctcgtaccacttgtcggtgcaccagccgtggccgctgcagttggccgtcgcgttcatgcactcgtccttgtccttgaagcaggcggggatgggcgtgtgcttgcccttcttgagtccgctatagacgggagtggtgtcgtgggtgctctcgaggaaggtcgggtgagctgcttcggcctcggtctcggtcatgaccttttcctcctggcgcttcgtgaaagctgttcgaggcgcgcgaggcgcgctaggatcaaggaaaagaatggtggtctccatttcgccagtcttggcgagggaccggagggttgcgaagttggtggtcaggtcgttgattacctggctattctgtagtgatgttagataagagtgtttcgcataattctgcatggaggaagagtcctacctttgatacatcgtagtgaagatactgggtctttccggaccagcactctgtttccttagggtcgatggagcgcgcaaactggcattttgtgatctgcttagcgggtacactgtggaggccaggggcggtgaatgcgacgggcacggagggtatggcggccgtaagctgtttataatggggcgatttgatgccggagaaggctatgacgagctgtcgaggctcggcagagagcgattcttggaacagaggctgcgagggcacgccgaactgggatatataggagatggcatcttcgacatcgagatcgtcgggcagatgaccgagggcggaagggcggtctgatgagctcaggcgctggagtagaatggcttcagccagagactctggtatggatggccgtttggatgatgatgacaatgactgcgaggtggactgtgtgatgatgtaggcttcggcatgctgcggcactgcgtcggcggcggcgacggtggccaacgccggcagcaggaagctgttcagcttcatcgcgggcaaatggcgggtcgacctcgatacgatggtattgcggttgtcgaggggtgagcaggttgatggttggacgctgcttaatttcaagatcaagatagtgtgaaagtggatggacttgctaagaagcacatgggaccaggaggagctctcatcatcgtctagctacatacacgtg

SEQ ID NO: 20369 - DNA, 1122 bp, Muscodor strobelii
  misc_feature: SGI cDNA ID NO. 566873
  misc_feature: Reduced expression when VOC is produced
  misc_feature: Encodes the peptide sequence at SEQ ID NO 20370
atgaagctgaacagcttcctgctgccggcgttggccaccgtcgccgccgccgacgcagtgccgcagcatgccgaagcctacatcatcacacagtccacctcgcagtcattgtcatcatcatccaaacggccatccataccagagtctctggctgaagccattctactccagcgcctgagctcatcagaccgcccttccgccctcggtcatctgcccgacgatctcgatgtcgaagatgccatctcctatatatcccagttcggcgtgccctcgcagcctctgttccaagaatcgctctctgccgagcctcgacagctcgtcatagccttctccggcatcaaatcgccccattataaacagcttacggccgccataccctccgtgcccgtcgcattcaccgcccctggcctccacagtgtacccgctaagcagatcacaaaatgccagtttgcgcgctccatcgaccctaaggaaacagagtgctggtccggaaagacccagtatcttcactacgatgtatcaaagaatagccaggtaatcaacgacctgaccaccaacttcgcaaccctccggtccctcgccaagactggcgaaatggagaccaccattcttttccttgatcctagcgcgcctcgcgcgcctcgaacagctttcacgaagcgccaggaggaaaaggtcatgaccgagaccgaggccgaagcagctcacccgaccttcctcgagagcacccacgacaccactcccgtctatagcggactcaagaagggcaagcacacgcccatccccgcctgcttcaaggacaaggacgagtgcatgaacgcgacggccaactgcagcggccacggctggtgcaccgacaagtggtacgagagcgagaactcgtgcttctcctgctcctgcaagatgacgtttgacgagaacgacaagggaggccgggtcgccgtgcaccgatggggcggccagatctgccagaagcgcgatgtaagcacgcccttttggctgtttgccggcgtcaccatcaccctcgttctcaccattgcgtttgctatcgggctgctgttcagtgtgggcgaggagaagttgccgggcgtcattggggctggtgtgagcagatcgaagtag

SEQ ID NO: 20370 - protein, 373 aa, Muscodor strobelii
  misc_feature: SGI Peptide ID NO. 566873
  misc_feature (3)..(373): NCBI GI: 261361363 Blast Desc: conserved [Verticillium albo-atrum VaMs.102]
  misc_feature (22)..(371): NCBI GI: 171694564 Blast Desc: protein product [Podospora anserina] gi|170947524|emb|CAP59685.1| protein product [Podospora anserina]
  misc_feature (5)..(372): NCBI GI: 145604122 Blast Desc: MGG_10742 [Magnaporthe grisea 70-15] gi|145012193|gb|EDJ96849.1| MGG_10742 [Magnaporthe grisea 70-15]
  misc_feature (29)..(371): NCBI GI: 85090912 Blast Desc: NCU09878 [Neurospora crassa OR74A] gi|28920023|gb|EAA29409.1| [Neurospora crassa OR74A]
  misc_feature (51)..(373): NCBI GI: 256734776 Blast Desc: NECHADRAFT_57655 [Nectria haematococca mpVI 77-13-4]
  misc_feature (45)..(373): NCBI GI: 46107742 Blast Desc: FG00754.1 [Gibberella zeae PH-1]
  misc_feature (22)..(373): NCBI GI: 116182944 Blast Desc: CHGG_02100 [Chaetomium globosum CBS 148.51] gi|88186397|gb|EAQ93865.1| CHGG_02100 [Chaetomium globosum CBS 148.51]
  misc_feature (1)..(373): NCBI GI: 156040297 Blast Desc: SS1G_12165 [Sclerotinia sclerotiorum 1980] gi|154696221|gb|EDN95959.1| SS1G_12165 [Sclerotinia sclerotiorum 1980]
  misc_feature (1)..(373): NCBI GI: 154300429 Blast Desc: BC1G_11038 [Botryotinia fuckeliana B05.10] gi|150856563|gb|EDN31755.1| BC1G_11038 [Botryotinia fuckeliana B05.10]
  misc_feature (8)..(373): NCBI GI: 226281648 Blast Desc: conserved [Paracoccidioides brasiliensis Pb01]
  misc_feature: Useful for introducing or modulating the production of volatile compounds
MKLNSFLLPALATVAAADAVPQHAEAYIITQSTSQSLSSSSKRPSIPESLAEAILLQRLSSSDRPSALGHLPDDLDVEDAISYISQFGVPSQPLFQESLSAEPRQLVIAFSGIKSPHYKQLTAAIPSVPVAFTAPGLHSVPAKQITKCQFARSIDPKETECWSGKTQYLHYDVSKNSQVINDLTTNFATLRSLAKTGEMETTILFLDPSAPRAPRTAFTKRQEEKVMTETEAEAAHPTFLESTHDTTPVYSGLKKGKHTPIPACFKDKDECMNATANCSGHGWCTDKWYESENSCFSCSCKMTFDENDKGGRVAVHRWGGQICQKRDVSTPFWLFAGVTITLVLTIAFAIGLLFSVGEEKLPGVIGAGVSRSK

SEQ ID NO: 20371 - DNA, 2128 bp, Muscodor strobelii
  misc_feature: SGI EST ID NO. CUFF.47797.1
  misc_feature: Variant of the nucleotide sequence at SEQ ID NO 20369
cacgtgtatgtagctagacgatgatgagagctcctcctggtcccatgtgcttcttagcaagtccatccactttcacactatcttgatcttgaaattaagcagcgtccaaccatcaacctgctcacccctcgacaaccgcaataccatcgtatcgaggtcgacccgccatttgcccgcgatgaagctgaacagcttcctgctgccggcgttggccaccgtcgccgccgccgacgcagtgccgcagcatgccgaagcctacatcatcacacagtccacctcgcagtcattgtcatcatcatccaaacggccatccataccagagtctctggctgaagccattctactccagcgcctgagctcatcagaccgcccttccgccctcggtcatctgcccgacgatctcgatgtcgaagatgccatctcctatatatcccagttcggcgtgccctcgcagcctctgttccaagaatcgctctctgccgagcctcgacagctcgtcatagccttctccggcatcaaatcgccccattataaacagcttacggccgccataccctccgtgcccgtcgcattcaccgcccctggcctccacagtgtacccgctaagcagatcacaaaatgccagtttgcgcgctccatcgaccctaaggaaacagagtgctggtccggaaagacccagtatcttcactacgatgtatcaaagaatagccaggtaatcaacgacctgaccaccaacttcgcaaccctccggtccctcgccaagactggcgaaatggagaccaccattcttttccttgatcctagcgcgcctcgcgcgcctcgaacagctttcacgaagcgccaggaggaaaaggtcatgaccgagaccgaggccgaagcagctcacccgaccttcctcgagagcacccacgacaccactcccgtctatagcggactcaagaagggcaagcacacgcccatccccgcctgcttcaaggacaaggacgagtgcatgaacgcgacggccaactgcagcggccacggctggtgcaccgacaagtggtacgagagcgagaactcgtgcttctcctgctcctgcaagatgacgtttgacgagaacgacaagggaggccgggtcgccgtgcaccgatggggcggccagatctgccagaagcgcgatgtaagcacgcccttttggctgtttgccggcgtcaccatcaccctcgttctcaccattgcgtttgctatcgggctgctgttcagtgtgggcgaggagaagttgccgggcgtcattggggctggtgtgagcagatcgaagtaggagatttaggctggatggatgcgttcttccgctcaggcttggtagaagagacgagagcggaacttatatgtgtattttcgcgcactgactgcttcgctcagaggaaatgggtaattcgcgactgaaggtctgattactctcacgacgggtaattctcgtgtatcaatatgtatcgatacaaatgcaaatagggggaagagagagctttacggcatgggtcgggtagatatgatttccaggacttggtgatcaaagcatattcacttttcttgtttgtttattccggtagaacaggtgtcgaatcaaataccatgcataacactactatcagttttctcgtcacttggcttgttgtttagcacttttgtaatgaaaagaggaccgcatgaactcgttgattttgccagagaatcgaagggcagaacgccctcatcacatacggactagagatatccgggactctttgtgatacggagcaatttcctctgcaggctgcttcatgctaggtctccaaacttgctggagcacaatcggagccatcacaacaatcctcgatctgtgttctcgatagttgcttctcggctcctaatcataatttccgagtatgccatgctgcagtcgtcttgatcctattttagcccatttgccggaacgccaaatctacaattatcccatgccagccaacttctttactagtcatagggtatggatatcaacgcgtcccagcatcataaaattcctctgatccatcgtggagaccgatcatttgtcgcgatcaccgccaattctctcgagtgcttctagcatgacgaccgagttaccgcggat

SEQ ID NO: 20372 - DNA, 1245 bp, Muscodor strobelii
  misc_feature: SGI cDNA ID NO. 566874
  misc_feature: Reduced expression when VOC is produced
  misc_feature: Encodes the peptide sequence at SEQ ID NO 20373
atgttacgctacttgcggtcgcctaggcttctctccctcgccaggcgatcccagagttctcagtctgccggtccccagacgatccggctgcaacgagtcaagttccacaagcccttcagcgcaaaaaatttcctggttgctgccgggatctactacctctgctacgagacttacacctacttaatacttggcaagctcgatgctgccgccgatgctttggaggccgaggctgcccgcctcccaccacccaagggctcgacgaaggcgcagtcggaagatgacgaagaagacgaggatgacgaggacgagcttgctggtgatgtagagttactatatttcccctttcccggcaccaccgagtcccacgagcccaagccttaccgaggaaccgaccccgagtggcagacttttgtcaagatcagcaaagataaatcccttaaggactcgattatgcacaaacttgctgagcggtgttgttaccatcctgtggttaaaggcatgcaaggtgtccgttggcaatggcaggctctccaaatatcctatccctataagccaccaccagtattcacgcgatggggattatccatcggtacgggaagtatagcactggtacaacataccgtcgatccgctcgtggtcactcgcatggccaaaacgctctggccgtcggccgtaacacagtcggtatggagcttttcctccacgctggtcacacagaatgccatgaccatggccaaattgcttggatacgacacgaaaacgaacgagcaaagggcaatcgagaacatgcaacaggccatcaagtcccagactggtcagtccagctctcaggtaccgccctctataccgaatggtcccacgggctccgcgctgtccacattggacaaaagggcaactgggacgacgaccacgccggacacagcgggggcaccggccggtgttaggggtgccgattcatcgatgcccaaggccgaggagatttacaagctagaaaagaagcacatctcagggcctatgcaggccttcgggaagacactgcagaagacttggagacatgctggtacttacccgcctcgaggcgccatcttcgtgggcggtttggtctcagtcgagacttcacgtgcgtttattgtatttgattgccgtgcctggtgggacccgaaaacaaaggagttcgtcgatagggcggtatcgatacaacctcgatcggtccatcccagaacccaggctcctctgcgtaagtaa

SEQ ID NO: 20373 - protein, 414 aa, Muscodor strobelii
  misc_feature: SGI Peptide ID NO. 566874
  misc_feature (1)..(411): NCBI GI: 261361365 Blast Desc: conserved [Verticillium albo-atrum VaMs.102]
  misc_feature (1)..(412): NCBI GI: 154300431 Blast Desc: BC1G_11039 [Botryotinia fuckeliana B05.10] gi|150856564|gb|EDN31756.1| BC1G_11039 [Botryotinia fuckeliana B05.10]
  misc_feature (31)..(412): NCBI GI: 156040295 Blast Desc: SS1G_12164 [Sclerotinia sclerotiorum 1980] gi|154696220|gb|EDN95958.1| SS1G_12164 [Sclerotinia sclerotiorum 1980]
  misc_feature (101)..(413): NCBI GI: 171694566 Blast Desc: protein product [Podospora anserina] gi|170947525|emb|CAP59686.1| protein product [Podospora anserina]
  misc_feature (45)..(393): NCBI GI: 256735490 Blast Desc: NECHADRAFT_98971 [Nectria haematococca mpVI 77-13-4]
  misc_feature (50)..(405): NCBI GI: 46107740 Blast Desc: FG00753.1 [Gibberella zeae PH-1]
  misc_feature (3)..(406): NCBI GI: 85090910 Blast Desc: NCU09877 [Neurospora crassa OR74A] gi|28920022|gb|EAA29408.1| [Neurospora crassa OR74A]
  misc_feature (132)..(409): NCBI GI: 116182946 Blast Desc: CHGG_02101 [Chaetomium globosum CBS 148.51] gi|88186398|gb|EAQ93866.1| CHGG_02101 [Chaetomium globosum CBS 148.51]
  misc_feature (4)..(414): NCBI GI: 238845284 Blast Desc: conserved [Microsporum canis CBS 113480]
  misc_feature (14)..(388): NCBI GI: 189203723 Blast Desc: [Pyrenophora tritici-repentis Pt-1C-BFP] gi|187985296|gb|EDU50784.1| [Pyrenophora tritici-repentis Pt-1C-BFP]
  misc_feature: Useful for introducing or modulating the production of volatile compounds
MLRYLRSPRLLSLARRSQSSQSAGPQTIRLQRVKFHKPFSAKNFLVAAGIYYLCYETYTYLILGKLDAAADALEAEAARLPPPKGSTKAQSEDDEEDEDDEDELAGDVELLYFPFPGTTESHEPKPYRGTDPEWQTFVKISKDKSLKDSIMHKLAERCCYHPVVKGMQGVRWQWQALQISYPYKPPPVFTRWGLSIGTGSIALVQHTVDPLVVTRMAKTLWPSAVTQSVWSFSSTLVTQNAMTMAKLLGYDTKTNEQRAIENMQQAIKSQTGQSSSQVPPSIPNGPTGSALSTLDKRATGTTTTPDTAGAPAGVRGADSSMPKAEEIYKLEKKHISGPMQAFGKTLQKTWRHAGTYPPRGAIFVGGLVSVETSRAFIVFDCRAWWDPKTKEFVDRAVSIQPRSVHPRTQAPLRK

SEQ ID NO: 20374 - DNA, 2146 bp, Muscodor strobelii
  misc_feature: SGI EST ID NO. CUFF.47767.1
  misc_feature: Variant of the nucleotide sequence at SEQ ID NO 20372
caagccagctgttggcgctatcgccgttactcagctgcctgtctcgcaattttgtaccgccttccatctgcaactacagcttcgacgacgcccctactacgcttcctcgacttctctatacattataagcacttacctaatgactctacacacttattcggccttaactgctcaagttgcactgcgatattctaggtttgcgccgactgcccaccgaaccattaatctcaaacaactgtttctacccagacagcatctttctaccctcttgcatccgcccaaaattattttgcgccgcccacgcgacaataccacatcggagacggttcttgccaacgacgacttcattcttagcctttcttgcgccgcttacgcccgctgaactcggcgccccgttcttttcgatccgtcttccggctgtccagtgtcccgtttctttttgcgtctgagtgcaacttgaactgttgagcgacgacgaccctctctcactctccggccgccggcttccggcgtgccttctcctctgtccgtcatgttacgctacttgcggtcgcctaggcttctctccctcgccaggcgatcccagagttctcagtctgccggtccccagacgatccggctgcaacgagtcaagttccacaagcccttcagcgcaaaaaatttcctggttgctgccgggatctactacctctgctacgagacttacacctacttaatacttggcaagctcgatgctgccgccgatgctttggaggccgaggctgcccgcctcccaccacccaagggctcgacgaaggcgcagtcggaagatgacgaagaagacgaggatgacgaggacgagcttgctggtgatgtagagttactatatttcccctttcccggcaccaccgagtcccacgagcccaagccttaccgaggaaccgaccccgagtggcagacttttgtcaagatcagcaaagataaatcccttaaggactcgattatgcacaaacttgctgagcggtgttgttaccatcctgtggttaaaggcatgcaaggtgtccgttggcaatggcaggctctccaaatatcctatccctataagccaccaccagtattcacgcgatggggattatccatcggtacgggaagtatagcactggtacaacataccgtcgatccgctcgtggtcactcgcatggccaaaacgctctggccgtcggccgtaacacagtcggtatggagcttttcctccacgctggtcacacagaatgccatgaccatggccaaattgcttggatacgacacgaaaacgaacgagcaaagggcaatcgagaacatgcaacaggccatcaagtcccagactggtcagtccagctctcaggtaccgccctctataccgaatggtcccacgggctccgcgctgtccacattggacaaaagggcaactgggacgacgaccacgccggacacagcgggggcaccggccggtgttaggggtgccgattcatcgatgcccaaggccgaggagatttacaagctagaaaagaagcacatctcagggcctatgcaggccttcgggaagacactgcagaagacttggagacatgctggtacttacccgcctcgaggcgccatcttcgtgggcggtttggtctcagtcgagacttcacgtgcgtttattgtatttgattgccgtgcctggtgggacccgaaaacaaaggagttcgtcgatagggcggtatcgatacaacctcgatcggtccatcccagaacccaggctcctctgcgtaagtaaagtggggccggtgtctcgggggattatatgatacggtataggataaatcttcaacgagcatagcgttggaacttggtataagactctattggcgttgcggtgaaattggtatcacgggggaaatgcatggctcaggcgtggatgtgcgttacacagtgaaacatcttttcactctcataggaattcagtgtgttacttcggctttataaatattggtcaactttagcgtgcgagatcgagagataccaatcaacggccacatactcgcggctggaggatagataccacgatagagaggaatttgacaagaggaaaccgattcttcgtcatattttatcatgaatgcctccagcttttctagggtgttaa

SEQ ID NO: 20375 - DNA, 453 bp, Muscodor strobelii
  misc_feature: SGI cDNA ID NO. 566875
  misc_feature: Encodes the peptide sequence at SEQ ID NO 20376
atgtctcgaacaatcctcttgataaacggcccaaatataaacctgttaggcacacgagagccgcacatctacggcagcacgaagttaacggacgtagtggaagccggcgaagcgcaagcgaaggacttgggtgtaacacttcaccatttccagtcgaaccatgagggcgcaatcatcgaccgaattcaggagggacggggaaatgtggacgccattatcatcaaccccgccggattcacacacacaagcgtcgcgatccgagacgcacttcttggcgttgacattccgttcgtcgaactccacgtcagcaacgtgcatgcgcgcgagccatggcgccatcatagttatttctctgataaggcggtggcggtcatttgcggacttggtgtctatgggtatacggctgcactggaatttgccgccaaacatatgaagatcaaggagaagtcttga

SEQ ID NO: 20376 - protein, 150 aa, Muscodor strobelii
  misc_feature: SGI Peptide ID NO. 566875
  misc_feature (3)..(146): Pfam Id: PF01220 Pfam Desc: Dehydroquinase class II
  misc_feature (1)..(149): NCBI GI: 261359970 Blast Desc: catabolic 3-dehydroquinase [Verticillium albo-atrum VaMs.102]
  misc_feature (1)..(145): NCBI GI: 121701699 Blast Desc: 3-dehydroquinate dehydratase QutE [Aspergillus clavatus NRRL 1] gi|119397257|gb|EAW07688.1| 3-dehydroquinate dehydratase QutE [Aspergillus clavatus NRRL 1]
  misc_feature (1)..(149): NCBI GI: 238498270 Blast Desc: 3-dehydroquinate dehydratase QutE [Aspergillus flavus NRRL3357] gi|220693644|gb|EED49989.1| 3-dehydroquinate dehydratase QutE [Aspergillus flavus NRRL3357]
  misc_feature (1)..(150): NCBI GI: 115491623 Blast Desc: catabolic 3-dehydroquinase [Aspergillus terreus NIH2624] gi|114197299|gb|EAU38999.1| catabolic 3-dehydroquinase [Aspergillus terreus NIH2624]
  misc_feature (1)..(150): NCBI GI: 70995544 Blast Desc: 3-dehydroquinate dehydratase QutE [Aspergillus fumigatus Af293] gi|41581237|emb|CAE47886.1| catabolic 3-dehydroquinase, [Aspergillus fumigatus] 3-dehydroquinate QutE
  misc_feature (1)..(145): NCBI GI: 119495640 Blast Desc: 3-dehydroquinate dehydratase QutE [Neosartorya fischeri NRRL 181] gi|119412762|gb|EAW22703.1| 3-dehydroquinate dehydratase QutE [Neosartorya fischeri NRRL 181]
  misc_feature (1)..(149): NCBI GI: 67517929 Blast Desc: 3DHQ_EMENI Catabolic 3-dehydroquinase (3-dehydroquinate dehydratase) [Aspergillus nidulans FGSC A4] gi|146345352|sp|P05147.3|3DHQ_EMENI RecName: Full=Catabolic FGSC
  misc_feature (1)..(147): NCBI GI: 169616536 Blast Desc: SNOG_11441 [Phaeosphaeria nodorum SN15] gi|111060029|gb|EAT81149.1| SNOG_11441 [Phaeosphaeria nodorum SN15]
  misc_feature (1)..(149): NCBI GI: 2402 Blast Desc: catabolic 3-dehydro-quinase [Emericella nidulans]
  misc_feature (1)..(150): NCBI GI: 256726689 Blast Desc: [Nectria haematococca mpVI 77-13-4]
  misc_feature (18)..(149): SWISSPROT Homolog: EC 4.2.1.10 3-dehydroquinate dehydratase
MSRTILLINGPNINLLGTREPHIYGSTKLTDVVEAGEAQAKDLGVTLHHFQSNHEGAIIDRIQEGRGNVDAIIINPAGFTHTSVAIRDALLGVDIPFVELHVSNVHAREPWRHHSYFSDKAVAVICGLGVYGYTAALEFAAKHMKIKEKS

SEQ ID NO: 20377 - DNA, 1030 bp, Muscodor strobelii
  misc_feature: SGI EST ID NO. CUFF.47694.0
  misc_feature: Variant of the nucleotide sequence at SEQ ID NO 20375
gcagaaggtaccttgtcatgctctaattttaggcataattgtgaaggcaatagtcaatgttgaattcatgtgttcggttcaatcttcaccccagattccatctgccctgctcaatgcggaggtggtggtggggtttcgatcaagctattttgtaggtagggtcatggtttgtccggtcggaacagtcaagtgcctggtagctgagttatatccaactcagttcatcttacgaaaccccatcaccaatctcagtgtttaaatttcataaccgctcttttctcttttctcaaacggatagatattccaccgctgaatcgctcctttctacaattgccatcaacaacatcgaaagcacaatgtctcgaacaatcctcttgataaacggcccaaatataaacctgttaggcacacgagagccgcacatctacggcagcacgaagttaacggacgtagtggaagccggcgaagcgcaagcgaaggacttgggtgtaacacttcaccatttccagtcgaaccatgagggcgcaatcatcgaccgaattcaggagggacggggaaatgtggacgccattatcatcaaccccgccggattcacacacacaagcgtcgcgatccgagacgcacttcttggcgttgacattccgttcgtcgaactccacgtcagcaacgtgcatgcgcgcgagccatggcgccatcatagttatttctctgataaggcggtggcggtcatttgcggacttggtgtctatgggtatacggctgcactggaatttgccgccaaacatatgaagatcaaggagaagtcttgaactggtataacacggatctgcggcggacaagaagaggttcaaaccgagaccgagctacagagtcacttgagaattggaatggttcagtcaatataaataagcctacactgttacttctccctccagcaaatctaatattaacgtgtcatcgatggcccttcatcttcgagtttgggacggcatttacgactagacccagcatttgttcaaccaaaagcgca

SEQ ID NO: 20378 - DNA, 1140 bp, Muscodor strobelii
  misc_feature: SGI cDNA ID NO. 566876
  misc_feature: Elevated expression when VOC is produced
  misc_feature: Encodes the peptide sequence at SEQ ID NO 20379
atggctacgacgaaggtgactattcctgggcggaacttcgtgtcctaccctcttgtgagcttggtttacaagcttgccatcttcaccaccattgccgctcgtctaccactgtgggttttacagtcgatcttccggcgatggagacagaatcctcgatggacatttaaacaggccctgttggtcaggatcgtgactccttcgttacgtatgtcgtgccgtacagagacagctcagccgctgagcctgaagcctggcaaagaaaaggaacaatttgctctcatgcagccattctctcctgaggtttaccgcggacctttggagagttcgaaagttattcccgaagtcattggcggtacgtggtatccagagaagcctgccgatgctaaagccgtgggtactataatcatgcatctccacggtggtgctttcgtccttggcgatggccgtatcgaagccactggcgcaaccgcaaagctgttcaaagagcatgcaaagctaaatacgtcctttttccctcagtaccggcttgctagccgaccgacttctgccccgttccctgcagcactgcaagatgcgttgacgagttatttatatctcgtgcggacacttggagtctcaccacaaaacatcgtgttgtctggagatagcgctggcgccaacctcgtcattggcctcctgagatacatcggcgaatatggcgagaagctggatctgccgcagccaaaagccgcagtcgttgtctcgccttggctagcacctgtgaagcacttgtggcccgatattacgatatcaagcaatcctcactacaaaacggattatctcggaatcgagctttgtcgatggggcgcaaaagcatatgcgcgagatgtctctccctcgagcccatggatttctccactagactattcttttgctacgccggtgcctgtcttgtgcacagttggaaccgcggagtggctggagattgatgccactcagtggacacgcgaaatgagtcgcatcgagggaaattcaatcgagaccttttatgagcctgacgctatccatgacacactacttgccggccacatgatgggatttgagaaaagttcggaggaggtggctcgaagaattggtgtttttgttaggcagcatatgtga

SEQ ID NO: 20379 - protein, 379 aa, Muscodor strobelii
  misc_feature: SGI Peptide ID NO. 566876
  misc_feature (135)..(353): Pfam Id: PF07859 Pfam Desc: alpha/beta hydrolase fold
  misc_feature (183)..(320): Pfam Id: PF07859 Pfam Desc: alpha/beta hydrolase fold
  misc_feature (16)..(378): NCBI GI: 189201383 Blast Desc: alpha/beta hydrolase fold-3 domain containing protein [Pyrenophora tritici-repentis Pt-1C-BFP] gi|187984127|gb|EDU49615.1| alpha/beta hydrolase fold-3 domain
  misc_feature (16)..(376): NCBI GI: 169619948 Blast Desc: SNOG_13174 [Phaeosphaeria nodorum SN15] gi|111058381|gb|EAT79501.1| SNOG_13174 [Phaeosphaeria nodorum SN15]
  misc_feature (13)..(374): NCBI GI: 154299472 Blast Desc: BC1G_10998 [Botryotinia fuckeliana B05.10] gi|150857340|gb|EDN32532.1| BC1G_10998 [Botryotinia fuckeliana B05.10]
  misc_feature (30)..(375): NCBI GI: 255946570 Blast Desc: Pc22g00020 [Penicillium chrysogenum Wisconsin 54-1255] gi|211591069|emb|CAP97290.1| Pc22g00020 [Penicillium chrysogenum Wisconsin 54-1255]
  misc_feature (46)..(377): NCBI GI: 145231321 Blast Desc: An02g00070 [Aspergillus niger] gi|134056047|emb|CAK96222.1| protein product [Aspergillus niger]
  misc_feature (22)..(374): NCBI GI: 156042101 Blast Desc: SS1G_11601 [Sclerotinia sclerotiorum 1980] gi|154695984|gb|EDN95722.1| SS1G_11601 [Sclerotinia sclerotiorum 1980]
  misc_feature (22)..(377): NCBI GI: 154299871 Blast Desc: BC1G_10826 [Botryotinia fuckeliana B05.10] gi|150857106|gb|EDN32298.1| BC1G_10826 [Botryotinia fuckeliana B05.10]
  misc_feature (36)..(375): NCBI GI: 255953197 Blast Desc: Pc21g02870 [Penicillium chrysogenum Wisconsin 54-1255] gi|211589062|emb|CAP95184.1| Pc21g02870 [Penicillium chrysogenum Wisconsin 54-1255]
  misc_feature (48)..(360): NCBI GI: 256721227 Blast Desc: NECHADRAFT_34839 [Nectria haematococca mpVI 77-13-4]
  misc_feature (18)..(374): NCBI GI: 116200945 Blast Desc: CHGG_08357 [Chaetomium globosum CBS 148.51] gi|88176875|gb|EAQ84343.1| CHGG_08357 [Chaetomium globosum CBS 148.51]
  misc_feature: Useful for introducing or modulating the production of volatile compounds
MATTKVTIPGRNFVSYPLVSLVYKLAIFTTIAARLPLWVLQSIFRRWRQNPRWTFKQALLVRIVTPSLRMSCRTETAQPLSLKPGKEKEQFALMQPFSPEVYRGPLESSKVIPEVIGGTWYPEKPADAKAVGTIIMHLHGGAFVLGDGRIEATGATAKLFKEHAKLNTSFFPQYRLASRPTSAPFPAALQDALTSYLYLVRTLGVSPQNIVLSGDSAGANLVIGLLRYIGEYGEKLDLPQPKAAVVVSPWLAPVKHLWPDITISSNPHYKTDYLGIELCRWGAKAYARDVSPSSPWISPLDYSFATPVPVLCTVGTAEWLEIDATQWTREMSRIEGNSIETFYEPDAIHDTLLAGHMMGFEKSSEEVARRIGVFVRQHM

SEQ ID NO: 20380 - DNA, 1719 bp, Muscodor strobelii
  misc_feature: SGI EST ID NO. CUFF.47697.0
  misc_feature: Variant of the nucleotide sequence at SEQ ID NO 20378
gaaaaacgaccctagaaagacggtggccttttaccccaagctattgtaccccggaaaaccaactccaccgaacttaagggaccagggatgtggcgatcttatactcataaagatgtcttgggaggtggggtggtttaactttggagagcctcggtatcgcgtcctgtgcataccaccttgaatgcgacagggtgtactggcaggcgtacaggcccgttgctcaaacgccgccttggcgacacgaaccggcaatctcagcttccccgaagcaactgttcacacagcccttctcctcatctacgcattgtaccttgctgaagtcgtctcgaccaatccaatttttgtctaatacgcatttgcctttatttcgagttgcgctgaagctgtctcaaagcaaggaagttgatggttgtcgattaacattgtattggctctcgctaccttcgatgagtttcatcctggtcgtatcttaatactcgtgtctgaatcaatattcgccagtcgcaacaacaatggctacgacgaaggtgactattcctgggcggaacttcgtgtcctaccctcttgtgagcttggtttacaagcttgccatcttcaccaccattgccgctcgtctaccactgtgggttttacagtcgatcttccggcgatggagacagaatcctcgatggacatttaaacaggccctgttggtcaggatcgtgactccttcgttacgtatgtcgtgccgtacagagacagctcagccgctgagcctgaagcctggcaaagaaaaggaacaatttgctctcatgcagccattctctcctgaggtttaccgcggacctttggagagttcgaaagttattcccgaagtcattggcggtacgtggtatccagagaagcctgccgatgctaaagccgtgggtactataatcatgcatctccacggtggtgctttcgtccttggcgatggccgtatcgaagccactggcgcaaccgcaaagctgttcaaagagcatgcaaagctaaatacgtcctttttccctcagtaccggcttgctagccgaccgacttctgccccgttccctgcagcactgcaagatgcgttgacgagttatttatatctcgtgcggacacttggagtctcaccacaaaacatcgtgttgtctggagatagcgctggcgccaacctcgtcattggcctcctgagatacatcggcgaatatggcgagaagctggatctgccgcagccaaaagccgcagtcgttgtctcgccttggctagcacctgtgaagcacttgtggcccgatattacgatatcaagcaatcctcactacaaaacggattatctcggaatcgagctttgtcgatggggcgcaaaagcatatgcgcgagatgtctctccctcgagcccatggatttctccactagactattcttttgctacgccggtgcctgtcttgtgcacagttggaaccgcggagtggctggagattgatgccactcagtggacacgcgaaatgagtcgcatcgagggaaattcaatcgagaccttttatgagcctgacgctatccatgacacactacttgccggccacatgatgggatttgagaaaagttcggaggaggtggctcgaagaattggtgtttttgttaggcagcatatgtgaaggatgtaagactgtcatcgacagtttgagaatcgataagtatgtattcaagcatcgatttcccagt

SEQ ID NO: 20381 - DNA, 687 bp, Muscodor strobelii
  misc_feature: SGI cDNA ID NO. 566877
  misc_feature: Encodes the peptide sequence at SEQ ID NO 20382
atggcggacgtatttcgaccggcattgatcgtggtagatgtacaggaggatttctgccccccaaacggttcgcttgccgtggcagagggtcgcaaagttacggtgccaattaacaagcttttagaattgccgttcgtgcttaaggttgccactaaagactggcacccgtcagaccacatctcctttgcggcaaaccataccggcaagcagccctacacggattccgtcacgatagtgcatccagaagacgcagccaagagctactcgtcgcggctatggcctgtgcactgcgtgcaggatagtccgggggcggagctgctgccagagcttaacaccaggaagctagacaagatcgtcgagaaaggcacggatgcgcgcgtcgagatgtacagtcctttctacgacccgttgcgcgtcagcgacagtggcctcgcggcgttgctacgtgaacacgccgtcacggacgtctacgtagtggggctcgcagccgattactgtgtcaggagctgtgcggaggatgccgctaaggagggatttaaaagctatctcatcgaggaggctactcgggcggtggaccctggcagttggccggaatgcaagaaagatatcgagggatctggcgccaaaattgttagcatggacggacccgaagtccagcgcttgatgactgcacagaaaaacaaataa

SEQ ID NO: 20382 - protein, 228 aa, Muscodor strobelii
  misc_feature: SGI Peptide ID NO. 566877
  misc_feature (2)..(219): Pfam Id: PF00857 Pfam Desc: Isochorismatase family
  misc_feature (92)..(191): Pfam Id: PF00857 Pfam Desc: Isochorismatase family
  misc_feature (3)..(223): NCBI GI: 39955082 Blast Desc: MGG_08976 [Magnaporthe grisea 70-15] gi|145021065|gb|EDK05194.1| MGG_08976 [Magnaporthe grisea 70-15]
  misc_feature (1)..(224): NCBI GI: 261361347 Blast Desc: pyrazinamidase/nicotinamidase [Verticillium albo-atrum VaMs.102]
  misc_feature (2)..(221): NCBI GI: 156054338 Blast Desc: SS1G_06017 [Sclerotinia sclerotiorum 1980] gi|154703797|gb|EDO03536.1| SS1G_06017 [Sclerotinia sclerotiorum 1980]
  misc_feature (1)..(221): NCBI GI: 154321289 Blast Desc: BC1G_01519 [Botryotinia fuckeliana B05.10] gi|150852057|gb|EDN27249.1| BC1G_01519 [Botryotinia fuckeliana B05.10]
  misc_feature (1)..(222): NCBI GI: 171695524 Blast Desc: protein product [Podospora anserina] gi|170948004|emb|CAP60168.1| protein product [Podospora anserina]
  misc_feature (5)..(213): NCBI GI: 46134113 Blast Desc: FG09196.1 [Gibberella zeae PH-1]
  misc_feature (5)..(222): NCBI GI: 85113577 Blast Desc: NCU00713 [Neurospora crassa OR74A] gi|28926333|gb|EAA35311.1| conserved [Neurospora crassa OR74A]
  misc_feature (5)..(221): NCBI GI: 169613318 Blast Desc: SNOG_09789 [Phaeosphaeria nodorum SN15] gi|160702697|gb|EAT83054.2| SNOG_09789 [Phaeosphaeria nodorum SN15]
  misc_feature (5)..(223): NCBI GI: 239609709 Blast Desc: isochorismatase family hydrolase [Ajellomyces dermatitidis ER-3]
  misc_feature (5)..(221): NCBI GI: 242786928 Blast Desc: isochorismatase family hydrolase, [Talaromyces stipitatus ATCC 10500] gi|218721048|gb|EED20467.1| isochorismatase family hydrolase, [Talaromyces stipitatus ATCC
  misc_feature (5)..(221): SWISSPROT Homolog: EC 3.5.1.19 Nicotinamidase
MADVFRPALIVVDVQEDFCPPNGSLAVAEGRKVTVPINKLLELPFVLKVATKDWHPSDHISFAANHTGKQPYTDSVTIVHPEDAAKSYSSRLWPVHCVQDSPGAELLPELNTRKLDKIVEKGTDARVEMYSPFYDPLRVSDSGLAALLREHAVTDVYVVGLAADYCVRSCAEDAAKEGFKSYLIEEATRAVDPGSWPECKKDIEGSGAKIVSMDGPEVQRLMTAQKNK

SEQ ID NO: 20383 - DNA, 1478 bp, Muscodor strobelii
  misc_feature: SGI EST ID NO. CUFF.47703.0
  misc_feature: Variant of the nucleotide sequence at SEQ ID NO 20381
tttttgtataacagcgcattcccaaattgtatgtctagctttaatcagggaactctatatcggtttcaatagagctagtgtttttgatcactttaaaaagtgcgcccatagtcgagcgtttgtattttggacaagagcctatctagagcagcaaacaaagattgaagacgtcgtcacacatcttatcttgcaacattgtaataccacgatggcggacgtatttcgaccggcattgatcgtggtagatgtacaggaggatttctgccccccaaacggttcgcttgccgtggcagagggtcgcaaagttacggtgccaattaacaagcttttagaattgccgttcgtgcttaaggttgccactaaagactggcacccgtcagaccacatctcctttgcggcaaaccataccggcaagcagccctacacggattccgtcacgatagtgcatccagaagacgcagccaagagctactcgtcgcggctatggcctgtgcactgcgtgcaggatagtccgggggcggagctgctgccagagcttaacaccaggaagctagacaagatcgtcgagaaaggcacggatgcgcgcgtcgagatgtacagtcctttctacgacccgttgcgcgtcagcgacagtggcctcgcggcgttgctacgtgaacacgccgtcacggacgtctacgtagtggggctcgcagccgattactgtgtcaggagctgtgcggaggatgccgctaaggagggatttaaaagctatctcatcgaggaggctactcgggcggtggaccctggcagttggccggaatgcaagaaagatatcgagggatctggcgccaaaattgttagcatggacggacccgaagtccagcgcttgatgactgcacagaaaaacaaataatatgctcaggaagcaaatcaggggcagtcagcttgtttcctgtacgttcgatgtcttgcttaatggttggatatttcacagggttagctgaatgagattttgttgaccaagccctatgatatttggtaatcctcctcaatccttgcccaaacttaggccagcattaacacctagcccattcgattgcttgcattgatttaattccttaaaatgccaaagattgaagtacccagtaagagctctgtaggagatcatctcggcctgatggtaacggttattcctaacatcgtgtccacactccgactccatatcgcagaagcgagagataatagcttagtccccgcagagtgcaagtatgcgagtattccaaaagctgacgctatggcttagagtccttctggataacttccaattcgagtgtgacaaggtagatgcggtgccgtttgtcacatcgtgccataatcatcctcttgcttgcaatttgtgttgtgagggagaggagaaggaaattgatacttgttatcgatatcgacttcaacatcaaacaaaatatttagattcgagaattcaacttcggctcgga

SEQ ID NO: 20384 - DNA, 3546 bp, Muscodor strobelii
  misc_feature: SGI cDNA ID NO. 566878
  misc_feature: Encodes the peptide sequence at SEQ ID NO 20385
atgatcgcctcttcctttctcccccgtcgctttcgcggcgagacgcccgctggcgctcagagcccgccgtcgaaaatgaacaagaagatcacccccttcttgcaattctttgccaagctcgccacctcgcaccccgtccacaccatcgtcgttacggccctgctggccagcactacctacgtcggtgtcatgagagagagcatgctttacgtcacccgaaacgaacgcaatgccgaatggtcgtcccttgtcgaaggcagccgtaacctgaaagttggtcccgagacctcctggcggtggcagtccgtcgatctcgaagcgcaggttctcactggtgtcgaccacctcgccctcgtcaccttggtctttcccgaatccaccgaacaggcagcccagactgctcctcagccccatatcgtccctctccccgaaaacttgaccgtctcacatcttccgtcgacctcgaactctatcaccgcttacgctcaggacagtgcgctcgccttcgctatcaagtacagccaagcgcccgaattcgtcgctgcggcccaagaaatccccaacgatgtgcccggccaggaactgcgccagaacgaactcggccaggacgagcagaaaatgtggatcatgaagcttgccggtggtcactcgggcagcagcctcgtgcgctgggtccagaatgcttggaccgagtttatggatctactcaagaatgctgagtctcttgatattattatcatggttctcggctacttgtctatgcacctgaccttcgtgtcgcttttcctttccatgaggaagctgggatccaatgtttggctcgctatcggtgtcctgttgtcctcgcttttcgctttcctgtttggcctcagtgtgacgaccaagcttggcgttccgatcacggctgtgctgctttccgagggcctgccgtttctcgtggttacaatagggttcgagaagaatatcgtattgacaagagccgtcttgtctcacgcgctggagtaccgaaagcctgagccgaagcctggtagctcctccaagaaaacaacgcctgccacagaaggtgtcattatgtttgctgttcaaaaagccattagagaaacgggcttcgagatcctgcgagactatctcatcgagatcgtcgttctggcgggaggtgctgcttctggtgttcagggtggtctgcagcaattttgcttcctcgcatcgtggatactgctgttcgactgcatcttgctcttcaccttctacactgccatcctttgcattaagctcgagacgacccgtatccatcgccacgtagagatgcgtcgcgctctcgaagacgatggcctcagccgccgtgtcgccgagactgtcgcctccagcaacgactggcccagacaagacacgaaggaccgggcaagcgaggctctctttggcaaagatgccaagagcagtagcatcccgaaattcaagttctggatggttgtgggattctttggcatcaacgccgtcaacattttgaccatcccctttcgcactacgggtctacacggtattacgtcttggtcccgtggcttgggaggagtggcaacgatgcctcctctggaccccttcaaagttgcctcgaatggcctggatgaaattctgttcaatgctcgaagccacaaccagccgactattgtcactgtgttgactcccatcaaatatgaattggaatatccttcggttcattatgcagttccgtctatgctggcagaaactaacggtaatgccggcttcacccagctgcacagatacactatgggtggacagatggtgggcagtatcttcaccagcctggaggatcccatcctgtccaaatggatcgtgattgctcttgctatgagtgttgcgcttaacggatatctgttcaatgtcgccagatgggggattaaggatcctaacgttgccgaacaccgtattgatcgaaaggaacttgccgctgcggagcggtttaacgaccctcgtgaccaggccgctctgtctctcggtggtatcgaaccaaccagaaggaagcctgctctgccggtgaccccagcctcgacagacgacgagagtattcaggcacgtgcgccaagacccgaacccattactttgccttcttctccaccgtcccccggcactatgcgaagcaacgaagagctagatgtcatgttgaaagagaaacgaattcatgaaatgagcgatacggaagtggttgtcctctcattgaagggcaagatccccggttatgcccttgagaagagcctcaaagattgtactcgtgccgtcaaagtccgacgatcaatcatttcaagaacgcgtgcaacgatggagactacaagccttttagaacgttcgaaattgccatatacagactacaactgggagcaggttcttggggcctgctgcgagaacgtcattggtttcatgcctattcctgtgggtgttgctggcccattggtcattgatgggcaaagctactttatccccatggcgaccaccgagggtgtccttgttgctagcacaagtcgtggcgcaaaagcaatcaacgcaggtggtggcgctgtgactgttttgactggcgatggcatgacccgtggaccgtgtgtcagtttcgaaaccctggagcgcgcaggtgctgctaaactatggctagattcggatgagggccaaaacaccatgaagaaggccttcaactccacatctcgattcgctcggttgcagacgatgaagaccagtatggctggtacgaatttatacattcgattcaagacgacgactggtgatgccatgggtatgaacatgatctccaagggcgttgagcatgctctgagcgtcatggccaacgaagctgggtttgatgacatgaacattatctcggtctcaggaaatttctgtatcgacaagaaggctgcagcactaaactggatcgatggccgaggcaaatcaatcgtcgctgaagcgattattcctggtgacgtcgtcaaggctgttctcaagagtgacgtagatgctcttgtcgagctgaatatttcgaagaatcttatcggatccgccatggccggtgcgatgggtggtttcaatgcacatgcagccaacattgttgctgctattttcattgctacaggacaggaccctgctcaggtggtcgagagctccaactgtatcaccaccatgaagaatctcaatgggtctcttcaaatcgccgtttctatgccatcgattgaagttggctgtctcggtggtggtactatattagatccccagggctcaatgctagacctacttggtgtccgtggttctcaccccacaaaccctggcgacaacgcccggcgacttgcccgaatcatcggtgctgctgtcctggcaggtgaactttcgctgtgcagtgctcttgctgctggccatctcgtaaaggctcacatggctcacaaccgttcgcaacctccaactagatctaccacacctgccccgagcggtgctatgacacctgtagggctatcaatgactaatgctgctgacaagtctgtccgccgctaa

SEQ ID NO: 20385 - protein, 1181 aa, Muscodor strobelii
  misc_feature: SGI Peptide ID NO. 566878
  misc_feature (748)..(1148): Pfam Id: PF00368 Pfam Desc: Hydroxymethylglutaryl-coenzyme A reductase
  misc_feature (1)..(1160): NCBI GI: 171695526 Blast Desc: protein product [Podospora anserina] gi|170948005|emb|CAP60169.1| protein product [Podospora anserina]
  misc_feature (1)..(1174): NCBI GI: 261361346 Blast Desc: 3-hydroxy-3-methylglutaryl-coenzyme A reductase [Verticillium albo-atrum VaMs.102]
  misc_feature (1)..(1174): NCBI GI: 85113573 Blast Desc: 3-hydroxy-3-methylglutaryl-coenzyme A reductase [Neurospora crassa OR74A] gi|28926332|gb|EAA35310.1| 3-hydroxy-3-methylglutaryl-coenzyme A reductase [Neurospora
  misc_feature (1)..(1178): NCBI GI: 145614090 Blast Desc: MGG_08975 [Magnaporthe grisea 70-15] gi|145021066|gb|EDK05195.1| MGG_08975 [Magnaporthe grisea 70-15]
  misc_feature (1)..(1180): NCBI GI: 108733587 Blast Desc: HMG CoA reductase [Neotyphodium lolii]
  misc_feature (4)..(1177): NCBI GI: 256720600 Blast Desc: [Nectria haematococca mpVI 77-13-4]
  misc_feature (1)..(1177): NCBI GI: 158934009 Blast Desc: 3-hydroxy-3-methylglutaryl-coenzyme A reductase [Hypocrea lixii]
  misc_feature (2)..(1167): NCBI GI: 46134115 Blast Desc: FG09197.1 [Gibberella zeae PH-1]
  misc_feature (1)..(1172): NCBI GI: 156054340 Blast Desc: SS1G_06018 [Sclerotinia sclerotiorum 1980] gi|154703798|gb|EDO03537.1| SS1G_06018 [Sclerotinia sclerotiorum 1980]
  misc_feature (2)..(1181): NCBI GI: 23574646 Blast Desc: HMG-CoA reductase [Penicillium citrinum]
  misc_feature (215)..(1161): SWISSPROT Homolog: EC 1.1.1.34 Hydroxymethylglutaryl-CoA reductase (NADPH)
  misc_feature: Useful for fungicidal and/or biocontrol applications
MIASSFLPRRFRGETPAGAQSPPSKMNKKITPFLQFFAKLATSHPVHTIVVTALLASTTYVGVMRESMLYVTRNERNAEWSSLVEGSRNLKVGPETSWRWQSVDLEAQVLTGVDHLALVTLVFPESTEQAAQTAPQPHIVPLPENLTVSHLPSTSNSITAYAQDSALAFAIKYSQAPEFVAAAQEIPNDVPGQELRQNELGQDEQKMWIMKLAGGHSGSSLVRWVQNAWTEFMDLLKNAESLDIIIMVLGYLSMHLTFVSLFLSMRKLGSNVWLAIGVLLSSLFAFLFGLSVTTKLGVPITAVLLSEGLPFLVVTIGFEKNIVLTRAVLSHALEYRKPEPKPGSSSKKTTPATEGVIMFAVQKAIRETGFEILRDYLIEIVVLAGGAASGVQGGLQQFCFLASWILLFDCILLFTFYTAILCIKLETTRIHRHVEMRRALEDDGLSRRVAETVASSNDWPRQDTKDRASEALFGKDAKSSSIPKFKFWMVVGFFGINAVNILTIPFRTTGLHGITSWSRGLGGVATMPPLDPFKVASNGLDEILFNARSHNQPTIVTVLTPIKYELEYPSVHYAVPSMLAETNGNAGFTQLHRYTMGGQMVGSIFTSLEDPILSKWIVIALAMSVALNGYLFNVARWGIKDPNVAEHRIDRKELAAAERFNDPRDQAALSLGGIEPTRRKPALPVTPASTDDESIQARAPRPEPITLPSSPPSPGTMRSNEELDVMLKEKRIHEMSDTEVVVLSLKGKIPGYALEKSLKDCTRAVKVRRSIISRTRATMETTSLLERSKLPYTDYNWEQVLGACCENVIGFMPIPVGVAGPLVIDGQSYFIPMATTEGVLVASTSRGAKAINAGGGAVTVLTGDGMTRGPCVSFETLERAGAAKLWLDSDEGQNTMKKAFNSTSRFARLQTMKTSMAGTNLYIRFKTTTGDAMGMNMISKGVEHALSVMANEAGFDDMNIISVSGNFCIDKKAAALNWIDGRGKSIVAEAIIPGDVVKAVLKSDVDALVELNISKNLIGSAMAGAMGGFNAHAANIVAAIFIATGQDPAQVVESSNCITTMKNLNGSLQIAVSMPSIEVGCLGGGTILDPQGSMLDLLGVRGSHPTNPGDNARRLARIIGAAVLAGELSLCSALAAGHLVKAHMAHNRSQPPTRSTTPAPSGAMTPVGLSMTNAADKSVRR

SEQ ID NO: 20386 - DNA, 5472 bp, Muscodor strobelii
  misc_feature: SGI EST ID NO. CUFF.47793.1
  misc_feature: Variant of the nucleotide sequence at SEQ ID NO 20384
gcaacagccaccaagttttcctgctactgcgccgccttcctgtcctcctctataactgtctgattctcaatgctggaaatgtccgaactgacaagtctcccagacatcccaatcgtattcgcaacgccttcgatgcactcgaggtagcaccacaatgatcgcctcttcctttctcccccgtcgctttcgcggcgagacgcccgctggcgctcagagcccgccgtcgaaaatgaacaagaagatcacccccttcttgcaattctttgccaagctcgccacctcgcaccccgtccacaccatcgtcgttacggccctgctggccagcactacctacgtcggtgtcatgagagagagcatgctttacgtcacccgaaacgaacgcaatgccgaatggtcgtcccttgtcgaaggcagccgtaacctgaaagttggtcccgagacctcctggcggtggcagtccgtcgatctcgaagcgcaggttctcactggtgtcgaccacctcgccctcgtcaccttggtctttcccgaatccaccgaacaggcagcccagactgctcctcagccccatatcgtccctctccccgaaaacttgaccgtctcacatcttccgtcgacctcgaactctatcaccgcttacgctcaggacagtgcgctcgccttcgctatcaagtacagccaagcgcccgaattcgtcgctgcggcccaagaaatccccaacgatgtgcccggccaggaactgcgccagaacgaactcggccaggacgagcagaaaatgtggatcatgaagcttgccggtggtcactcgggcagcagcctcgtgcgctgggtccagaatgcttggaccgagtttatggatctactcaagaatgctgagtctcttgatattattatcatggttctcggctacttgtctatgcacctgaccttcgtgtcgcttttcctttccatgaggaagctgggatccaatgtttggctcgctatcggtgtcctgttgtcctcgcttttcgctttcctgtttggcctcagtgtgacgaccaagcttggcgttccgatcacggctgtgctgctttccgagggcctgccgtttctcgtggttacaatagggttcgagaagaatatcgtattgacaagagccgtcttgtctcacgcgctggagtaccgaaagcctgagccgaagcctggtagctcctccaagaaaacaacgcctgccacagaaggtgtcattatgtttgctgttcaaaaagccattagagaaacgggcttcgagatcctgcgagactatctcatcgagatcgtcgttctggcgggaggtgctgcttctggtgttcagggtggtctgcagcaattttgcttcctcgcatcgtggatactgctgttcgactgcatcttgctcttcaccttctacactgccatcctttgcattaagctcgagacgacccgtatccatcgccacgtagagatgcgtcgcgctctcgaagacgatggcctcagccgccgtgtcgccgagactgtcgcctccagcaacgactggcccagacaagacacgaaggaccgggcaagcgaggctctctttggcaaagatgccaagagcagtagcatcccgaaattcaagttctggatggttgtgggattctttggcatcaacgccgtcaacattttgaccatcccctttcgcactacgggtctacacggtattacgtcttggtcccgtggcttgggaggagtggcaacgatgcctcctctggaccccttcaaagttgcctcgaatggcctggatgaaattctgttcaatgctcgaagccacaaccagccgactattgtcactgtgttgactcccatcaaatatgaattggaatatccttcggttcattatgcagttccgtctatgctggcagaaactaacggtaatgccggcttcacccagctgcacagatacactatgggtggacagatggtgggcagtatcttcaccagcctggaggatcccatcctgtccaaatggatcgtgattgctcttgctatgagtgttgcgcttaacggatatctgttcaatgtcgccagatgggggattaaggatcctaacgttgccgaacaccgtattgatcgaaaggaacttgccgctgcggagcggtttaacgaccctcgtgaccaggccgctctgtctctcggtggtatcgaaccaaccagaaggaagcctgctctgccggtgaccccagcctcgacagacgacgagagtattcaggcacgtgcgccaagacccgaacccattactttgccttcttctccaccgtcccccggcactatgcgaagcaacgaagagctagatgtcatgttgaaagagaaacgaattcatgaaatgagcgatacggaagtggttgtcctctcattgaagggcaagatccccggttatgcccttgagaagagcctcaaagattgtactcgtgccgtcaaagtccgacgatcaatcatttcaagaacgcgtgcaacgatggagactacaagccttttagaacgttcgaaattgccatatacagactacaactgggagcaggttcttggggcctgctgcgagaacgtcattggtttcatgcctattcctgtgggtgttgctggcccattggtcattgatgggcaaagctactttatccccatggcgaccaccgagggtgtccttgttgctagcacaagtcgtggcgcaaaagcaatcaacgcaggtggtggcgctgtgactgttttgactggcgatggcatgacccgtggaccgtgtgtcagtttcgaaaccctggagcgcgcaggtgctgctaaactatggctagattcggatgagggccaaaacaccatgaagaaggccttcaactccacatctcgattcgctcggttgcagacgatgaagaccagtatggctggtacgaatttatacattcgattcaagacgacgactggtgatgccatgggtatgaacatgatctccaagggcgttgagcatgctctgagcgtcatggccaacgaagctgggtttgatgacatgaacattatctcggtctcaggaaatttctgtatcgacaagaaggctgcagcactaaactggatcgatggccgaggcaaatcaatcgtcgctgaagcgattattcctggtgacgtcgtcaaggctgttctcaagagtgacgtagatgctcttgtcgagctgaatatttcgaagaatcttatcggatccgccatggccggtgcgatgggtggtttcaatgcacatgcagccaacattgttgctgctattttcattgctacaggacaggaccctgctcaggtggtcgagagctccaactgtatcaccaccatgaagaatctcaatgggtctcttcaaatcgccgtttctatgccatcgattgaagttggctgtctcggtggtggtactatattagatccccagggctcaatgctagacctacttggtgtccgtggttctcaccccacaaaccctggcgacaacgcccggcgacttgcccgaatcatcggtgctgctgtcctggcaggtgaactttcgctgtgcagtgctcttgctgctggccatctcgtaaaggctcacatggctcacaaccgttcgcaacctccaactagatctaccacacctgccccgagcggtgctatgacacctgtagggctatcaatgactaatgctgctgacaagtctgtccgccgctaaacacaaggagcttttgccctcgtgtttcatttcttcacaatcacacattaacatatttccctgggtggtatatattcaggcatagtcctcggcgttagcgaaacttgccttggggcacttagtggccggtagtttatcagtagcctgcatggtctgattgatatataatgcgatgcatcgcgtgaaatgcatagaaagcttgctcgccgctacatatagactaaagaagatatggcaagtcaagatggatcacaattctggaaacagcgttaaagcagataccaaaagagctcaatgtcgtcatcggagaaggcaagctcaaaataaatttatcgaaattcaattattctttttccagatattcgtttctttgctctacgaaacgacgttgaaatcctccaaactctaacccttcacataaagctttagttattaaaatattcgaacactagcgaccgtatcatagctcattcatctgaaaccttaaccaccagcttgcccctcgtgcgccccgtcttaagcttctcgaatgccttcggggcatcatcataagggtaaacatccccatcgatcacagcttttatcttcccctcactcatcagttttcccagttctgtgagatgctcatgtgacgggtacgtaaggaagaatttccacttcctctttccaccgccaagaaacgcaggtcttatggactgatagatgagatcccgcatgctggagagagacacgtcgccgccgatttgtatgaacatgccttcgggtagcaagtaatcgtctgccgctttgtatagatcgaagcctgcgtgtcccaccgcgtcgaggacggatttgaagacctgtcctctggcgcgtaatgcgctggtcacggcattgggggaggtggtgtagtctatcactgtttctgcgccgagagatcggcatagggcaatgttcttggtggaacaagatgccgtcacacgacagccgagcgcggcggcgatttggattgcccaggttccgacgccgccactgccgccgtttatgaatacttcgtcgccttggtcgggtgtgatgtaaggcgtgattgcctggtatgctgtttgagctgcggttccaagggccgcggcgtctgagagggtgacatttgagggaaggtgggctacgcaaggctctggggcgtgaatataggacccgagagtgccgtatgaggtccctgcgatgcgaccgaagactttgtcgccgattttgtagcctgcgttggttaggctggagccgatctgtgcgattgtgcctgagtagtccatgccaggtgaggcagggacggagggtataacgcctcgggcgaagaggcgcccaagctcaggtactttgtagtctgctggatttggagacatgtacgatacgcggatgaggaacttatccgctgggagagatggaggatgtcgcgcatttgggttgagtgttaatgctttggcgaggttacagcctgcgtttgtgtatgtccacgcccgcattgttgtgggtgtggcggccatgatggtgttcggtgtagagaacgagataaggggtcaattgtattgctagattccaggatgaaaaacgcgaaatagcctttgttatatatcctttaattggcgaagttatcagcgtctattgtgttatatctcatattgtgatgcgccgaaatgaaataggaggactagtcgccctgtgctaaatggagactttttgccccgcgactgagttccaggtcgtgatgtcatgaaacaaggtgaagtgttacattggaa

SEQ ID NO: 20387 - DNA, 1050 bp, Muscodor strobelii
  misc_feature: SGI cDNA ID NO. 566879
  misc_feature: Reduced expression when VOC is produced
  misc_feature: Encodes the peptide sequence at SEQ ID NO 20388
atggccgccacacccacaacaatgcgggcgtggacatacacaaacgcaggctgtaacctcgccaaagcattaacactcaacccaaatgcgcgacatcctccatctctcccagcggataagttcctcatccgcgtatcgtacatgtctccaaatccagcagactacaaagtacctgagcttgggcgcctcttcgcccgaggcgttataccctccgtccctgcctcacctggcatggactactcaggcacaatcgcacagatcggctccagcctaaccaacgcaggctacaaaatcggcgacaaagtcttcggtcgcatcgcagggacctcatacggcactctcgggtcctatattcacgccccagagccttgcgtagcccaccttccctcaaatgtcaccctctcagacgccgcggcccttggaaccgcagctcaaacagcataccaggcaatcacgccttacatcacacccgaccaaggcgacgaagtattcataaacggcggcagtggcggcgtcggaacctgggcaatccaaatcgccgccgcgctcggctgtcgtgtgacggcatcttgttccaccaagaacattgccctatgccgatctctcggcgcagaaacagtgatagactacaccacctcccccaatgccgtgaccagcgcattacgcgccagaggacaggtcttcaaatccgtcctcgacgcggtgggacacgcaggcttcgatctatacaaagcggcagacgattacttgctacccgaaggcatgttcatacaaatcggcggcgacgtgtctctctccagcatgcgggatctcatctatcagtccataagacctgcgtttcttggcggtggaaagaggaagtggaaattcttccttacgtacccgtcacatgagcatctcacagaactgggaaaactgatgagtgaggggaagataaaagctgtgatcgatggggatgtttacccttatgatgatgccccgaaggcattcgagaagcttaagacggggcgcacgaggggcaagctggtggttaaggtttcagatgaatga

SEQ ID NO: 20388 - protein, 349 aa, Muscodor strobelii
  misc_feature: SGI Peptide ID NO. 566879
  misc_feature (38)..(128): Pfam Id: PF08240 Pfam Desc: Alcohol dehydrogenase GroES-like domain
  misc_feature (159)..(309): Pfam Id: PF00107 Pfam Desc: Zinc-binding dehydrogenase
  misc_feature (159)..(243): Pfam Id: PF00107 Pfam Desc: Zinc-binding dehydrogenase
  misc_feature (1)..(346): NCBI GI: 171676846 Blast Desc: protein product [Podospora anserina] gi|170936490|emb|CAP61150.1| protein product [Podospora anserina]
  misc_feature (5)..(349): NCBI GI: 121699493 Blast Desc: zinc alcohol dehydrogenase, [Aspergillus clavatus NRRL 1] gi|119396181|gb|EAW06613.1| zinc alcohol dehydrogenase, [Aspergillus clavatus NRRL 1]
  misc_feature (5)..(347): NCBI GI: 255932089 Blast Desc: Pc12g07660 [Penicillium chrysogenum Wisconsin 54-1255] gi|211582220|emb|CAP80393.1| Pc12g07660 [Penicillium chrysogenum Wisconsin 54-1255]
  misc_feature (8)..(349): NCBI GI: 119470738 Blast Desc: zinc alcohol dehydrogenase, [Neosartorya fischeri NRRL 181] gi|119406226|gb|EAW16177.1| zinc alcohol dehydrogenase, [Neosartorya fischeri NRRL 181]
  misc_feature (5)..(349): NCBI GI: 70991999 Blast Desc: zinc alcohol dehydrogenase [Aspergillus fumigatus Af293] gi|66848481|gb|EAL88810.1| zinc alcohol dehydrogenase, [Aspergillus fumigatus Af293]
  misc_feature (5)..(349): NCBI GI: 85092425 Blast Desc: NCU04940 [Neurospora crassa OR74A] gi|28920793|gb|EAA30152.1| [Neurospora crassa OR74A]
  misc_feature (5)..(349): NCBI GI: 159124416 Blast Desc: zinc alcohol dehydrogenase, [Aspergillus fumigatus A1163]
  misc_feature (5)..(347): NCBI GI: 212531139 Blast Desc: zinc alcohol dehydrogenase, [Penicillium marneffei ATCC 18224] gi|210071090|gb|EEA25179.1| zinc alcohol dehydrogenase, [Penicillium marneffei ATCC 18224]
  misc_feature (6)..(346): NCBI GI: 189201181 Blast Desc: reticulon-4-interacting protein 1, mitochondrial precursor [Pyrenophora tritici-repentis Pt-1C-BFP] gi|187984026|gb|EDU49514.1| reticulon-4-interacting protein 1,
  misc_feature (5)..(349): NCBI GI: 115400577 Blast Desc: [Aspergillus terreus NIH2624] gi|114191543|gb|EAU33243.1| [Aspergillus terreus NIH2624]
  misc_feature (70)..(344): SWISSPROT Homolog: EC 1.6.5.5 NADPH:quinone reductase
  misc_feature: Useful for introducing or modulating the production of volatile compounds
MAATPTTMRAWTYTNAGCNLAKALTLNPNARHPPSLPADKFLIRVSYMSPNPADYKVPELGRLFARGVIPSVPASPGMDYSGTIAQIGSSLTNAGYKIGDKVFGRIAGTSYGTLGSYIHAPEPCVAHLPSNVTLSDAAALGTAAQTAYQAITPYITPDQGDEVFINGGSGGVGTWAIQIAAALGCRVTASCSTKNIALCRSLGAETVIDYTTSPNAVTSALRARGQVFKSVLDAVGHAGFDLYKAADDYLLPEGMFIQIGGDVSLSSMRDLIYQSIRPAFLGGGKRKWKFFLTYPSHEHLTELGKLMSEGKIKAVIDGDVYPYDDAPKAFEKLKTGRTRGKLVVKVSDE

SEQ ID NO: 20389 - DNA, 1596 bp, Muscodor strobelii
  misc_feature: SGI cDNA ID NO. 566880
  misc_feature: Encodes the peptide sequence at SEQ ID NO 20390
atggcttataatcagaataattcttacttagtgactaatctaacagtgcactttcgcccccgtaataacacatccacctctcttactaccgatcttcagcggtggcaccgaattggtaaagatctgtacctcaataactctgagcagacagcttggatctatattcagatcgccagaagagaggagttgagcgaagatgacttggttttaaccggcgtcgcagtcggatccgaaatgccctttgacagattagataagagctgggaaccacgacctgccgggatctgggtacaaagatccccgaactgtgatgccgcccaagccataacggatgtggatgtgttgtttggtgctgatgctgttgacccgcggcccggtagaacccttttagagacaccactagaactcgatggcgttcgtgagccagatataatagtcgctaaactaagctttggtacggcagtgccctgtcgagacagaccctcttccccaaagcagcgattcctcaaagcaaacgaaaacggaaagttcaagatgattcaactatctgacactcatatggtaacggggctaggcatctgcaaagatgccatcgatgccgatggcaattttctacctccctcagtcgcagatcctctcacggtaaacttcataaacaagatcctagatgacgagaaaccggattttgtacttcttactggcgaccaggtccaccatgacattcaagacactcagtctgctctattcaaagtcttggttccactgatcagccgtggagtctgctttgcatccgtatttgggaatcacgatgacgagggagataatgcattatcaaggacggagcaaatgtcaatactccagaaccttcctttcagtctttgcgagccagggcctgaggaagtcgaagggattgggaactactatctccagatctatgacaacacccttcagcaaccttgtgtgaccctgtttctctttgatagtcacgggcaaatcccgagcgacataaaaaatcctgactatgaccctatcaagccaagccagatcaagtggttcaaagagacatcacaagccctgcgagaagcgcgagagaagaaagagggtggccacaataatggatttcacatgtctttagcattcatgcatatcccctttcccgaatacgcgtccaaggatctgaggatatggcgtggtcaccgacgtgaaccgaccgagggcccaagtcacaattcgcacctttatgacgcattggctgaggagggggtggttgctgtaggttgtggacatgatcatgtcaatgactattgcggattgctccctcccaatgcagatgctgcaccacaaattgcccaagatattgatgaggacacgaaacacggcccatggctctgctacgctgggagtggtggctttggaggctactgctcgtatggagagaatcgatattatcgggggatgcgagtctgggagttcgatactacggccgggagtattgtaacatggacacgcaaggaatactctgatgagaaagtggatgagatactcctcgtagagaaaggtcgcgttttcacaccgacgcgagcacaatatacgtga

SEQ ID NO: 20390 - protein, 531 aa, Muscodor strobelii
  misc_feature: SGI Peptide ID NO. 566880
  misc_feature (177)..(433): Pfam Id: PF00149 Pfam Desc: Calcineurin-like phosphoesterase
  misc_feature (39)..(526): NCBI GI: 169619387 Blast Desc: SNOG_12890 [Phaeosphaeria nodorum SN15] gi|111058570|gb|EAT79690.1| SNOG_12890 [Phaeosphaeria nodorum SN15]
  misc_feature (5)..(523): NCBI GI: 189202344 Blast Desc: conserved [Pyrenophora tritici-repentis Pt-1C-BFP] gi|187984607|gb|EDU50095.1| conserved [Pyrenophora tritici-repentis Pt-1C-BFP]
  misc_feature (9)..(522): NCBI GI: 242770025 Blast Desc: phosphoesterase, [Talaromyces stipitatus ATCC 10500] gi|218725089|gb|EED24506.1| phosphoesterase, [Talaromyces stipitatus ATCC 10500]
  misc_feature (7)..(528): NCBI GI: 255947072 Blast Desc: Pc22g02590 [Penicillium chrysogenum Wisconsin 54-1255] gi|211591320|emb|CAP97547.1| Pc22g02590 [Penicillium chrysogenum Wisconsin 54-1255]
  misc_feature (5)..(528): NCBI GI: 171692399 Blast Desc: protein product [Podospora anserina] gi|170946148|emb|CAP72949.1| protein product [Podospora anserina]
  misc_feature (10)..(525): NCBI GI: 154316091 Blast Desc: BC1G_03630 [Botryotinia fuckeliana B05.10] gi|150846417|gb|EDN21610.1| BC1G_03630 [Botryotinia fuckeliana B05.10]
  misc_feature (30)..(525): NCBI GI: 70993426 Blast Desc: phosphoesterase [Aspergillus fumigatus Af293] gi|66849194|gb|EAL89522.1| phosphoesterase, [Aspergillus fumigatus Af293] gi|159125510|gb|EDP50627.1| phosphoesterase,
  misc_feature (10)..(525): NCBI GI: 238838577 Blast Desc: phosphatase DCR2 [Microsporum canis CBS 113480]
  misc_feature (23)..(525): NCBI GI: 261205724 Blast Desc: phosphoesterase [Ajellomyces dermatitidis SLH14081] gi|239592658|gb|EEQ75239.1| phosphoesterase [Ajellomyces dermatitidis SLH14081]
  misc_feature (10)..(525): NCBI GI: 145605531 Blast Desc: MGG_09209 [Magnaporthe grisea 70-15] gi|145013353|gb|EDJ97994.1| MGG_09209 [Magnaporthe grisea 70-15]
MAYNQNNSYLVTNLTVHFRPRNNTSTSLTTDLQRWHRIGKDLYLNNSEQTAWIYIQIARREELSEDDLVLTGVAVGSEMPFDRLDKSWEPRPAGIWVQRSPNCDAAQAITDVDVLFGADAVDPRPGRTLLETPLELDGVREPDIIVAKLSFGTAVPCRDRPSSPKQRFLKANENGKFKMIQLSDTHMVTGLGICKDAIDADGNFLPPSVADPLTVNFINKILDDEKPDFVLLTGDQVHHDIQDTQSALFKVLVPLISRGVCFASVFGNHDDEGDNALSRTEQMSILQNLPFSLCEPGPEEVEGIGNYYLQIYDNTLQQPCVTLFLFDSHGQIPSDIKNPDYDPIKPSQIKWFKETSQALREAREKKEGGHNNGFHMSLAFMHIPFPEYASKDLRIWRGHRREPTEGPSHNSHLYDALAEEGVVAVGCGHDHVNDYCGLLPPNADAAPQIAQDIDEDTKHGPWLCYAGSGGFGGYCSYGENRYYRGMRVWEFDTTAGSIVTWTRKEYSDEKVDEILLVEKGRVFTPTRAQYT

SEQ ID NO: 20391 - DNA, 1101 bp, Muscodor strobelii
  misc_feature: SGI EST ID NO. CUFF.47724.0
  misc_feature: Variant of the nucleotide sequence at SEQ ID NO 20389
tgacattcaagacactcagtctgctctattcaaagtcttggttccactgatcagccgtggagtctgctttgcatccgtatttgggaatcacgatgacgagggagataatgcattatcaaggacggagcaaatgtcaatactccagaaccttcctttcagtctttgcgagccagggcctgaggaagtcgaagggattgggaactactatctccagatctatgacaacacccttcagcaaccttgtgtgaccctgtttctctttgatagtcacgggcaaatcccgagcgacataaaaaatcctgactatgaccctatcaagccaagccagatcaagtggttcaaagagacatcacaagccctgcgagaagcgcgagagaagaaagagggtggccacaataatggatttcacatgtctttagcattcatgcatatcccctttcccgaatacgcgtccaaggatctgaggatatggcgtggtcaccgacgtgaaccgaccgagggcccaagtcacaattcgcacctttatgacgcattggctgaggagggggtggttgctgtaggttgtggacatgatcatgtcaatgactattgcggattgctccctcccaatgcagatgctgcaccacaaattgcccaagatattgatgaggacacgaaacacggcccatggctctgctacgctgggagtggtggctttggaggctactgctcgtatggagagaatcgatattatcgggggatgcgagtctgggagttcgatactacggccgggagtattgtaacatggacacgcaaggaatactctgatgagaaagtggatgagatactcctcgtagagaaaggtcgcgttttcacaccgacgcgagcacaatatacgtgagccaaagacggcagcactattgacactaagttgctgtggcagaattcataatcctagtcttcatagggcaagtgattctacaagacgaagtggagttgtgaagattgccgtcgtagcggtagctgtagacgctctgtcgttttgtcattattggcagcactacataactttcactctgcttttacactagatagacaggattaggttacatcttattaata

SEQ ID NO: 20392 - DNA, 1710 bp, Muscodor strobelii
  misc_feature: SGI cDNA ID NO. 566881
  misc_feature: Encodes the peptide sequence at SEQ ID NO 20393
atgaaggctgttttctctctaggcgtcttagcctcctctgttccgattgcatcgccagtgctaagaagcgcggacaacagtcctcgggttcacgtcaagaatggcacattagcgggacggtactcacccgaatatgatcaagacttctttctcggagtaccctatgctcaggctcctgtgggtgacttgcgcttcagcaatccggagcctatcgtcgagacttggtcgcatgagtattccgccaaggagctttctgtcgcctgttcttctcaattgggatacgacttgagcgaagattgtctctacctaaacgtcattcgtcccgcaaacgtcgacccggagacacccttgccagtcgcggtctggatcttcggcggcggctatgtgcaaggttccggctctgatctccggtacaacctatctttcatcgtgcagcaatccgtggacatcggacagcccatgatcggcgtcagcatgaattatcgtctcagtgcttggggcttcctcagctcgcaggaggtcctagatagcgggaatagcaactttggcatcagagaccagcgcttgtcgcttcagtggatccaagagaatattgctgcgtttggtggtgatccggacaaggtcactatttggggccaaagcgctggtgctgcgtctgttggcgcgcatcttaatgcctatgatggtcgtgatgatgggctctttcgcggtgcgatcatggagagcggaggacccattgcattctacgatggtacaatgtcgagtactcaatcaacgtacgacgaacttatcacacaggcaggatgtaacaactcttccgacactttgcaatgtcttcgtgaggtctcattcgaggatctaaacgctataatcaacacaacggggctgacaagctggagcccgaagatcgatggggatatcattgcgcgttcatcaaaagaccaggttgcagatggaagcttcgtacgggtcccggttatcctaggcgaaaactcagacgagggcacgtctttcgcacccatagggattaacaccacggaggagttccaccaggctttgctcgcttcctcagagtcgatgacagaggagtacgtcgataagcttctggaggcttacccagaggtatcaccgggaaacgagctgtcgaatttaccgctggactacgttcctccagcgtatccatggggtagacaatggcgccgtgtagcgacctattacggcgatcgtacactaacctccaaacgcagatacgcgtgcgaagcatgggctcaaaagggtatatctgcatactgttaccggttcaatgccatacctgcgtgggcggggccactcgacggcgcgacgcattttgtcgaagttgcgtacgcgatgctgaatctagacggtgtgggatacgctccggtgcggacaccgccgttccaaggcctcggtactgagcatcgggatcttgcgcggcttatggctagtgactggatctccttcgttaatagcggtgacccgaacaggtgggagggccgtcgcgacgtgctcacgactttaggacggccggtgatagagtggcctgtgtacagtgctcattctgcatcgagcacaaagtgtggacatcaaccggcgcgaatttttcgctacgatgctaatgtcacgagcacggttgaatacgacgtttataggaagataggggtggatctgatcaatcaggcgccgcattga

SEQ ID NO: 20393 - protein, 569 aa, Muscodor strobelii
  misc_feature: SGI Peptide ID NO. 566881
  misc_feature (4)..(541): Pfam Id: PF00135 Pfam Desc: Carboxylesterase
  misc_feature (4)..(373): Pfam Id: PF00135 Pfam Desc: Carboxylesterase
  misc_feature (1)..(567): NCBI GI: 256723251 Blast Desc: NECHADRAFT_86536 [Nectria haematococca mpVI 77-13-4]
  misc_feature (16)..(565): NCBI GI: 46138397 Blast Desc: FG10713.1 [Gibberella zeae PH-1]
  misc_feature (3)..(565): NCBI GI: 119490705 Blast Desc: carboxylesterase family protein [Neosartorya fischeri NRRL 181] gi|119411235|gb|EAW21178.1| carboxylesterase family protein [Neosartorya fischeri NRRL 181]
  misc_feature (3)..(565): NCBI GI: 145233451 Blast Desc: An02g09690 [Aspergillus niger] gi|134057029|emb|CAK37838.1| protein product [Aspergillus niger]
  misc_feature (23)..(565): NCBI GI: 70999029 Blast Desc: extracellular lipase [Aspergillus fumigatus Af293] gi|66851873|gb|EAL92198.1| extracellular lipase, [Aspergillus fumigatus Af293]
  misc_feature (9)..(565): NCBI GI: 169763652 Blast Desc: [Aspergillus oryzae RIB40] gi|83770754|dbj|BAE60887.1| protein product [Aspergillus oryzae]
  misc_feature (26)..(565): NCBI GI: 255938321 Blast Desc: Pc13g15360 [Penicillium chrysogenum Wisconsin 54-1255] gi|211584551|emb|CAP92605.1| Pc13g15360 [Penicillium chrysogenum Wisconsin 54-1255]
  misc_feature (7)..(565): NCBI GI: 115391431 Blast Desc: cholinesterase [Aspergillus terreus NIH2624] gi|114194144|gb|EAU35844.1| cholinesterase [Aspergillus terreus NIH2624]
  misc_feature (27)..(557): NCBI GI: 212541883 Blast Desc: extracellular lipase, [Penicillium marneffei ATCC 18224] gi|210066003|gb|EEA20096.1| extracellular lipase, [Penicillium marneffei ATCC 18224]
  misc_feature (3)..(565): NCBI GI: 67538302 Blast Desc: AN5321.2 [Aspergillus nidulans FGSC A4] gi|40743291|gb|EAA62481.1| AN5321.2 [Aspergillus nidulans FGSC A4] gi|259485238|tpe|CBF82104.1| TPA: extracellular lipase, FGSC
  misc_feature (32)..(421): SWISSPROT Homolog: EC 3.1.1.3 Triacylglycerol lipase
MKAVFSLGVLASSVPIASPVLRSADNSPRVHVKNGTLAGRYSPEYDQDFFLGVPYAQAPVGDLRFSNPEPIVETWSHEYSAKELSVACSSQLGYDLSEDCLYLNVIRPANVDPETPLPVAVWIFGGGYVQGSGSDLRYNLSFIVQQSVDIGQPMIGVSMNYRLSAWGFLSSQEVLDSGNSNFGIRDQRLSLQWIQENIAAFGGDPDKVTIWGQSAGAASVGAHLNAYDGRDDGLFRGAIMESGGPIAFYDGTMSSTQSTYDELITQAGCNNSSDTLQCLREVSFEDLNAIINTTGLTSWSPKIDGDIIARSSKDQVADGSFVRVPVILGENSDEGTSFAPIGINTTEEFHQALLASSESMTEEYVDKLLEAYPEVSPGNELSNLPLDYVPPAYPWGRQWRRVATYYGDRTLTSKRRYACEAWAQKGISAYCYRFNAIPAWAGPLDGATHFVEVAYAMLNLDGVGYAPVRTPPFQGLGTEHRDLARLMASDWISFVNSGDPNRWEGRRDVLTTLGRPVIEWPVYSAHSASSTKCGHQPARIFRYDANVTSTVEYDVYRKIGVDLINQAPH

SEQ ID NO: 20394 - DNA, 618 bp, Muscodor strobelii
  misc_feature: SGI cDNA ID NO. 566882
  misc_feature: Encodes the peptide sequence at SEQ ID NO 20395
atgattggcgatatgtttatcccgcgaggagctttcggaaagctagaaccggcaggggtctatcaccagctgactgagggaaaagttaccggatggactgtgacaggaggcggacagggcggcccacagagcaaaactatgatggctgcgctcacgttttcgatggcatatacgaagcagaaaatcagatcaatcacgcgtgtagcaactccaaacactgtttggtcactaatctacatctgtcgtcatggttatccggcaccttggaacgagcaaccgcaaggattaagagacgccatccgcgggatggagcgcacaccagatctgagctggtcacctcaagacgacaatacaacaattctcgattacttcaataaaagtaccggagcgccggaccgggacacctatttactacatgtgctctatgatcagtctgtcaaagctttgaaggagaaggagaaagaatctaagttcatggaggatgagtgggatggctcagacgagctggacgaagaagcgttggatgaggtatacgaagaggaattgggtgggtttgagttggagggagattatgatgaggagatagacgaggtggaggaggatgagttagatgagtag

SEQ ID NO: 20395 - protein, 205 aa, Muscodor strobelii
  misc_feature: SGI Peptide ID NO. 566882
MIGDMFIPRGAFGKLEPAGVYHQLTEGKVTGWTVTGGGQGGPQSKTMMAALTFSMAYTKQKIRSITRVATPNTVWSLIYICRHGYPAPWNEQPQGLRDAIRGMERTPDLSWSPQDDNTTILDYFNKSTGAPDRDTYLLHVLYDQSVKALKEKEKESKFMEDEWDGSDELDEEALDEVYEEELGGFELEGDYDEEIDEVEEDELDE

SEQ ID NO: 20396 - DNA, 242 bp, Muscodor strobelii
  misc_feature: SGI EST ID NO. CUFF.47749.0
  misc_feature: Variant of the nucleotide sequence at SEQ ID NO 20394
cacagagcaaaactatgatggctgcgctcacgttttcgatggcatatacgaagcagaaaatcagatcaatcacgcgtgtagcaactccaagtgagaaatactcaaaccagtggctagtttggccggttttcgtcgaaggtggttactagtatctcctttaacccattgattttcgtatgcatctatattaacctatgccacagtaagccgtgcaggttttaaacatgatgatcttattagat

SEQ ID NO: 20397 - DNA, 1845 bp, Muscodor strobelii
  misc_feature: SGI cDNA ID NO. 566883
  misc_feature: Reduced expression when VOC is produced
  misc_feature: Encodes the peptide sequence at SEQ ID NO 20398
atggccgacgaagtttacgatggtgccattggcattgatttgggcacgacctactcctgcgtagccacgtacgagggtaacaatgtcgagatcatcgccaacgagcagggtagcttcaccaccccctcgtacgtctccttcaacgagaaggagcgtctgatcggtgaggctgccaagaaccaggccgccatgaaccccgtcaacaccgtcttcgacgtcaagcgtctgatcggccgtcctttctccgaccccatcgtcaagaaggacatcgagtcgtggcccttcaaggtcgtcgagcagggcaccaaccccgtcatccaggtccagtacctcggcgagaccaagaccttctccgcccaggagatctctgccatggtcctcaccaagatgaaggagatcgccgagaccaagctcggcaagaaggttgagaaggccgtcatcaccgtcccggcctacttcaacgataaccagcgtcaggccaccaaggacgccggtgccatctctggcctcaacgtcctccgtatcatcaacgagcccaccgccgccgccatcgcctacggtctcggctctaacaagagcaacaaggagcgcaacgtcctcatctacgatctcggtggcggtactttcgatgtctccctcctcaacatccagggtggtgtcttcaccgtcaaggccaccgccggtgatacccacttgggtggtcaagacttcgacacaaacttgttggagcattgtaaaaaagatttccagaggaagaccaagaaggacatcagcggcgacccacgcgccctccgccgtctccggactgcctgtgagcgtgccaagagaaccctctccaacggtgcccagaccaccatcgagatcgactcgctcttcgatggcgaggatttcttcctccagatcacccgtgctcgtttcgaggacttgaacgccaaggctttcaacggtaccctcgagcccgttgcccaggtcctcaaggatgccgctgtcgacaagaaggccgttgacgagatcgtgctcgtcggtggctctacccgtatccccaagatccagaagttgctcagcgacttctttgacggcaagaagctcgagaagagcatcaaccccgatgaggccgtcgcctacggtgctgccgtccaggctggtatcctttccggaaaggctacttccgctgacacctctgacctcttgctgttggatgtctgccccctttccctcggtgttgccatggagggtaacatcttcgcccccgtcgtcacccgtggccagactgtgccgtgcttgaagaagcgaactttcacaactgttgccgacaaccagcagactgttcagttccctgtgtaccagggtgagcgtgtcaattgcgaggacaacacttccttgggagagttcaccctcgcccccattccccccatgcgggctggtgaggccgtgctcgaggtcgtcttcgaagtcgacgtcaacggtatcctcaaggttactgctaccgagaagacctcgggccgcagcgccaacattaccatcgccaactctgttggtaagctctcgactgctgagattgagaacatgatcaacgacgccgagaagttcaagaacaccgacgaggccttcagcaagcgcttcgaggccaagcagcagctcgaggcctacattggccgggtagaggagatcatctccgacccgaccctatccctcaagctcaagcgtggccagaaggagaagatcgaggagaccctcagcgatgctatgggccagctcgagcttgaggagtccaccgctgatgacctgaagaagaaggaattggctctcaagagactggtaaccaaggccatgtcttcacgataa

SEQ ID NO: 20398 - protein, 614 aa, Muscodor strobelii
  misc_feature: SGI Peptide ID NO. 566883
  misc_feature (9)..(613): Pfam Id: PF00012 Pfam Desc: Hsp70 protein
  misc_feature (1)..(614): NCBI GI: 171695078 Blast Desc: protein product [Podospora anserina] gi|170947781|emb|CAP59944.1| protein product [Podospora anserina]
  misc_feature (1)..(614): NCBI GI: 256734704 Blast Desc: [Nectria haematococca mpVI 77-13-4]
  misc_feature (1)..(614): NCBI GI: 116182094 Blast Desc: heat shock protein 70 [Chaetomium globosum CBS 148.51] gi|88185972|gb|EAQ93440.1| heat shock protein 70 [Chaetomium globosum CBS 148.51]
  misc_feature (1)..(614): NCBI GI: 242798744 Blast Desc: Hsp70 chaperone (HscA), [Talaromyces stipitatus ATCC 10500] gi|218716577|gb|EED15998.1| Hsp70 chaperone (HscA), [Talaromyces stipitatus ATCC 10500]
  misc_feature (2)..(614): NCBI GI: 226291235 Blast Desc: heat shock protein SSB1 [Paracoccidioides brasiliensis Pb18]
  misc_feature (2)..(614): NCBI GI: 225679503 Blast Desc: heat shock protein SSB [Paracoccidioides brasiliensis Pb03]
  misc_feature (1)..(614): NCBI GI: 261201708 Blast Desc: heat shock protein SSB [Ajellomyces dermatitidis SLH14081] gi|239590165|gb|EEQ72746.1| heat shock protein SSB [Ajellomyces dermatitidis SLH14081] gi|239611880|gb|EEQ88867.1|
  misc_feature (1)..(614): NCBI GI: 212541428 Blast Desc: Hsp70 chaperone (HscA), [Penicillium marneffei ATCC 18224] gi|210068168|gb|EEA22260.1| Hsp70 chaperone (HscA), [Penicillium marneffei ATCC 18224]
  misc_feature (1)..(614): NCBI GI: 225558277 Blast Desc: heat shock protein SSB1 [Ajellomyces capsulatus G186AR]
  misc_feature (1)..(614): NCBI GI: 238508549 Blast Desc: Hsp70 chaperone (HscA), [Aspergillus flavus NRRL3357] gi|220688985|gb|EED45337.1| Hsp70 chaperone (HscA), [Aspergillus flavus NRRL3357]
  misc_feature (51)..(386): SWISSPROT Homolog: EC 3.6.1.3 Adenosinetriphosphatase
  misc_feature: Useful for introducing or modulating the production of volatile compounds
MADEVYDGAIGIDLGTTYSCVATYEGNNVEIIANEQGSFTTPSYVSFNEKERLIGEAAKNQAAMNPVNTVFDVKRLIGRPFSDPIVKKDIESWPFKVVEQGTNPVIQVQYLGETKTFSAQEISAMVLTKMKEIAETKLGKKVEKAVITVPAYFNDNQRQATKDAGAISGLNVLRIINEPTAAAIAYGLGSNKSNKERNVLIYDLGGGTFDVSLLNIQGGVFTVKATAGDTHLGGQDFDTNLLEHCKKDFQRKTKKDISGDPRALRRLRTACERAKRTLSNGAQTTIEIDSLFDGEDFFLQITRARFEDLNAKAFNGTLEPVAQVLKDAAVDKKAVDEIVLVGGSTRIPKIQKLLSDFFDGKKLEKSINPDEAVAYGAAVQAGILSGKATSADTSDLLLLDVCPLSLGVAMEGNIFAPVVTRGQTVPCLKKRTFTTVADNQQTVQFPVYQGERVNCEDNTSLGEFTLAPIPPMRAGEAVLEVVFEVDVNGILKVTATEKTSGRSANITIANSVGKLSTAEIENMINDAEKFKNTDEAFSKRFEAKQQLEAYIGRVEEIISDPTLSLKLKRGQKEKIEETLSDAMGQLELEESTADDLKKKELALKRLVTKAMSSR

SEQ ID NO: 20399 - DNA, 2351 bp, Muscodor strobelii
  misc_feature: SGI EST ID NO. CUFF.47777.0
  misc_feature: Variant of the nucleotide sequence at SEQ ID NO 20397
gagattcacacaaatagtcccacggcggtcgtatcccctgacctctcacctcgacctctcggttccatctctctccatcccgctcactacagagaacaccgcaaaaatggccgacgaagtttacgatggtgccattggcattgatttgggcacgacctactcctgcgtagccacgtacgagggtaacaatgtcgagatcatcgccaacgagcagggtagcttcaccaccccctcgtacgtctccttcaacgagaaggagcgtctgatcggtgaggctgccaagaaccaggccgccatgaaccccgtcaacaccgtcttcgacgtcaagcgtctgatcggccgtcctttctccgaccccatcgtcaagaaggacatcgagtcgtggcccttcaaggtcgtcgagcagggcaccaaccccgtcatccaggtccagtacctcggcgagaccaagaccttctccgcccaggagatctctgccatggtcctcaccaagatgaaggagatcgccgagaccaagctcggcaagaaggttgagaaggccgtcatcaccgtcccggcctacttcaacgataaccagcgtcaggccaccaaggacgccggtgccatctctggcctcaacgtcctccgtatcatcaacgagcccaccgccgccgccatcgcctacggtctcggctctaacaagagcaacaaggagcgcaacgtcctcatctacgatctcggtggcggtactttcgatgtctccctcctcaacatccagggtggtgtcttcaccgtcaaggccaccgccggtgatacccacttgggtggtcaagacttcgacacaaacttgttggagcattgtaaaaaagatttccagaggaagaccaagaaggacatcagcggcgacccacgcgccctccgccgtctccggactgcctgtgagcgtgccaagagaaccctctccaacggtgcccagaccaccatcgagatcgactcgctcttcgatggcgaggatttcttcctccagatcacccgtgctcgtttcgaggacttgaacgccaaggctttcaacggtaccctcgagcccgttgcccaggtcctcaaggatgccgctgtcgacaagaaggccgttgacgagatcgtgctcgtcggtggctctacccgtatccccaagatccagaagttgctcagcgacttctttgacggcaagaagctcgagaagagcatcaaccccgatgaggccgtcgcctacggtgctgccgtccaggctggtatcctttccggaaaggctacttccgctgacacctctgacctcttgctgttggatgtctgccccctttccctcggtgttgccatggagggtaacatcttcgcccccgtcgtcacccgtggccagactgtgccgtgcttgaagaagcgaactttcacaactgttgccgacaaccagcagactgttcagttccctgtgtaccagggtgagcgtgtcaattgcgaggacaacacttccttgggagagttcaccctcgcccccattccccccatgcgggctggtgaggccgtgctcgaggtcgtcttcgaagtcgacgtcaacggtatcctcaaggttactgctaccgagaagacctcgggccgcagcgccaacattaccatcgccaactctgttggtaagctctcgactgctgagattgagaacatgatcaacgacgccgagaagttcaagaacaccgacgaggccttcagcaagcgcttcgaggccaagcagcagctcgaggcctacattggccgggtagaggagatcatctccgacccgaccctatccctcaagctcaagcgtggccagaaggagaagatcgaggagaccctcagcgatgctatgggccagctcgagcttgaggagtccaccgctgatgacctgaagaagaaggaattggctctcaagagactggtaaccaaggccatgtcttcacgataagcgcattaatgatttttaaggggttcaccattgggatataatgggcatgattatcgcccagaggacgaggcgtcttcatgcagagcagagtaatctctgtaatagatcgacatctcaagggcaggggattctgcttcggattgccttgatatgtatggggaaaaacaaaagtcttccggggatagtgaaaacgcttttttctcttacgaataccttcctacctatacaccacacaaccctccgatctcctcaacttcggttctcggcgtatcttgcatgtagactaggaagaatgcacatgagtcaatgaaaagaaatgatcaaaatatatttaaactctgtccctgcaatgccactttccatgtaatcatcatccgaataatcatgagaccaggtttgc

SEQ ID NO: 20400 - DNA, 2151 bp, Muscodor strobelii
  misc_feature: SGI cDNA ID NO. 566884
  misc_feature: Encodes the peptide sequence at SEQ ID NO 20401
atggatagcaagcgcaaggccagcgccgcgagcgcccacgatgccgcgcccgacacgcccgaccgtgctgcgaagcgccgcaaagtcatcgatgagtacggtgacctatcaaccggcgagagcgcagcatcaaccaccgcatatggcttgagtatcctagagtccatccgggccaccacagacaagaatggccgatcggtgtcaccttacttcgagaagctcgtgtcccgggatgagaaccctcaatactacaaacagatcaggctccccttgtgccttgagatcatagagcagaagctcaaggatggcaactactcaacgctctcgtctctcgagagtgatttcaaacgcctcgtgcagaacgccaaagagaccagcgaccgtaactcgaccatctttggcgatgccgaacgcgtgcgcaaagctgtcagtaacttgatggttaagcacaaccccgcctacaagtcgggcaactacacagcagtgccgactcctctacccccgacccctgagccagaggacggcgaggacgaggatgctgacggcgaaggcgatgttgatgctaaagcctccaatggtactgacacggagcctgcatcgcagggtgatgatgagcgcgagggcgtgggggaaggagaagacgaagatgacctagaggacggcgaggaagatcaagaggacgagaataacgatgagccttcttcacggcgcaggcgcggatcaagccgagctcaaccggaatcccgaggccgcaagtcttcgacaccatctagaaaccagtctcaacgcggcgccaaggctgatcactatttcgagaatgttccctttaagaacctaagcttccagcaagcccaggagaagctcgttgaggaactaatccgcaagaaagatgctgctgattaccgctacttcgagcctttcttcaacctaccatcccgtgagctgaaggactactacgaagtcattgcggagcctttgtccttgaaggggctgcagaagcaagtcaaaggccagctaggtcgacgcggggctactggggtgagtgtgttcaagggttgggccgcatttgaagaccaagccagtttgatttggaagaatgcatatcattacaacgaagacggcagtgagatttttgtgatggcccaagaactcgaggaaatgtttcatgatcttctgaaggaggccaaggcacatgtgcccgaaccacagcagcccaagatcaagcttaaactgccagccaccgcagagactcctgcacagccagaccgcaagaaggtgattatccatgttgctggcaaatctagcgctgcgggatcgccggctcctgcgactgctcggccaggagaaggagaggtcacacgtactagcacgccgatgaatcggaatccatttggtggctcgagctcggccggagcttccttgaacctcagccagctagagaaggcgcgcagcatgtctgcctccgttggtccgccgagcccaagcaccaaggttgcgaaatccgaggatacaacgcaatcaacagctgcgcgagctctacccacgcccaccactttccaccacttcgcgccgctgggcacgccgaccacagcccctattaccaacggcaatggtgtgccccagcaagcaacagctgttccccagatcatatcggttcctccacccccacctcctgctcccaagaagagtgccgccgatattctcgaggcacgaaaatacagggcccaggcaattcagctgaaggatgccctcatgccgaagttgaccatcgcttcccaccctcaagttcctgtggagaacccattgacggtgaagctcctcgccagcgccaccgagtaccagcaggaggttgtcctgaatgcgccatcgacgcacttccgaattcaaatcaagccccaaattgcggcttttctagagacacagaatcgtgagtggaaacttaacgtgctactcgacggccagcgccagtacccgtctcatacaccatttgacaacaagggtgagccagtgtttgatgctcaactgcgctacggagtcaatcgcatcgaagtgacagtggtggcggctctggctaagggagagacggacccggatggactgaacatggaacttgagcgattcgttgtccatttgaacttgctacgctattag

SEQ ID NO: 20401 - protein, 716 aa, Muscodor strobelii
  misc_feature: SGI Peptide ID NO. 566884
  misc_feature (49)..(138): Pfam Id: PF00439 Pfam Desc: Bromodomain
  misc_feature (285)..(383): Pfam Id: PF00439 Pfam Desc: Bromodomain
  misc_feature (362)..(383): Pfam Id: PF00439 Pfam Desc: Bromodomain
  misc_feature (285)..(329): Pfam Id: PF00439 Pfam Desc: Bromodomain
  misc_feature (1)..(715): NCBI GI: 46107738 Blast Desc: FG00752.1 [Gibberella zeae PH-1]
  misc_feature (1)..(715): NCBI GI: 85113912 Blast Desc: NCU02078 [Neurospora crassa OR74A] gi|28926393|gb|EAA35369.1| NCU02078 [Neurospora crassa OR74A]
  misc_feature (1)..(458): NCBI GI: 256734775 Blast Desc: NECHADRAFT_75379 [Nectria haematococca mpVI 77-13-4]
  misc_feature (1)..(715): NCBI GI: 116182160 Blast Desc: CHGG_01708 [Chaetomium globosum CBS 148.51] gi|88186005|gb|EAQ93473.1| CHGG_01708 [Chaetomium globosum CBS 148.51]
  misc_feature (1)..(693): NCBI GI: 156053590 Blast Desc: SS1G_05642 [Sclerotinia sclerotiorum 1980] gi|154703423|gb|EDO03162.1| SS1G_05642 [Sclerotinia sclerotiorum 1980]
  misc_feature (18)..(715): NCBI GI: 189203511 Blast Desc: [Pyrenophora tritici-repentis Pt-1C-BFP] gi|187985190|gb|EDU50678.1| [Pyrenophora tritici-repentis Pt-1C-BFP]
  misc_feature (258)..(715): NCBI GI: 171695020 Blast Desc: protein product [Podospora anserina] gi|170947752|emb|CAP59915.1| protein product [Podospora anserina]
  misc_feature (1)..(436): NCBI GI: 154299917 Blast Desc: BC1G_10849 [Botryotinia fuckeliana B05.10] gi|150857129|gb|EDN32321.1| BC1G_10849 [Botryotinia fuckeliana B05.10]
  misc_feature (1)..(715): NCBI GI: 261201706 Blast Desc: conserved [Ajellomyces dermatitidis SLH14081] gi|239590164|gb|EEQ72745.1| conserved [Ajellomyces dermatitidis SLH14081] gi|239611879|gb|EEQ88866.1| conserved [Ajellomyces
  misc_feature (40)..(715): NCBI GI: 169603281 Blast Desc: SNOG_04649 [Phaeosphaeria nodorum SN15] gi|160706365|gb|EAT88409.2| SNOG_04649 [Phaeosphaeria nodorum SN15]
MDSKRKASAASAHDAAPDTPDRAAKRRKVIDEYGDLSTGESAASTTAYGLSILESIRATTDKNGRSVSPYFEKLVSRDENPQYYKQIRLPLCLEIIEQKLKDGNYSTLSSLESDFKRLVQNAKETSDRNSTIFGDAERVRKAVSNLMVKHNPAYKSGNYTAVPTPLPPTPEPEDGEDEDADGEGDVDAKASNGTDTEPASQGDDEREGVGEGEDEDDLEDGEEDQEDENNDEPSSRRRRGSSRAQPESRGRKSSTPSRNQSQRGAKADHYFENVPFKNLSFQQAQEKLVEELIRKKDAADYRYFEPFFNLPSRELKDYYEVIAEPLSLKGLQKQVKGQLGRRGATGVSVFKGWAAFEDQASLIWKNAYHYNEDGSEIFVMAQELEEMFHDLLKEAKAHVPEPQQPKIKLKLPATAETPAQPDRKKVIIHVAGKSSAAGSPAPATARPGEGEVTRTSTPMNRNPFGGSSSAGASLNLSQLEKARSMSASVGPPSPSTKVAKSEDTTQSTAARALPTPTTFHHFAPLGTPTTAPITNGNGVPQQATAVPQIISVPPPPPPAPKKSAADILEARKYRAQAIQLKDALMPKLTIASHPQVPVENPLTVKLLASATEYQQEVVLNAPSTHFRIQIKPQIAAFLETQNREWKLNVLLDGQRQYPSHTPFDNKGEPVFDAQLRYGVNRIEVTVVAALAKGETDPDGLNMELERFVVHLNLLRY

SEQ ID NO: 20402 - DNA, 3326 bp, Muscodor strobelii
  misc_feature: SGI EST ID NO. CUFF.47791.1
  misc_feature: Variant of the nucleotide sequence at SEQ ID NO 20400
cagcaacccacggggcagcccacagtcgccttggcacccaggcttgcttctttcccagccagaacgcagatgcacacccacgactcacgtcggttaagtgcgtacatcgtcgaaaaatcgcctcgcattatgggcattgtgtccttctgcttgcatattcatacgtcttaattgtttcctattttgccagccccggaccagccgtgcaagccggatcggcggtcgctagatgccacagggccattgcaccctcgcgcgctgccagcgatccacagtcgctaccgtagtcccatcgaccgcaatccgcgttccatctcaatcacaaccacttgcgccggcgctcgacgtccacttgcgacacagccttagggatggatagcaagcgcaaggccagcgccgcgagcgcccacgatgccgcgcccgacacgcccgaccgtgctgcgaagcgccgcaaagtcatcgatgagtacggtgacctatcaaccggcgagagcgcagcatcaaccaccgcatatggcttgagtatcctagagtccatccgggccaccacagacaagaatggccgatcggtgtcaccttacttcgagaagctcgtgtcccgggatgagaaccctcaatactacaaacagatcaggctccccttgtgccttgagatcatagagcagaagctcaaggatggcaactactcaacgctctcgtctctcgagagtgatttcaaacgcctcgtgcagaacgccaaagagaccagcgaccgtaactcgaccatctttggcgatgccgaacgcgtgcgcaaagctgtcagtaacttgatggttaagcacaaccccgcctacaagtcgggcaactacacagcagtgccgactcctctacccccgacccctgagccagaggacggcgaggacgaggatgctgacggcgaaggcgatgttgatgctaaagcctccaatggtactgacacggagcctgcatcgcagggtgatgatgagcgcgagggcgtgggggaaggagaagacgaagatgacctagaggacggcgaggaagatcaagaggacgagaataacgatgagccttcttcacggcgcaggcgcggatcaagccgagctcaaccggaatcccgaggccgcaagtcttcgacaccatctagaaaccagtctcaacgcggcgccaaggctgatcactatttcgagaatgttccctttaagaacctaagcttccagcaagcccaggagaagctcgttgaggaactaatccgcaagaaagatgctgctgattaccgctacttcgagcctttcttcaacctaccatcccgtgagctgaaggactactacgaagtcattgcggagcctttgtccttgaaggggctgcagaagcaagtcaaaggccagctaggtcgacgcggggctactggggtgagtgtgttcaagggttgggccgcatttgaagaccaagccagtttgatttggaagaatgcatatcattacaacgaagacggcagtgagatttttgtgatggcccaagaactcgaggaaatgtttcatgatcttctgaaggaggccaaggcacatgtgcccgaaccacagcagcccaagatcaagcttaaactgccagccaccgcagagactcctgcacagccagaccgcaagaaggtgattatccatgttgctggcaaatctagcgctgcgggatcgccggctcctgcgactgctcggccaggagaaggagaggtcacacgtactagcacgccgatgaatcggaatccatttggtggctcgagctcggccggagcttccttgaacctcagccagctagagaaggcgcgcagcatgtctgcctccgttggtccgccgagcccaagcaccaaggttgcgaaatccgaggatacaacgcaatcaacagctgcgcgagctctacccacgcccaccactttccaccacttcgcgccgctgggcacgccgaccacagcccctattaccaacggcaatggtgtgccccagcaagcaacagctgttccccagatcatatcggttcctccacccccacctcctgctcccaagaagagtgccgccgatattctcgaggcacgaaaatacagggcccaggcaattcagctgaaggatgccctcatgccgaagttgaccatcgcttcccaccctcaagttcctgtggagaacccattgacggtgaagctcctcgccagcgccaccgagtaccagcaggaggttgtcctgaatgcgccatcgacgcacttccgaattcaaatcaagccccaaattgcggcttttctagagacacagaatcgtgagtggaaacttaacgtgctactcgacggccagcgccagtacccgtctcatacaccatttgacaacaagggtgagccagtgtttgatgctcaactgcgctacggagtcaatcgcatcgaagtgacagtggtggcggctctggctaagggagagacggacccggatggactgaacatggaacttgagcgattcgttgtccatttgaacttgctacgctattagcataagccggcaacgactgcgacgacgtcggctttgccttattagatcggagttagtggggggtacggggcggaaacagggtcaggatggctgattctgcgtctgcgtctgcttttcgtgttttctctttgatgtttgctacagatgtataagtatacccaagattggctctcggcgagcacgataaaagggccacacagggacagggacagggcaagaggcaccgagctaaagtcgtctcagtgttaacaggaacacaagccaatgtctagttgtttaggagtagatacgagtggtgatatagacggtcggtctctaatgtgcgagggttaccagactagcggaaagtacgtgtgctgtagaggagtcaataaaatgcaatccgtacaagtaagccaactgcactgctgattatgtacattaatggcaatcttatctctcatgccgtattctcttgtttcacaacttttggtaattctcagtacaaatcgatgactgctcacggcaaaaccagcagtgagcagcttacaatgtgcatcaggtcctagatagaatacatatatagataattgacatccagctagaagtcttatatacacaatatcatggtagatctccatgaccatggagtctgatttgtacgccctaattcaaaacttttcaacgtggatgtatatctctgataccacacgaatcgattcgattgggtattcggaccgtgttcagaattttatgcactttgctaggtattcgctgtattatgaattgtccttcaacctatgggcaatgagacattagaagcgg

SEQ ID NO: 20403 - DNA, 342 bp, Muscodor strobelii
  misc_feature: SGI cDNA ID NO. 566885
  misc_feature: Reduced expression when VOC is produced
  misc_feature: Encodes the peptide sequence at SEQ ID NO 20404
atgcctgtcaccgccgaggagatgagccgccgcaaccacgagccccgtccgcttaaggatagcgaacgcgcgcgtctggaggagttcattgacctcatccactactctgcccgctattccgacagcgagtacgagtaccgtcacgtccagctccccaaggccatgctcaaagccatccccaaggagtaccacgacacatccaagggcaccctgaagcttctgtgggaggacgagtggcgcgccatgggcatcacacagagcttgggctgggagcactacgaggtccacgagccagagcctcacatcctgctcttcaagcgacccctcaacttccagccgtaa

SEQ ID NO: 20404 - protein, 113 aa, Muscodor strobelii
  misc_feature: SGI Peptide ID NO. 566885
  misc_feature (29)..(110): Pfam Id: PF01111 Pfam Desc: Cyclin-dependent kinase regulatory subunit
  misc_feature (7)..(113): NCBI GI: 164429677 Blast Desc: NCU02079 [Neurospora crassa OR74A] gi|157073574|gb|EAA35370.2| NCU02079 [Neurospora crassa OR74A]
  misc_feature (7)..(113): NCBI GI: 171695018 Blast Desc: protein product [Podospora anserina] gi|170947751|emb|CAP59914.1| protein product [Podospora anserina]
  misc_feature (7)..(113): NCBI GI: 261358860 Blast Desc: cyclin-dependent kinases regulatory subunit [Verticillium albo-atrum VaMs.102]
  misc_feature (7)..(113): NCBI GI: 212541432 Blast Desc: cell cycle regulatory protein Cks/Suc1, [Penicillium marneffei ATCC 18224] gi|210068170|gb|EEA22262.1| cell cycle regulatory protein Cks/Suc1, [Penicillium marneffei ATCC 18224]
  misc_feature (7)..(106): NCBI GI: 46120526 Blast Desc: FG04910.1 [Gibberella zeae PH-1]
  misc_feature (7)..(106): NCBI GI: 39974343 Blast Desc: MGG_00682 [Magnaporthe grisea 70-15] gi|145018390|gb|EDK02669.1| MGG_00682 [Magnaporthe grisea 70-15]
  misc_feature (7)..(113): NCBI GI: 156053592 Blast Desc: cyclin-dependent kinases regulatory subunit [Sclerotinia sclerotiorum 1980] gi|154703424|gb|EDO03163.1| cyclin-dependent kinases regulatory subunit [Sclerotinia 1980]
  misc_feature (7)..(113): NCBI GI: 154299919 Blast Desc: BC1G_10850 [Botryotinia fuckeliana B05.10] gi|150857130|gb|EDN32322.1| BC1G_10850 [Botryotinia fuckeliana B05.10]
  misc_feature (7)..(113): NCBI GI: 154285926 Blast Desc: HCAG_00804 [Ajellomyces capsulatus NAm1] gi|150407399|gb|EDN02940.1| HCAG_00804 [Ajellomyces capsulatus NAm1] gi|225558275|gb|EEH06559.1| cyclin-dependent protein kinase
  misc_feature (7)..(113): NCBI GI: 261201704 Blast Desc: cell cycle regulatory protein Cks/Suc1 [Ajellomyces dermatitidis SLH14081] gi|239590163|gb|EEQ72744.1| cell cycle regulatory protein Cks/Suc1 [Ajellomyces dermatitidis SLH14081]
  misc_feature: Useful for introducing or modulating the production of volatile compounds
MPVTAEEMSRRNHEPRPLKDSERARLEEFIDLIHYSARYSDSEYEYRHVQLPKAMLKAIPKEYHDTSKGTLKLLWEDEWRAMGITQSLGWEHYEVHEPEPHILLFKRPLNFQP

SEQ ID NO: 20405 - DNA, 877 bp, Muscodor strobelii
  misc_feature: SGI EST ID NO. CUFF.47773.0
  misc_feature: Variant of the nucleotide sequence at SEQ ID NO 20403
ctctcccacgttgcaccatctccgacagcactcgcctgcccgctgagcacgagctagcagttagtctgatcgtgtctccagttgcatcagtaaataaacctcaactcgcgctttctctgcggattacagcacccgcaacacacgacgcaagacgcacttctctagcactcgtgaaacagagcatcttgtttcaattattgtttccgagtctggtttctgtcctagattgtgtcccatcctctccctctctctgcctcgcgcatttgtatcctgctgctcgtgtgcgggcctcgctccgattgctgccactttcagagctttctctgcatattgtgtcgttccctacctacctgccccgctgtcctcgcttcctctgtcgcgatgcctgtcaccgccgaggagatgagccgccgcaaccacgagccccgtccgcttaaggatagcgaacgcgcgcgtctggaggagttcattgacctcatccactactctgcccgctattccgacagcgagtacgagtaccgtcacgtccagctccccaaggccatgctcaaagccatccccaaggagtaccacgacacatccaagggcaccctgaagcttctgtgggaggacgagtggcgcgccatgggcatcacacagagcttgggctgggagcactacgaggtccacgagccagagcctcacatcctgctcttcaagcgacccctcaacttccagccgtaaccgtcctcacgtacgacgatacgcgacacaccagcaacagcacactggaccctgaccagggctctctactcctcacctacctacctccatattgcatagcgataatgttttgatgattacaactgatatgatacggacgccctttggggctttt

SEQ ID NO: 20406 - DNA, 945 bp, Muscodor strobelii
  misc_feature: SGI cDNA ID NO. 566886
  misc_feature: Encodes the peptide sequence at SEQ ID NO 20407
gtcggaacaatcaagagcaacgttgtcgcctttcagtcaggagacgtattcatgtccgttgatgcgggaggcggaacgacagatctggcgttaatgcaagtcaaagaggcccgtgagcctttcccatcgctctcccaaatcagtcaggttgacggcattggcattggagccacactgattgatcgagcttttgtgacatacatcaacacccgtcttggtaaacatcgcgacctcattgatcaacttccgccgaattgcggcgagaggcttgcgaaaagtgataagttcaagacaacaaaacacaaatttggagagaaggtatatcaatccaactgctacaagatgacgctagagggtgcggctttccatctgaaccatgcaggagccggtatagaagaaggcaaggtggtagtctcttgggaacaaatgcaagatttgtttgatccacacgttgagggcacattgcagaagattcgcgaacagcttgattgggttgagaaacgacacggtggcatttcgattgactatttgatcttgtccggaggccttggcagctcgaaatatgttcgagatcgcctgcaaagagagttgactatcaatcctcatgcttgtgctcagcaaatcaagatcattcaagcatccaacccacagcttgttgttgtcaaggggctactccaagatcgtttgcaaagtcttgactcgaaggtcgctcctgtcattgtcagtcgaattgcaagggcaagttatggcatggtctgtaaacgaaagtataacccattgatccatgtcaatgatattattgagaaggaccattgcgacggagaaaaatacgccctgagccagatcgactggattatcaagaaggtaactccccttgctgaatccaatcttgtgttgatgttgacatacagaagggtgatcatatcagtagcaacacacctataa

SEQ ID NO: 20407 - protein, 314 aa, Muscodor strobelii
  misc_feature: SGI Peptide ID NO. 566886
  misc_feature (5)..(288): NCBI GI: 164427160 Blast Desc: NCU03288 [Neurospora crassa OR74A] gi|157071632|gb|EAA34978.2| conserved [Neurospora crassa OR74A]
  misc_feature (4)..(307): NCBI GI: 154318804 Blast Desc: BC1G_02791 [Botryotinia fuckeliana B05.10] gi|150857921|gb|EDN33113.1| BC1G_02791 [Botryotinia fuckeliana B05.10]
  misc_feature (1)..(288): NCBI GI: 256730469 Blast Desc: NECHADRAFT_29984 [Nectria haematococca mpVI 77-13-4]
  misc_feature (1)..(288): NCBI GI: 256729531 Blast Desc: NECHADRAFT_63182 [Nectria haematococca mpVI 77-13-4]
  misc_feature (1)..(288): NCBI GI: 46120392 Blast Desc: FG04843.1 [Gibberella zeae PH-1]
  misc_feature (1)..(293): NCBI GI: 256732929 Blast Desc: NECHADRAFT_38229 [Nectria haematococca mpVI 77-13-4]
  misc_feature (11)..(298): NCBI GI: 119474527 Blast Desc: NFIA_006060 [Neosartorya fischeri NRRL 181] gi|119407292|gb|EAW17242.1| conserved [Neosartorya fischeri NRRL 181]
  misc_feature (1)..(288): NCBI GI: 46123853 Blast Desc: FG06304.1 [Gibberella zeae PH-1]
  misc_feature (11)..(286): NCBI GI: 261194954 Blast Desc: conserved [Ajellomyces dermatitidis SLH14081] gi|239587753|gb|EEQ70396.1| conserved [Ajellomyces dermatitidis SLH14081]
  misc_feature (11)..(286): NCBI GI: 239610753 Blast Desc: conserved [Ajellomyces dermatitidis ER-3]
VGTIKSNVVAFQSGDVFMSVDAGGGTTDLALMQVKEAREPFPSLSQISQVDGIGIGATLIDRAFVTYINTRLGKHRDLIDQLPPNCGERLAKSDKFKTTKHKFGEKVYQSNCYKMTLEGAAFHLNHAGAGIEEGKVVVSWEQMQDLFDPHVEGTLQKIREQLDWVEKRHGGISIDYLILSGGLGSSKYVRDRLQRELTINPHACAQQIKIIQASNPQLVVVKGLLQDRLQSLDSKVAPVIVSRIARASYGMVCKRKYNPLIHVNDIIEKDHCDGEKYALSQIDWIIKKVTPLAESNLVLMLTYRRVIISVATHL

SEQ ID NO: 20408 - DNA, 1372 bp, Muscodor strobelii
  misc_feature: SGI EST ID NO. CUFF.47830.0
  misc_feature: Variant of the nucleotide sequence at SEQ ID NO 20406
ggaggcggaacgacagatctggcgttaatgcaagtcaaagaggcccgtgagcctttcccatcgctctcccaaatcagtcaggttgacggcattggcattggagccacactgattgatcgagcttttgtgacatacatcaacacccgtcttggtaaacatcgcgacctcattgatcaacttccgccgaattgcggcgagaggcttgcgaaaagtgataagttcaagacaacaaaacacaaatttggagagaaggtatatcaatccaactgctacaagatgacgctagagggtgcggctttccatctgaaccatgcaggagccggtatagaagaaggcaaggtggtagtctcttgggaacaaatgcaagatttgtttgatccacacgttgagggcacattgcagaagattcgcgaacagcttgattgggttgagaaacgacacggtggcatttcgattgactatttgatcttgtccggaggccttggcagctcgaaatatgttcgagatcgcctgcaaagagagttgactatcaatcctcatgcttgtgctcagcaaatcaagatcattcaagcatccaacccacagcttgttgttgtcaaggggctactccaagatcgtttgcaaagtcttgactcgaaggtcgctcctgtcattgtcagtcgaattgcaagggcaagttatggcatggtctgtaaacgaaagtataacccattgatccatgtcaatgatattattgagaaggaccattgcgacggagaaaaatacgccctgagccagatcgactggattatcaagaagggtgatcatatcagtagcaacacacctataatccagactttttcacagaaaatagaccctggagatgctaatcgcacatgggactcgcatgtggtaatctcagacagagatccagatcgcctgccacggaacattcaccaaggggtgaacttgttatgtgtagtcgtaagtgaccttacgggaattaatcatgaagacatggtcaagatgcgaaagtcgaagcgattcttatttaagggtgctaaattttatcaatgcacctttgaaatgcatgctattgtcgcacctgcggagattagatttgaactttggtttgccggacaaaagttttctggcaatcataaaccagtgcgaatcaattgggatagtgagggggtaaaggttggggtccatgttggagttcatgaacttgcagcttaagaccgcaagtccctcaagatcgggtacatgacggatcatgtgatgattgactatacataggacggagtcactgtggtaaatccaattgttcatcgtgcgccagtcacgatcagcaaattgacaatgacatcatattttgaccgatgtgtaactt

SEQ ID NO: 20409 - DNA, 906 bp, Muscodor strobelii
  misc_feature: SGI cDNA ID NO. 566887
  misc_feature: Encodes the peptide sequence at SEQ ID NO 20410
atggccactgctcagagtttagagggcttggtaattgccgggttgatcatcgttcctattgctatcggcctccgtttctgggcgcgtatttaccaacgggccttcagttacgacgacatcgttcttgctatttcactcattactttcatcattttctccgcctttttgctcctatcggtgcaatttggatatggtacgatacaacctggacaacggcaagacgcgatacttggtctgaagctcgcgtatgttatcacatctgcctttgtcaagactggcgtcgcccttgttctctttcggatcaacgtcaacagaacgatacgaaacaccctgattagctgcatgactgtgatatttatcctcatactggtcttcttctttttactcactttccgctgtcggccaatctcagtgaactggggtgttggaacagggcagtgtttgccggactcaacaattcgcaacactggaatcgcactctctgtcgttgacatactatcgaattggttctattcattactgccggtggtcctggtccacggggtccaaatgccacgtggcttgaaggctgccgtaatagttttacttggtctaggtctagtatctagtattgcaactgcggtcagactcaagtacatcctgcaagcgagagatcaacatgacgcgtcgcgaacgacacaggagattgaaagcaacttgcaagcccttttgtggagctatgtggaggtttttctagctatactcgctagttcacttgcggctctacggccactgctcaggcttgcgaatgagacgatcaacaagtcatttctaaggacaccacaaagcatagtatcgcgcagaagtcatacagggcatcaaaagcttagaagcgaaccagtcgccttcgagatggaaccgcaatag

SEQ ID NO: 20410 - protein, 301 aa, Muscodor strobelii
  misc_feature: SGI Peptide ID NO. 566887
  misc_feature (10)..(259): NCBI GI: 46117316 Blast Desc: FG04500.1 [Gibberella zeae PH-1]
  misc_feature (20)..(260): NCBI GI: 46125517 Blast Desc: FG07136.1 [Gibberella zeae PH-1]
  misc_feature (1)..(260): NCBI GI: 46126829 Blast Desc: FG07792.1 [Gibberella zeae PH-1]
  misc_feature (20)..(260): NCBI GI: 256730940 Blast Desc: NECHADRAFT_48436 [Nectria haematococca mpVI 77-13-4]
  misc_feature (1)..(260): NCBI GI: 256733374 Blast Desc: [Nectria haematococca mpVI 77-13-4]
  misc_feature (15)..(260): NCBI GI: 46139657 Blast Desc: FG11343.1 [Gibberella zeae PH-1]
  misc_feature (15)..(288): NCBI GI: 189194021 Blast Desc: conserved [Pyrenophora tritici-repentis Pt-1C-BFP] gi|187978913|gb|EDU45539.1| conserved [Pyrenophora tritici-repentis Pt-1C-BFP]
  misc_feature (4)..(270): NCBI GI: 119497783 Blast Desc: NFIA_033180 [Neosartorya fischeri NRRL 181] gi|119413813|gb|EAW23752.1| conserved [Neosartorya fischeri NRRL 181]
  misc_feature (1)..(260): NCBI GI: 154304445 Blast Desc: BC1G_09098 [Botryotinia fuckeliana B05.10] gi|150854078|gb|EDN29270.1| BC1G_09098 [Botryotinia fuckeliana B05.10]
  misc_feature (20)..(301): NCBI GI: 259485899 Blast Desc: TPA: P-type ATPase, (Eurofung) [Aspergillus nidulans FGSC A4]
MATAQSLEGLVIAGLIIVPIAIGLRFWARIYQRAFSYDDIVLAISLITFIIFSAFLLLSVQFGYGTIQPGQRQDAILGLKLAYVITSAFVKTGVALVLFRINVNRTIRNTLISCMTVIFILILVFFFLLTFRCRPISVNWGVGTGQCLPDSTIRNTGIALSVVDILSNWFYSLLPVVLVHGVQMPRGLKAAVIVLLGLGLVSSIATAVRLKYILQARDQHDASRTTQEIESNLQALLWSYVEVFLAILASSLAALRPLLRLANETINKSFLRTPQSIVSRRSHTGHQKLRSEPVAFEMEPQ

SEQ ID NO: 20411 - DNA, 1221 bp, Muscodor strobelii
  misc_feature: SGI EST ID NO. CUFF.47803.0
  misc_feature: Variant of the nucleotide sequence at SEQ ID NO 20409
gtactttttcatatctcagctcgcgtatgttatcacatctgcctttgtcaagactggcgtcgcccttgttctctttcggatcaacgtcaacagaacgatacgaaacaccctgattagctgcatgactgtgatatttatcctcatactggtcttcttctttttactcactttccgctgtcggccaatctcagtgaactggggtgttggaacagggcagtgtttgccggactcaacaattcgcaacactggaatcgcactctctgtcgttgacatactatcgaattggttctattcattactgccggtggtcctggtccacggggtccaaatgccacgtggcttgaaggctgccgtaatagttttacttggtctaggtctagttattgcaactgcggtcagactcaagtacatcctgcaagcgagagatcaacatgacgcgtcgcgaacgacacaggagattgaaagcaacttgcaagcccttttgtggagctatgtggaggtttttctagctatactcgctagttcacttgcggctctacggccactgctcaggcttgcgaatgagacgatcaacaagtcatttctaaggacaccacaaagcatagtatcgcgcagaagtcatacagggcatcaaaagcttagaagcgaaccagtcgccttcgagatggaaccgcaatagtgctcttgcaatgcaagtcttggcaagctcggcttgatgagggtaacgggcgttgaaccaccgggatcgttgaccgagatcgttgagatggttttgggcgattcaaacgtgtcatcgaggcatcttgatacagtgtcgctgcctattagagccgccgccgatcatagccgagctatacgtccagcattcactacgcgacattcggcagcctagaagtcaatggtcacttgtatgcctcaatagaggagcccgaagatacagcgaaacccgacagagccaccccacaatagctctgtctatataacttgcgtcaatttagggaaatttattctgcaactgattggctaccgtttactcacatatctgatgcctgggtgccgtaacatgccaatagcaactttcccctaatgagtgcttggtcagattgctaagttgagatcctgagatctccagcgggtttaccataagtatatgtctagacgagcaggtacttcggattcggtaacaatttctatcggcagcatcgctcaggcgacgagaga

SEQ ID NO: 20412 - DNA, 690 bp, Muscodor strobelii
  misc_feature: SGI cDNA ID NO. 566888
  misc_feature: Encodes the peptide sequence at SEQ ID NO 20413
atgaagatctcagtatcgttcttgacagtggctcttgcgtccgtctctgcggcgccgttcgccacggacttgatagaccgtgagctggctaagccagaagcccgagacctcgaggtgcagcaaactgttggcgtgaccgctaacgaattcctggatggcgaatgtcgcagcgtcgttctcatttatgcgcgtggaagtgcacaactgggaaatatcggccagcagccaggtcctcaacttgccaacgccctgaaggctgcactgggcgcctcaatagttgcagctcagggcgtgatctattcggcatcttggcttggtaacttagactctggcggctgtccatccaacgaggctgcggacatggcgacgttgatcggagatgtcgcgtcacgatgtccgtcgtccaagattgtagtatgtggatactcacagggtgctgcaatggttcatcgatcgatccagaagctttcgactgctgtgaaagccaatatcgccgcagctgtcacttttggtgacactcaaaaggcgcaggatggaggccaaatctctgggtttgataccagcaagaccaagatcatctgtaatacgggtgaccagctttgtgagggtactctcaacctcaccattgagcatatgaactatctctcgagtgtcacgccggctgtgacatttattacgtctatgatttga

SEQ ID NO: 20413 - protein, 229 aa, Muscodor strobelii
  misc_feature: SGI Peptide ID NO. 566888
  misc_feature (53)..(229): Pfam Id: PF01083 Pfam Desc: Cutinase
  misc_feature (43)..(229): NCBI GI: 261357783 Blast Desc: cutinase-2 [Verticillium albo-atrum VaMs.102]
  misc_feature (4)..(229): NCBI GI: 145610993 Blast Desc: MGG_00734 [Magnaporthe grisea 70-15] gi|145018334|gb|EDK02613.1| MGG_00734 [Magnaporthe grisea 70-15]
  misc_feature (45)..(229): NCBI GI: 67538278 Blast Desc: AN5309.2 [Aspergillus nidulans FGSC A4] gi|40743279|gb|EAA62469.1| AN5309.2 [Aspergillus nidulans FGSC A4] gi|259485251|tpe|CBF82125.1| TPA: cutinase, (AFU_orthologue;
  misc_feature (37)..(229): NCBI GI: 169624696 Blast Desc: SNOG_15608 [Phaeosphaeria nodorum SN15] gi|111055863|gb|EAT76983.1| SNOG_15608 [Phaeosphaeria nodorum SN15]
  misc_feature (53)..(229): NCBI GI: 189198862 Blast Desc: cutinase precursor [Pyrenophora tritici-repentis Pt-1C-BFP] gi|187982867|gb|EDU48355.1| cutinase precursor [Pyrenophora tritici-repentis Pt-1C-BFP]
  misc_feature (5)..(229): NCBI GI: 67542033 Blast Desc: AN7180.2 [Aspergillus nidulans FGSC A4] gi|40742242|gb|EAA61432.1| AN7180.2 [Aspergillus nidulans FGSC A4] gi|95025937|gb|ABF50882.1| cutinase [Emericella nidulans] ;
  misc_feature (10)..(229): NCBI GI: 115390627 Blast Desc: cutinase precursor [Aspergillus terreus NIH2624] gi|114193742|gb|EAU35442.1| cutinase precursor [Aspergillus terreus NIH2624]
  misc_feature (46)..(229): NCBI GI: 46138239 Blast Desc: FG10634.1 [Gibberella zeae PH-1]
  misc_feature (29)..(229): NCBI GI: 238492321 Blast Desc: cutinase, [Aspergillus flavus NRRL3357] gi|220695891|gb|EED52233.1| cutinase, [Aspergillus flavus NRRL3357]
  misc_feature (8)..(225): NCBI GI: 169616334 Blast Desc: SNOG_11338 [Phaeosphaeria nodorum SN15] gi|111059926|gb|EAT81046.1| SNOG_11338 [Phaeosphaeria nodorum SN15]
  misc_feature (37)..(229): SWISSPROT Homolog: EC 3.1.1.74 Cutinase
MKISVSFLTVALASVSAAPFATDLIDRELAKPEARDLEVQQTVGVTANEFLDGECRSVVLIYARGSAQLGNIGQQPGPQLANALKAALGASIVAAQGVIYSASWLGNLDSGGCPSNEAADMATLIGDVASRCPSSKIVVCGYSQGAAMVHRSIQKLSTAVKANIAAAVTFGDTQKAQDGGQISGFDTSKTKIICNTGDQLCEGTLNLTIEHMNYLSSVTPAVTFITSMI

SEQ ID NO: 20414 - DNA, 486 bp, Muscodor strobelii
  misc_feature: SGI cDNA ID NO. 566889
  misc_feature: Encodes the peptide sequence at SEQ ID NO 20415
atgttttgcaatgacatacaagccctttgcgttaaggctgcctttggatccttcgagttctggcttttgcacatatatacccggcccttgaacttttacctccgacccctcaagttctacgcgaaccgcaagtgcgtcgagttcagccttttcgatatgcttttgtgctatggccccaatgcttccgatggcggatccgatgatagcctgaagcttaatgctttcggcatgactccacgcttagagaaggatgtgatgggtggtcctgtcaaagacgcgacgctcgaagaactacccggtgatgtagaagagaatgggttagaggtagtagacgatggagagaatgaagagatactggatggagtcgtaaatatcggggtgctagacggagtatttgaagtcgccgcagataaattcgaaggggactgccgtgtaggactagaagacgaaacggaagcgatggcttctgtcgggggccagatgtaa

SEQ ID NO: 20415 - protein, 161 aa, Muscodor strobelii
  misc_feature: SGI Peptide ID NO. 566889
MFCNDIQALCVKAAFGSFEFWLLHIYTRPLNFYLRPLKFYANRKCVEFSLFDMLLCYGPNASDGGSDDSLKLNAFGMTPRLEKDVMGGPVKDATLEELPGDVEENGLEVVDDGENEEILDGVVNIGVLDGVFEVAADKFEGDCRVGLEDETEAMASVGGQM

SEQ ID NO: 20416 - DNA, 1164 bp, Muscodor strobelii
  misc_feature: SGI cDNA ID NO. 566890
  misc_feature: Encodes the peptide sequence at SEQ ID NO 20417
atgcaagcgccgccacataaaatgcaacgaaggccgaccgtcctgtgctcaatttcaggcatagttagctaccgggattgtcgatatctggggcatacagttggagctgcagaaccccaactggagaatcctggaagcctacccggctcggataccacctcttctgttcagcatccggcagttgggtctgcccaaagtgcagaattgcagcccaccagtggtaaccaatcgccacatcgctccgtggcgccggcactaaaggaatccgtgaacgtccgtcacatggagatcttgcttcactttaaattctcgattgctattccagaattggatatcgacttcgaccacggtgggactgccatggtaaccaagctggccttgaagttcccctggctactccacgctgtgctggggatttctgcacgccacttagccacccaaagtccaaacgtagcggacacctatctcccccttgcctaccagtttcaaactcaagctgttgctttcttcaccgagagcaggatgcaaattgacgagatgagttgttcgccagtcctgctgttctccgcaatccttgggcgccacatgtttgtcgataccttggctggcgaaggggcagataagacgatatcccttgatacttactgccattatgtgcagactcgtcagggtctgcgcgccatagtggatgattctaggcacattcttcctcgacagaccatttggccattcctactctttaccgggatccaacagcttagaaaaggacgtggcacggagctagcaggtcttagtcgttgggtgcaggaatcaccaggtcttgatcacgaaactctagaggctctagaaacaagcgtggacttactacaatttggcattgacgagatgtgtagcttaccgacgaatgccctccagatccaaatggcattcatctggggggtctgcaacccagcgaagtttaatgatttggtgttacaacgattgccgcaagcgctcgtgattcttgcccattactcagtattgctgtattacgccagacacaattggcaaattcgcgatgcaagctatagaattttgcagatggtctccagcgaactggggccaaggtatgagagccagctcggttgggtacgagatgtggtgagacatccccttagccactga

SEQ ID NO: 20417 - protein, 387 aa, Muscodor strobelii
  misc_feature: SGI Peptide ID NO. 566890
  misc_feature (90)..(381): NCBI GI: 39968393 Blast Desc: MGG_02289 [Magnaporthe grisea 70-15] gi|145014144|gb|EDJ98785.1| MGG_02289 [Magnaporthe grisea 70-15]
  misc_feature (22)..(385): NCBI GI: 212530564 Blast Desc: conserved [Penicillium marneffei ATCC 18224] gi|210074837|gb|EEA28924.1| conserved [Penicillium marneffei ATCC 18224]
  misc_feature (9)..(381): NCBI GI: 256731951 Blast Desc: NECHADRAFT_80860 [Nectria haematococca mpVI 77-13-4]
  misc_feature (9)..(382): NCBI GI: 259483264 Blast Desc: TPA: conserved [Aspergillus nidulans FGSC A4]
  misc_feature (113)..(381): NCBI GI: 169619469 Blast Desc: SNOG_12931 [Phaeosphaeria nodorum SN15] gi|160703830|gb|EAT79731.2| SNOG_12931 [Phaeosphaeria nodorum SN15]
  misc_feature (22)..(382): NCBI GI: 67900778 Blast Desc: AN7376.2 [Aspergillus nidulans FGSC A4] gi|40742557|gb|EAA61747.1| AN7376.2 [Aspergillus nidulans FGSC A4]
  misc_feature (9)..(376): NCBI GI: 256729968 Blast Desc: NECHADRAFT_45340 [Nectria haematococca mpVI 77-13-4]
  misc_feature (90)..(381): NCBI GI: 171685266 Blast Desc: protein product [Podospora anserina] gi|170942594|emb|CAP68246.1| protein product [Podospora anserina]
  misc_feature (90)..(374): NCBI GI: 256728155 Blast Desc: NECHADRAFT_53993 [Nectria haematococca mpVI 77-13-4]
  misc_feature (90)..(386): NCBI GI: 119473723 Blast Desc: NFIA_001890 [Neosartorya fischeri NRRL 181] gi|119406890|gb|EAW16840.1| conserved [Neosartorya fischeri NRRL 181]
MQAPPHKMQRRPTVLCSISGIVSYRDCRYLGHTVGAAEPQLENPGSLPGSDTTSSVQHPAVGSAQSAELQPTSGNQSPHRSVAPALKESVNVRHMEILLHFKFSIAIPELDIDFDHGGTAMVTKLALKFPWLLHAVLGISARHLATQSPNVADTYLPLAYQFQTQAVAFFTESRMQIDEMSCSPVLLFSAILGRHMFVDTLAGEGADKTISLDTYCHYVQTRQGLRAIVDDSRHILPRQTIWPFLLFTGIQQLRKGRGTELAGLSRWVQESPGLDHETLEALETSVDLLQFGIDEMCSLPTNALQIQMAFIWGVCNPAKFNDLVLQRLPQALVILAHYSVLLYYARHNWQIRDASYRILQMVSSELGPRYESQLGWVRDVVRHPLSH

SEQ ID NO: 20418 - DNA, 1870 bp, Muscodor strobelii
  misc_feature: SGI EST ID NO. CUFF.47852.0
  misc_feature: Variant of the nucleotide sequence at SEQ ID NO 20416
caacagcccgtgctcttacgtcaactaagacgggatctgctgcggagagtatggatatgggtgcctgttctgcagacaattcgatgcgaggtccgaaatttaaatacgagtccgcgtatttatctgcaagacatccgcggatacctttttcgacagctgcccatttcaaaagtagacgggccaagtttgctcgtacgaagactgtcaagtattatcgattgacacgcgtgcgctgctgcccactgaggctgatggcgcaacatcgggtatgaatcgtcggaggcatcgaaagtctcgcctcggctgccaagaatgcaagcgccgccacataaaatgcaacgaaggccgaccgtcctgtgctcaatgcatagttagctaccgggattgtcgatatctggggcatacagttggagctgcagaaccccaactggagaatcctggaagcctacccggctcggataccacctcttctgttcagcatccggcagttgggtctgcccaaagtgcagaattgcagcccaccagtggtaaccaatcgccacatcgctccgtggcgccggcactaaaggaatccgtgaacgtccgtcacatggagatcttgcttcactttaaattctcgattgctattccagaattggatatcgacttcgaccacggtgggactgccatggtaaccaagctggccttgaagttcccctggctactccacgctgtgctggggatttctgcacgccacttagccacccaaagtccaaacgtagcggacacctatctcccccttgcctaccagtttcaaactcaagctgttgctttcttcaccgagagcaggatgcaaattgacgagatgagttgttcgccagtcctgctgttctccgcaatccttgggcgccacatgtttgtcgataccttggctggcgaaggggcagataagacgatatcccttgatacttactgccattatgtgcagactcgtcagggtctgcgcgccatagtggatgattctaggcacattcttcctcgacagaccatttggccattcctactctttaccgggatccaacagcttagaaaaggacgtggcacggagctagcaggtcttagtcgttgggtgcaggaatcaccaggtcttgatcacgaaactctagaggctctagaaacaagcgtggacttactacaatttggcattgacgagatgtgtagcttaccgacgaatgccctccagatccaaatggcattcatctggggggtctgcaacccagcgaagtttaatgatttggtgttacaacgattgccgcaagcgctcgtgattcttgcccattactcagtattgctgtattacgccagacacaattggcaaattcgcgatgcaagctatagaattttgcagatggtctccagcgaactggggccaaggtatgagagccagctcggttgggtacgagatgtggtgagacatccccttagccactgagatgagtctcgtcgtcagtgcaccctacattatgtataaagagcaaagcactgcacctcagccacaatacctcgactggagaatagtcaaaactcgcccctgggcggcttctagctcgagggtagcgctctgcgatgatatatagagaaagtcgggctaaatgcctacgcggtgcgtgtagaactcgaataattgcagagagaaccccgagcgcacgatatttaggtatataaggcagaacacgaaggttccgagggagatcctaagtcgcgggacttatatcgtaaagcatgagctggatgcggcgagtctgagaaaaaaccatcctgcaattgctgagaggggcgagatggcgaggccggtctgcaccaagttagtgaatgagagaatgacctgcgt

SEQ ID NO: 20419 - DNA, 735 bp, Muscodor strobelii
  misc_feature: SGI cDNA ID NO. 566891
  misc_feature: Encodes the peptide sequence at SEQ ID NO 20420
atggttaccaggatctgcggctctgctggaatatgctaccttcagcatggtacaacatacacatacacggccactgagacacgaatactttcaaactcagacggccgtctcatcacaactgtcgtcacgtacacaaataccacaacagaagcaccttacacgccaccgccaacaggcgcgagcctctcatctactgggtctccaggtacatctaaacccccagaagacactacgacctcgggtaattcgcagggctcgaaactccagaccattttagttcctgtccttattgcaagccttacggtcagtgttcttcttctggcgatcgttttaacaagcagatggagatggcgaaagaaacgcgcgttgcggtcacagaagttgactgatactgctgtataccacgagccatacatgggcaagccagagcttgaaggcagcgcaccgcaagtctacacggacaaggccgaattggatgcgctcgcagtacgcgccgagctccaaggttccgagccggaagcccgtggacacggtatctatgtacaaaagcctgagctcgaggggtcaaaatggatcttcggtattcgggacttctacctatatgtcattggcaaacacgagttggatgcggtgaaccgcaggaagcggctgacagttatttcggaaagcagcgagggtttaagacctaactacactgcatcagtggatgagagaatgactagtgcgttatcttga

SEQ ID NO: 20420 - protein, 244 aa, Muscodor strobelii
  misc_feature: SGI Peptide ID NO. 566891
MVTRICGSAGICYLQHGTTYTYTATETRILSNSDGRLITTVVTYTNTTTEAPYTPPPTGASLSSTGSPGTSKPPEDTTTSGNSQGSKLQTILVPVLIASLTVSVLLLAIVLTSRWRWRKKRALRSQKLTDTAVYHEPYMGKPELEGSAPQVYTDKAELDALAVRAELQGSEPEARGHGIYVQKPELEGSKWIFGIRDFYLYVIGKHELDAVNRRKRLTVISESSEGLRPNYTASVDERMTSALS

SEQ ID NO: 20421 - DNA, 780 bp, Muscodor strobelii
  misc_feature: SGI cDNA ID NO. 566892
  misc_feature: Encodes the peptide sequence at SEQ ID NO 20422
atggccgaggttttcgccgccgtctttattcccaatcttcccgatgagatatactttagcagccagatgagactcggcgcggcatggtatcactggtgtatctgggtagaagaccacagaagcagctcttggcccctcgtagcgcacaactggctaccgtctatcttcggacaaaggaagaccgtgtgccatcgctttgatgtcatttacaaagaggaagaagaatcaattacaacaccaagccacacttcagagaaagcggcctccgagaaggcatcgaacgtggaaggaagaataccgcctacaagcacacatgtcgataagaagacgggcgaagttgtagagacatacagtatgcacgccgatagcagcagacccttcgaagagacaaatcgccgattaagtccgacgtgtgtctttgtgcatgctacagatccaacgacgccggacggtaagcccgtccggccggctgcaaaggtcagcctcggttggctgagcgatacggtcggtatcgcggggccggactacacgcttgagtctacgctctgcgatcgccttatgatagggagggattgggtagggaatgatccgcctggtatgcagatgagatgggttaagaaagctataaggactattcggaacctttatgtaagaagtggtggcgtgcagtggagtgatgattgggtgttgaaaagggttgctgggattgcgagcacggggagtgaggaggcgtgggatgagatggagtatagacggaatccttatttgtatgggcaatga

SEQ ID NO: 20422 - protein, 259 aa, Muscodor strobelii
  misc_feature: SGI Peptide ID NO. 566892
MAEVFAAVFIPNLPDEIYFSSQMRLGAAWYHWCIWVEDHRSSSWPLVAHNWLPSIFGQRKTVCHRFDVIYKEEEESITTPSHTSEKAASEKASNVEGRIPPTSTHVDKKTGEVVETYSMHADSSRPFEETNRRLSPTCVFVHATDPTTPDGKPVRPAAKVSLGWLSDTVGIAGPDYTLESTLCDRLMIGRDWVGNDPPGMQMRWVKKAIRTIRNLYVRSGGVQWSDDWVLKRVAGIASTGSEEAWDEMEYRRNPYLYGQ

SEQ ID NO: 20423 - DNA, 377 bp, Muscodor strobelii
  misc_feature: SGI EST ID NO. CUFF.47842.0
  misc_feature: Variant of the nucleotide sequence at SEQ ID NO 20421
ctcggcgcggcatggtatcactggtgtatctgggtagaagaccacagaagcagctcttggcccctcgtagcgcacaactggctaccgtctatcttcggacaaaggaagaccgtgtgccatcgctttgatgtcatttacaaagaggaagaagaatcaattacaacaccaagccacacttcagagaaagcggcctccgagaaggcatcgaacgtggaaggaagaataccgcctacaagcacacatgtcgataagaagacgggcgaagttgtagagacatacagtatgcacgccgatagcagcagacccttcgaagagacaaatcgccgattaagtccgacgtgtgtctttgtgcatgctacagatccaacgacgccgga

SEQ ID NO: 20424 - DNA, 909 bp, Muscodor strobelii
  misc_feature: SGI cDNA ID NO. 566893
  misc_feature: Reduced expression when VOC is produced
  misc_feature: Encodes the peptide sequence at SEQ ID NO 20425
atgtcgttctcttcctacctcgcctacttcatcactggctataccggcatcgtcctgaccctctacatgctctctaccgtcgtgcccaaagcggcttttgtcgctcgctccctcgctgcctacatatcgctagtaatatgcgcaatctacggcgccctcgcctccatagtactgcgcattgctggtcatgaacagattgcccagtggaccacggcgcgatcctttaagttcgtcatggctctgacgacaggcatcaccttcgaaatcgaagacccaaacaaggttttagacaccgtgcgtcccgctgtattcattggcaaccaccagaccgaactcgacgtcttgatgttgggatgcatgttccctaaatactgtagcgtcactgcgaaaaagaatttgaagaaggtgcctttcctgggttggtttatggcactgagcggcactgtcttcatcgacaggaagaactccaaagatgcgagggacgccatggctggtgctgcttctgagattcaaagaaggaaacagagcgtctatatgttccccgagggaacacggagctacagcaaggagccgactctgttgccattcaagaagggcgccttccacttggctatacaggctggggtgccaatcgtcccagtagtcgtcgccaactactctcatatcctccacatcaagagctttgtattcaacggtggcaagatcccagtcaaagtgcttgaccctattccgacgaccggcttatcacccgaggacgtcgatgagctcacgcgcagcacaagagagctcatgatgtccgagattatcgcccttacgcagaaggccaggaacaacaacaagccgatctccatgcccatgaaagccgctaacggaacggcaaaattcagcggtcgagatacttcgttatga

SEQ ID NO: 20425 - protein, 302 aa, Muscodor strobelii
  misc_feature: SGI Peptide ID NO. 566893
  misc_feature (84)..(217): Pfam Id: PF01553 Pfam Desc: Acyltransferase
  misc_feature (1)..(299): NCBI GI: 116191807 Blast Desc: CHGG_05621 [Chaetomium globosum CBS 148.51] gi|88181534|gb|EAQ89002.1| CHGG_05621 [Chaetomium globosum CBS 148.51]
  misc_feature (1)..(301): NCBI GI: 46124529 Blast Desc: FG06642.1 [Gibberella zeae PH-1]
  misc_feature (14)..(299): NCBI GI: 154300239 Blast Desc: BC1G_10495 [Botryotinia fuckeliana B05.10] gi|150856784|gb|EDN31976.1| BC1G_10495 [Botryotinia fuckeliana B05.10]
  misc_feature (14)..(299): NCBI GI: 156048298 Blast Desc: SS1G_08880 [Sclerotinia sclerotiorum 1980] gi|154693277|gb|EDN93015.1| SS1G_08880 [Sclerotinia sclerotiorum 1980]
  misc_feature (6)..(285): NCBI GI: 261354042 Blast Desc: 1-acyl-sn-glycerol-3-phosphate acyltransferase beta [Verticillium albo-atrum VaMs.102]
  misc_feature (5)..(299): NCBI GI: 171686990 Blast Desc: protein product [Podospora anserina] gi|170943456|emb|CAP69109.1| protein product [Podospora anserina]
  misc_feature (5)..(296): NCBI GI: 39941738 Blast Desc: MGG_11040 [Magnaporthe grisea 70-15] gi|145023249|gb|EDK06718.1| MGG_11040 [Magnaporthe grisea 70-15]
  misc_feature (6)..(279): NCBI GI: 85081211 Blast Desc: NCU00168 [Neurospora crassa OR74A] gi|28917754|gb|EAA27445.1| NCU00168 [Neurospora crassa OR74A]
  misc_feature (1)..(275): NCBI GI: 242776532 Blast Desc: 1-acylglycerol-3-phosphate acyltransferase (AtaAp), [Talaromyces stipitatus ATCC 10500] gi|218722473|gb|EED21891.1| 1-acylglycerol-3-phosphate acyltransferase (AtaAp), [Talaromyces
  misc_feature (1)..(293): NCBI GI: 258574199 Blast Desc: AtaAp protein [Uncinocarpus reesii 1704] gi|237901547|gb|EEP75948.1| AtaAp protein [Uncinocarpus reesii 1704]
  misc_feature (26)..(268): SWISSPROT Homolog: EC 2.3.1.51 1-acylglycerol-3-phosphate O-acyltransferase
  misc_feature: Useful for introducing or modulating the production of volatile compounds
MSFSSYLAYFITGYTGIVLTLYMLSTVVPKAAFVARSLAAYISLVICAIYGALASIVLRIAGHEQIAQWTTARSFKFVMALTTGITFEIEDPNKVLDTVRPAVFIGNHQTELDVLMLGCMFPKYCSVTAKKNLKKVPFLGWFMALSGTVFIDRKNSKDARDAMAGAASEIQRRKQSVYMFPEGTRSYSKEPTLLPFKKGAFHLAIQAGVPIVPVVVANYSHILHIKSFVFNGGKIPVKVLDPIPTTGLSPEDVDELTRSTRELMMSEIIALTQKARNNNKPISMPMKAANGTAKFSGRDTSL

SEQ ID NO: 20426 - DNA, 1796 bp, Muscodor strobelii
  misc_feature: SGI EST ID NO. CUFF.48220.0
  misc_feature: Variant of the nucleotide sequence at SEQ ID NO 20424
cacacctgctggttgtcgtcttgtgactcggtgctgttgaacacagtcgaccgagtctctttcatgtgttcttgacagagaaattcgacattttcctatatcacacgacattcattccacgttagacccgtcaccttatgcaatcaagagactcgattctacttgacgcgcaaacctcaccgtcatttccagagcccgacaaaacttcggtgaagctgccccacgatcccctcgtgttagtcgggacatcggtctaaaattcaacatccaaccaccgccaccaccaccaccgccgccactaccgcctagacatataatccgacgccggaatcccttccttcttcgaatctcccgactccgccaatctgcgacgtggtcaccctgctctatgggctattaaataccaccatgtcgttctcttcctacctcgcctacttcatcactggctataccggcatcgtcctgaccctctacatgctctctaccgtcgtgcccaaagcggcttttgtcgctcgctccctcgctgcctacatatcgctagtaatatgcgcaatctacggcgccctcgcctccatagtactgcgcattgctggtcatgaacagattgcccagtggaccacggcgcgatcctttaagttcgtcatggctctgacgacaggcatcaccttcgaaatcgaagacccaaacaaggttttagacaccgtgcgtcccgctgtattcattggcaaccaccagaccgaactcgacgtcttgatgttgggatgcatgttccctaaatactgtagcgtcactgcgaaaaagaatttgaagaaggtgcctttcctgggttggtttatggcactgagcggcactgtcttcatcgacaggaagaactccaaagatgcgagggacgccatggctggtgctgcttctgagattcaaagaaggaaacagagcgtctatatgttccccgagggaacacggagctacagcaaggagccgactctgttgccattcaagaagggcgccttccacttggctatacaggctggggtgccaatcgtcccagtagtcgtcgccaactactctcatatcctccacatcaagagctttgtattcaacggtggcaagatcccagtcaaagtgcttgaccctattccgacgaccggcttatcacccgaggacgtcgatgagctcacgcgcagcacaagagagctcatgatgtccgagattatcgcccttacgcagaaggccaggaacaacaacaagccgatctccatgcccatgaaagccgctaacggaacggcaaaattcagcggtcgagatacttcgttatgagatgtttcaggatagagctcatttgaaggcgctacaacaaaaacaacaagaccttctgctttagactacactgcatgctggtgcggctgtgcaaggaagctacaagaaggatgaatgggacgaaagataacgaatgaacatgcggcgcaacggcagagtatagatccgaatgaaagatcggatgccgactgctgataccctggaatgagagaatgacgcctagatgaatatgaaacgaaaacggcgtcagggttgttgggacactggaaagtaacccttgggaaagctgtgcataatagaatttgcatagatagacaaggtcggacagagttgcgacgtttggagaatatcaagaacatacatacagcaatagagatgtatctttcacaacactgacctattgagactgtgatgcatggtcgattccgtacgaaggagaagcaagtcaatgacaatcattacacgttcattgaacaagc

SEQ ID NO: 20427 - DNA, 1071 bp, Muscodor strobelii
  misc_feature: SGI cDNA ID NO. 566894
  misc_feature: Reduced expression when VOC is produced
  misc_feature: Encodes the peptide sequence at SEQ ID NO 20428
atgtcccagcagcccatcaccaccaccaagaccaacaccacaatcccgcaaaacgcgggaagtgaatgggtgctttctcgtgctaggagacttctatccttccgctctccttcctcgtcctcccagccatctaactcatctgcatggcctcctgctctcccctctgaaaacgaggttgagtatgaggacgatgacgatagttcaatttactactccttcgaacctttcaaaccgactcaaaagtctagattcgatctgaataaactgggcaggttactgttcggttcgagagtctgtcgttgtgatcactgtgtgaagaacggtttgagggtgtcgaagaatgttgagtttgatgatgggtcttctacatcttcgacttctactatcaagggaagaggaacagtgctaggtccagatactgtcggaagactggagcgcatggccgagcaaatatccccatccccaacaccctacatcacctcatcatcggaccgcgggtccatcgcggaatcaatcagcgaggcaatgcaagacagcatccaccccgacaacagactatcgacgacaagcagagaagtccccctcctcctagactgggagaccctctccgaaaaccgatccgacgaagcaacaagacagcacgcgtcagccgttcttggtccagaccaccccttcttcaatctggacctttcaccgtctgcggatccaattccgagaagtcgtagtgagttccctagaatgaggggcgaacctgatccggccactgttcctagtccgcctgggtctagggatagggctagtgggtattttgatagggctttcttgatggatgacgggcaggcgttcagtgctgaagaaaccgagacgccgtcgagtatggtggccgaacctgctacgcctttgtatactgctgtgagtgaggcggaggttgttaggccggttcctagacgtgtcgagatgctcaggaggcctagtatggcgaggaagttgtctggtgctgtgctgagcaggagggggagtgggtttactagaacgtcgagctttagtgggcggatgatgagagtctactag

SEQ ID NO: 20428 - protein, 356 aa, Muscodor strobelii
  misc_feature: SGI Peptide ID NO. 566894
  misc_feature: Useful for introducing or modulating the production of volatile compounds
MSQQPITTTKTNTTIPQNAGSEWVLSRARRLLSFRSPSSSSQPSNSSAWPPALPSENEVEYEDDDDSSIYYSFEPFKPTQKSRFDLNKLGRLLFGSRVCRCDHCVKNGLRVSKNVEFDDGSSTSSTSTIKGRGTVLGPDTVGRLERMAEQISPSPTPYITSSSDRGSIAESISEAMQDSIHPDNRLSTTSREVPLLLDWETLSENRSDEATRQHASAVLGPDHPFFNLDLSPSADPIPRSRSEFPRMRGEPDPATVPSPPGSRDRASGYFDRAFLMDDGQAFSAEETETPSSMVAEPATPLYTAVSEAEVVRPVPRRVEMLRRPSMARKLSGAVLSRRGSGFTRTSSFSGRMMRVY

SEQ ID NO: 20429 - DNA, 168 bp, Muscodor strobelii
  misc_feature: SGI EST ID NO. CUFF.48226.0
  misc_feature: Variant of the nucleotide sequence at SEQ ID NO 20427
cccatcaccaccaccaagaccaacaccacaatcccgcaaaacgcgggaagtgaatgggtgctttctcgtgctaggagacttctatccttccgctctccttcctcgtcctcccagccatctaactcatctgcatggcctcctgctctcccctctgaaaacgaggttgag

SEQ ID NO: 20430 - DNA, 975 bp, Muscodor strobelii
  misc_feature: SGI cDNA ID NO. 566895
  misc_feature: Reduced expression when VOC is produced
  misc_feature: Encodes the peptide sequence at SEQ ID NO 20431
atgtcggtcgcctcaaagaacctgttcgccctcctcggcaatgacgaagaagacgaccagccgtctggccctgtgaagacggtcgacaagtctgtcccgcgcaccaccaagcgcaacgtcgagccccaggcccccgctaagcccgccggcgccactggcggtgctcgtcgcggcccgggcggcaacgaaggagctttccgtgaccgtaacgccggcaccactagcaatcagcgtaagacgactgatgagccctctcgaggtggtccccggggtggccgcggcgcccgccgggaaggaggtcgtggaggtcgcttccctcgcgaacgtgacgacagacacactaagggtctcgccactggatctgagaagcaagctgcccagtcttggggcgctaccgagggcgaggctgaggccaaggacgagcaggccggagaggccatcgcccagagcgaactgaaggacgctgccgccgaggacgccgaggatgctactcccgccgaacctgaggacaagagcgtctcctacgccgactacctcgcccagcaggccgagaagaagcttgctcttggcgacaacctcgagctccgcaagcccaacgagggcagcaagaccgacaagaagtgggccaacgccaaggccatctccaaagatgaggacgatgacttgttctccgcgactagcggcaagaccaagcgcgagcgcgaacgcaaggtcaagcaggtcgtcgacattgaccagcgatacgttgagcctgaccgtcctgcccgcggcggtgctcgtggtggtccccgtggcggctctggccgtggtggcgcccgtggtgacggtggtcgaggccgcggtggtgagggacgtggtggagcccgtggtcgtggtgatggtggcttccgcggaggcagccgtcccactggtggtcgcgagaacgcttcgatcaacactaaggatgagtcggcgttccctagcctgggtgcttag

SEQ ID NO: 20431 - protein, 324 aa, Muscodor strobelii
  misc_feature: SGI Peptide ID NO. 566895
  misc_feature (106)..(201): Pfam Id: PF04774 Pfam Desc: Hyaluronan / mRNA binding family
  misc_feature (7)..(105): Pfam Id: PF09598 Pfam Desc: Stm1
  misc_feature (1)..(323): NCBI GI: 226498816 Blast Desc: LOC100274488 [Zea mays] gi|194708194|gb|ACF88181.1| [Zea mays] gi|223973261|gb|ACN30818.1| [Zea mays]
  misc_feature (1)..(252): NCBI GI: 256733291 Blast Desc: NECHADRAFT_100237 [Nectria haematococca mpVI 77-13-4]
  misc_feature (1)..(252): NCBI GI: 85086552 Blast Desc: NCU00225 [Neurospora crassa OR74A] gi|28918791|gb|EAA28460.1| [Neurospora crassa OR74A]
  misc_feature (2)..(250): NCBI GI: 117671299 Blast Desc: elicitor protein [Magnaporthe grisea]
  misc_feature (2)..(250): NCBI GI: 39939866 Blast Desc: MGG_05307 [Magnaporthe grisea 70-15] gi|145010407|gb|EDJ95063.1| MGG_05307 [Magnaporthe grisea 70-15]
  misc_feature (3)..(324): NCBI GI: 154290757 Blast Desc: BC1G_15577 [Botryotinia fuckeliana B05.10] gi|150847414|gb|EDN22607.1| BC1G_15577 [Botryotinia fuckeliana B05.10]
  misc_feature (1)..(323): NCBI GI: 46124581 Blast Desc: FG06668.1 [Gibberella zeae PH-1]
  misc_feature (3)..(324): NCBI GI: 156051876 Blast Desc: SS1G_07345 [Sclerotinia sclerotiorum 1980] gi|154705123|gb|EDO04862.1| SS1G_07345 [Sclerotinia sclerotiorum 1980]
  misc_feature (1)..(251): NCBI GI: 116208190 Blast Desc: CHGG_03388 [Chaetomium globosum CBS 148.51] gi|88183985|gb|EAQ91453.1| CHGG_03388 [Chaetomium globosum CBS 148.51]
  misc_feature (14)..(323): NCBI GI: 261360265 Blast Desc: elicitor protein [Verticillium albo-atrum VaMs.102]
  misc_feature: Useful for introducing or modulating the production of volatile compounds
MSVASKNLFALLGNDEEDDQPSGPVKTVDKSVPRTTKRNVEPQAPAKPAGATGGARRGPGGNEGAFRDRNAGTTSNQRKTTDEPSRGGPRGGRGARREGGRGGRFPRERDDRHTKGLATGSEKQAAQSWGATEGEAEAKDEQAGEAIAQSELKDAAAEDAEDATPAEPEDKSVSYADYLAQQAEKKLALGDNLELRKPNEGSKTDKKWANAKAISKDEDDDLFSATSGKTKRERERKVKQVVDIDQRYVEPDRPARGGARGGPRGGSGRGGARGDGGRGRGGEGRGGARGRGDGGFRGGSRPTGGRENASINTKDESAFPSLGA

SEQ ID NO: 20432 - DNA, 1658 bp, Muscodor strobelii
  misc_feature: SGI EST ID NO. CUFF.48230.0
  misc_feature: Variant of the nucleotide sequence at SEQ ID NO 20430
gtggcttccccccccattagccccaacccgggccatcaccgacgcacgcaccctctcggctcagagtctggtggacttgagaacaacaacctcaaaacctgcacccgacgagtcgattcctcttcccttgtggatatgacctgctaggccgtatccttcctcattcctcaccaacaactctgtcacgattgacgtcctcacagccacgccttgctgaaaggcgaataactcggcggcatcatgtcggtcgcctcaaagaacctgttcgccctcctcggcaatgacgaagaagacgaccagccgtctggccctgtgaagacggtcgacaagtctgtcccgcgcaccaccaagcgcaacgtcgagccccaggcccccgctaagcccgccggcgccactggcggtgctcgtcgcggcccgggcggcaacgaaggagctttccgtgaccgtaacgccggcaccactagcaatcagcgtaagacgactgatgagccctctcgaggtggtccccggggtggccgcggcgcccgccgggaaggaggtcgtggaggtcgcttccctcgcgaacgtgacgacagacacactaagggtctcgccactggatctgagaagcaagctgcccagtcttggggcgctaccgagggcgaggctgaggccaaggacgagcaggccggagaggccatcgcccagagcgaactgaaggacgctgccgccgaggacgccgaggatgctactcccgccgaacctgaggacaagagcgtctcctacgccgactacctcgcccagcaggccgagaagaagcttgctcttggcgacaacctcgagctccgcaagcccaacgagggcagcaagaccgacaagaagtgggccaacgccaaggccatctccaaagatgaggacgatgacttgttctccgcgactagcggcaagaccaagcgcgagcgcgaacgcaaggtcaagcaggtcgtcgacattgaccagcgatacgttgagcctgaccgtcctgcccgcggcggtgctcgtggtggtccccgtggcggctctggccgtggtggcgcccgtggtgacggtggtcgaggccgcggtggtgagggacgtggtggagcccgtggtcgtggtgatggtggcttccgcggaggcagccgtcccactggtggtcgcgagaacgcttcgatcaacactaaggatgagtcggcgttccctagcctgggtgcttagactgcctcacgatcgacgagaggcttcattgtgtgcgtatggtagtgtagcgcggaaaggttctgcgtatcacaggacacaatgcttgtaggacctcttatttcgccatcggccccttgacccagtctggttattccatagaccattctggctacacctgctcttgagaagccattaggacgagcaacatctttccgaatcaatcaaaccagaaaagtttctttcataccaacgcatagggctccaaaatggatgggcgtgagcttggacgtgacgcctccgttgcgagcaggacagcctggttcctttgactgtactggtagagacttggtactactcctatagtaaaaaaatttccttcaatcctagttcttcttgcccttggctgtgatcgtatcgcgagattgaatattgttctttgacagcaggaagtgattacatgg

SEQ ID NO: 20433 - DNA, 525 bp, Muscodor strobelii
  misc_feature: SGI cDNA ID NO. 566896
  misc_feature: Reduced expression when VOC is produced
  misc_feature: Encodes the peptide sequence at SEQ ID NO 20434
cgtcaacgacaggaggaagaggagcaggagatggaggacgagatggaaggtcttgtggaccaaaagatgccgctccagcagccatctgcattcccaggtctgcccggtctaccaggtcttaccctacccttgggcaacgcaccgccaccaattccaggagttggcggcatggcagccgcaccaccgttgcctttaccattcccaataccaggcgcgaatggcggtgccccgcctcctcctcctttgcctggtctagatccaaccaacccagtagacttcgccaagatcgcggagatgatgcagaaagctggattaccgcctccgccacctcccggtatgatgccaccaggtggcttcatgccccctcccaactttgcaatcccgcctggctttccggtacctccgccgccgcccggtgcatcgtctgcagctgatgatggagttcgtcgcagagggccgctccctagtcaggaagagagcctcaggatggagcagaagaaggggaattacactcgtgtgcgatag

SEQ ID NO: 20434 - protein, 174 aa, Muscodor strobelii
  misc_feature: SGI Peptide ID NO. 566896
  misc_feature (15)..(174): NCBI GI: 164428768 Blast Desc: protein PFS2 [Neurospora crassa OR74A] gi|189031712|sp|Q7RY68.2|PFS2_NEUCR RecName: Full=Polyadenylation factor subunit 2 gi|157072271|gb|EAA27788.2| protein PFS2 crassa
  misc_feature (11)..(174): NCBI GI: 145601923 Blast Desc: MGG_05325 [Magnaporthe grisea 70-15] gi|145010388|gb|EDJ95044.1| MGG_05325 [Magnaporthe grisea 70-15]
  misc_feature (17)..(174): NCBI GI: 171686800 Blast Desc: protein product [Podospora anserina] gi|170943361|emb|CAP69014.1| protein product [Podospora anserina]
  misc_feature (17)..(174): NCBI GI: 154301499 Blast Desc: BC1G_10419 [Botryotinia fuckeliana B05.10] gi|150856159|gb|EDN31351.1| BC1G_10419 [Botryotinia fuckeliana B05.10]
  misc_feature (17)..(170): NCBI GI: 156032985 Blast Desc: SS1G_13568 [Sclerotinia sclerotiorum 1980] gi|154698971|gb|EDN98709.1| SS1G_13568 [Sclerotinia sclerotiorum 1980]
  misc_feature: Useful for introducing or modulating the production of volatile compounds
RQRQEEEEQEMEDEMEGLVDQKMPLQQPSAFPGLPGLPGLTLPLGNAPPPIPGVGGMAAAPPLPLPFPIPGANGGAPPPPPLPGLDPTNPVDFAKIAEMMQKAGLPPPPPPGMMPPGGFMPPPNFAIPPGFPVPPPPPGASSAADDGVRRRGPLPSQEESLRMEQKKGNYTRVR

SEQ ID NO: 20435 - DNA, 751 bp, Muscodor strobelii
  misc_feature: SGI EST ID NO. CUFF.47854.0
  misc_feature: Variant of the nucleotide sequence at SEQ ID NO 20433
gtcgtcaacgacaggaggaagaggagcaggagatggaggacgagatggaaggtcttgtggaccaaaagatgccgctccagcagccatctgcattcccaggtctgcccggtctaccaggtcttaccctacccttgggcaacgcaccgccaccaattccaggagttggcggcatggcagccgcaccaccgttgcctttaccattcccaataccaggcgcgaatggcggtgccccgcctcctcctcctttgcctggtctagatccaaccaacccagtagacttcgccaagatcgcggagatgatgcagaaagctggattaccgcctccgccacctcccggtatgatgccaccaggtggcttcatgccccctcccaactttgcaatcccgcctggctttccggtacctccgccgccgcccggtgcatcgtctgcagctgatgatggagttcgtcgcagagggccgctccctagtcaggaagagagcctcaggatggagcagaagaaggggaattacactcgtgtgcgatagggcagtgacattgggagttcgccctttgagattgagagaatcatatggggggaagggggaaaactttgtaagatcagtcatgaatgttcggtatttgaggtttagataccaagaatttgcatttgctctttcacgatatgaaggatggttttgtaaaaacatgaagctgaatacaaatcttgagcttggtggattgctgtccctgcggaattcttcgatggtgg

SEQ ID NO: 20436 - DNA, 1065 bp, Muscodor strobelii
  misc_feature: SGI cDNA ID NO. 566897
  misc_feature: Encodes the peptide sequence at SEQ ID NO 20437
atgtccaaaaccacagtcgccatcatagcagccgcgagcgcaggagtcggcgccgcagctaccgcagccatgtactcgctacgatcacaatctgagcgcaagctcgacatgccagccaaaaccatatctacaaccacaaccaccgtctcgaccagcgccgtctccgctcctattcctattccctccaagcaggtctttactcctccaaaccagcagactgctttctcaacctcagcccccgcagctctcggcggcgtcctcgcccctgtcgaccctgcaggattattcgaatatggctttccaggcccagtatctgatattgcaacacgacaagccctcatctcctccttcgaccgccgcctgcgcaatccccactgggtcatcgagcacatcacacccgcctcgctcgcagtcaaaggaggagatcgaaagcacagcgtctttatcgaagacgaggccgttccagacaagtttcgcgccaagctcaaagactacttccgctccggctacgacagagggcaccaagttcccgccgcagatgcaaaatggtcgcagacagccatggacgagaccttcttcttgaccaatatgtcgccacaagtaggcgagggtttcaaccgggactactgggcacatttcgaggacttctgccgccgcttgacacagcgttacccttccgttcgcatcgttaccggacctctctaccttcccaagcgcgaccctgccgacaacaagtggtacgtcaagtacgaagtcatcggcaacccacctaacgtcgccgtccccacccacttctacaaggttatcttcgccgaggaggacggaacagctggcagcgcaggcaaagtcgccatcggcgccttcgtactacctaatgcgcgaatccccaacgagaagccaatcaccgacttcgaggtccctattgaggccgtggagcgtgccagcggactagagtttgcgacgaaattgccgatccagcggaggaaacgactctgtgctgacacgacatgcgcgcttgttatccgagactttgccgataaacagaaggcttttcccaagaagtaa

SEQ ID NO: 20437 - protein, 354 aa, Muscodor strobelii
  misc_feature: SGI Peptide ID NO. 566897
  misc_feature (109)..(326): Pfam Id: PF01223 Pfam Desc: DNA/RNA non-specific endonuclease
  misc_feature (1)..(353): NCBI GI: 154301497 Blast Desc: BC1G_10418 [Botryotinia fuckeliana B05.10] gi|150856158|gb|EDN31350.1| BC1G_10418 [Botryotinia fuckeliana B05.10]
  misc_feature (1)..(354): NCBI GI: 256733281 Blast Desc: NECHADRAFT_37866 [Nectria haematococca mpVI 77-13-4]
  misc_feature (1)..(354): NCBI GI: 85082932 Blast Desc: mitochondrial nuclease [Neurospora crassa OR74A] gi|28918100|gb|EAA27781.1| mitochondrial nuclease [Neurospora crassa OR74A]
  misc_feature (86)..(353): NCBI GI: 156032987 Blast Desc: SS1G_13569 [Sclerotinia sclerotiorum 1980] gi|154698972|gb|EDN98710.1| SS1G_13569 [Sclerotinia sclerotiorum 1980]
  misc_feature (1)..(354): NCBI GI: 46124617 Blast Desc: FG06686.1 [Gibberella zeae PH-1]
  misc_feature (89)..(353): NCBI GI: 145601925 Blast Desc: MGG_05324 [Magnaporthe grisea 70-15] gi|145010389|gb|EDJ95045.1| MGG_05324 [Magnaporthe grisea 70-15]
  misc_feature (87)..(354): NCBI GI: 116192047 Blast Desc: CHGG_05741 [Chaetomium globosum CBS 148.51] gi|88181654|gb|EAQ89122.1| CHGG_05741 [Chaetomium globosum CBS 148.51]
  misc_feature (1)..(346): NCBI GI: 261360250 Blast Desc: mitochondrial nuclease [Verticillium albo-atrum VaMs.102]
  misc_feature (90)..(354): NCBI GI: 171686766 Blast Desc: protein product [Podospora anserina] gi|170943344|emb|CAP68997.1| protein product [Podospora anserina]
  misc_feature (1)..(344): NCBI GI: 226293822 Blast Desc: mitochondrial nuclease [Paracoccidioides brasiliensis Pb18]
MSKTTVAIIAAASAGVGAAATAAMYSLRSQSERKLDMPAKTISTTTTTVSTSAVSAPIPIPSKQVFTPPNQQTAFSTSAPAALGGVLAPVDPAGLFEYGFPGPVSDIATRQALISSFDRRLRNPHWVIEHITPASLAVKGGDRKHSVFIEDEAVPDKFRAKLKDYFRSGYDRGHQVPAADAKWSQTAMDETFFLTNMSPQVGEGFNRDYWAHFEDFCRRLTQRYPSVRIVTGPLYLPKRDPADNKWYVKYEVIGNPPNVAVPTHFYKVIFAEEDGTAGSAGKVAIGAFVLPNARIPNEKPITDFEVPIEAVERASGLEFATKLPIQRRKRLCADTTCALVIRDFADKQKAFPKK

SEQ ID NO: 20438 - DNA, 2723 bp, Muscodor strobelii
  misc_feature: SGI EST ID NO. CUFF.48213.0
  misc_feature: Variant of the nucleotide sequence at SEQ ID NO 20436
ctttgaatcatttcctattccacgacgcctttactgactcacaccgactataaactccgagaccctttatgagagtatgtaataacagttatgaagttcttacatccgggtctacctaggaaaacgagacccatgcgcgatgcttaattacttgcatcagctacaagacaaggaacacatgcgtcaagatatgcttaattctcctttgcatttggatgcttactaacagactaagactgacatgtagacttagtactcaaccaagaaacgaactgttgtttcgttcccagactcatgatagaaagacggcatcaagtgattttcttgacttcgctctctcctttacgtggtgaatttgaacgatacgagaagcttcgagacccaatacaccagacactggcagatttgagagctaaacacatctgacagcaaagtgaagacgctgcggatgagaactgatttaaatagagcgagtgcctgtcatttgcgcacttctgacagatgtcacgaggtatgctttggtcgagtcatagggggcttgaatatctccgactcagatcgatcgaacttctctgccttggaacctgcattcgattgggggggttgctttcacctgaagctagaggtaattgatacattcatttgggtacttctcacaacgccagtaagtaattccgtaaaacgtgcgttgcttatttgagatcaacttatagattttattcgcaaactacttgaaactgtattcagtgattattcgaattattatcggaaaataggacgttgtagaattcgttctaggtacctattttttcaacggcctgtcaggcgctggcgcaagtcggaatcgcccgctgaatccacttaagccctgcagcatggtttatcgattggacaacgcgctaccgaaaagaccctgtggttgcatccggtgtgagcatccggtggttttttctcaaggctgaagctatccaagaatccatcttcgccttgaaatctgagacatctgcagcataccgcacccaccacgaggtcgccgctccgcccgccctgagctctcgcgtgagccgcatcccgctggcaacctccacgcctgacctatgccaaccaccgcccacctgttcaccgtctcataatctcaggtgtcctcctcttctctctcttagaaatcgcaccctcatataaaagccctaccgccgaggactgctcccacggagcacccagctgtcaccatgtccaaaaccacagtcgccatcatagcagccgcgagcgcaggagtcggcgccgcagctaccgcagccatgtactcgctacgatcacaatctgagcgcaagctcgacatgccagccaaaaccatatctacaaccacaaccaccgtctcgaccagcgccgtctccgctcctattcctattccctccaagcaggtctttactcctccaaaccagcagactgctttctcaacctcagcccccgcagctctcggcggcgtcctcgcccctgtcgaccctgcaggattattcgaatatggctttccaggcccagtatctgatattgcaacacgacaagccctcatctcctccttcgaccgccgcctgcgcaatccccactgggtcatcgagcacatcacacccgcctcgctcgcagtcaaaggaggagatcgaaagcacagcgtctttatcgaagacgaggccgttccagacaagtttcgcgccaagctcaaagactacttccgctccggctacgacagagggcaccaagttcccgccgcagatgcaaaatggtcgcagacagccatggacgagaccttcttcttgaccaatatgtcgccacaagtaggcgagggtttcaaccgggactactgggcacatttcgaggacttctgccgccgcttgacacagcgttacccttccgttcgcatcgttaccggacctctctaccttcccaagcgcgaccctgccgacaacaagtggtacgtcaagtacgaagtcatcggcaacccacctaacgtcgccgtccccacccacttctacaaggttatcttcgccgaggaggacggaacagctggcagcgcaggcaaagtcgccatcggcgccttcgtactacctaatgcgcgaatccccaacgagaagccaatcaccgacttcgaggtccctattgaggccgtggagcgtgccagcggactagagtttgcgacgaaattgccgatccagcggaggaaacgactctgtgctgacacgacatgcgcgcttgttatccgagactttgccgataaacagaaggcttttcccaagaagtaaacgggacacatacgcgcatcatacggaaagcatatcctggcgttttggtgggcaggacagatcagttacaactatcgtaatgccatacatacgcacacacggtattcgctacccttcaaatctccgggtcgaattttgcatttacacggcgttactttaagctcttcgatatgagttggatgcgcgataatcttgtataatgtatatcatgtaaaaaacatctagggcatatattcagccctttagggctaactgagggcatggaaaggggaagaggaaggcggaggagataccatagcatagcatagcatagaagatagcatcgcttcacactacggtgtaatgcgcaatcatgaatcgtacaccaagccttggtttcatggtccctctcgtcatacttaactctgtctatctgacttgtaattcgaa

SEQ ID NO: 20439 - DNA, 552 bp, Muscodor strobelii
  misc_feature: SGI cDNA ID NO. 566898
  misc_feature: Encodes the peptide sequence at SEQ ID NO 20440
atggatgacgagtgtgactcggttgatccgagcgatgtcgaggcgcagcatcatcaccatgtggctaagaacgcctttctgtccatcggcctgcaaacatccgtggccattgccctccataaattccctgaaggctttatcacgtacgctacaaatcatgcgaatcccgcgctaggtttcaacgtattcctggcgctcttcgtgcacaacatctcagaaggatttgctctcgcattacctctctatatggctttgaacagtcgtatgaaagcgatcctctggtcttttttcctgggcggcttgagtcaaccactcggcgcgctcatcgcctttgcatggttcaaactggctgaccgtacgagcatgacgcctgatgccgttgcatacgggtgtctgtttgctgctacgtctggtattatggtcagtgttgccttgcagctttttgtcgagagtctgagcttgaatcacaaccagaatttgagcattctgttcgctttcttgggcatgacgctgttggggctcagcaatgcttttacgtcggatgtacactga

SEQ ID NO: 20440 - protein, 183 aa, Muscodor strobelii
  misc_feature: SGI Peptide ID NO. 566898
  misc_feature (36)..(176): Pfam Id: PF02535 Pfam Desc: ZIP Zinc transporter
  misc_feature (2)..(178): NCBI GI: 256732823 Blast Desc: NECHADRAFT_38178 [Nectria haematococca mpVI 77-13-4]
  misc_feature (2)..(178): NCBI GI: 46124615 Blast Desc: FG06685.1 [Gibberella zeae PH-1]
  misc_feature (11)..(178): NCBI GI: 85082928 Blast Desc: NCU00029 [Neurospora crassa OR74A] gi|28918099|gb|EAA27780.1| conserved [Neurospora crassa OR74A]
  misc_feature (3)..(180): NCBI GI: 261360251 Blast Desc: vacuolar membrane zinc transporter [Verticillium albo-atrum VaMs.102]
  misc_feature (12)..(178): NCBI GI: 39939834 Blast Desc: MGG_05323 [Magnaporthe grisea 70-15] gi|145010390|gb|EDJ95046.1| MGG_05323 [Magnaporthe grisea 70-15]
  misc_feature (2)..(181): NCBI GI: 156032993 Blast Desc: SS1G_13572 [Sclerotinia sclerotiorum 1980] gi|154698975|gb|EDN98713.1| SS1G_13572 [Sclerotinia sclerotiorum 1980]
  misc_feature (2)..(181): NCBI GI: 154301491 Blast Desc: BC1G_10415 [Botryotinia fuckeliana B05.10] gi|150856155|gb|EDN31347.1| BC1G_10415 [Botryotinia fuckeliana B05.10]
  misc_feature (4)..(180): NCBI GI: 238493711 Blast Desc: integral membrane protein, [Aspergillus flavus NRRL3357] gi|220696586|gb|EED52928.1| integral membrane protein, [Aspergillus flavus NRRL3357]
  misc_feature (15)..(180): NCBI GI: 169783886 Blast Desc: [Aspergillus oryzae RIB40] gi|83775149|dbj|BAE65272.1| protein product [Aspergillus oryzae]
  misc_feature (15)..(180): NCBI GI: 189207368 Blast Desc: zinc transporter zupT [Pyrenophora tritici-repentis Pt-1C-BFP] gi|187976111|gb|EDU42737.1| zinc transporter zupT [Pyrenophora tritici-repentis Pt-1C-BFP]
MDDECDSVDPSDVEAQHHHHVAKNAFLSIGLQTSVAIALHKFPEGFITYATNHANPALGFNVFLALFVHNISEGFALALPLYMALNSRMKAILWSFFLGGLSQPLGALIAFAWFKLADRTSMTPDAVAYGCLFAATSGIMVSVALQLFVESLSLNHNQNLSILFAFLGMTLLGLSNAFTSDVH

SEQ ID NO: 20441 - DNA, 2312 bp, Muscodor strobelii
  misc_feature: SGI EST ID NO. CUFF.48187.1
  misc_feature: Variant of the nucleotide sequence at SEQ ID NO 20439
cgggtatggtcacgatagcttttataaccttttaaaccactgtctcacttccgccctatagaccacgctgccgacgccatttcttatcccccatcctcgccatagcatctagaaccgtacaagaaaagtctcacagacacgaagctgcgctcttgtttccgaacgagatcgtcacgtcctcagctacatccattcgagcccctccaaattgtcccacgtcacgattcatacccatccgcatccaacggagttgtatcatacatcgtcgagatttctggcgagaaattacaagagaacaaaactcatagccgcgacacatatggccttataattagcctattgtgacgacgcgacattgggtgtggcctcgtagaggctgtagaaggtgacattgtgtaagagctcgactgtgctctgccaaacaatgcccaacatggccaacctggaggatcacaacgacctgaggggatgggttatgtgtatcatcagcggcatcgcctgcgtccttggtgcctcgatcatctgcgtcgatgtcttcgtcaggctgttccctggaaagaaagactttcgaatccaggacagcaatacttttctagcttgctcgctgagtctgagctttggtgtcatgctcttcatgtctttgaatagtatgcttcccgaggcaaaagaataccttagcaaagccaagttcaaagataatacggcccaactaatcctgattggctgtttcgtcggagggtttgtaggaattcagatactctcaagactgtttcaccagtttttgccatcacatgtcgttgattgcgatcatagccatagtcacgaggagagtcgcgcacatagcacttcgcatcatggagcgcggagacgctcgtctcgtgcgcgcagtgtggatagacatgttcacccagcgcatttcgagggcaatgcagcaaagcctcaaatggtcgagactctggaaaacggtcatgccaatgaatcgacaccactgctatcaaatcaagaccaacatcctcaattggatgcaccgctattaaagagagcaaagactgtccagattgcgcatccagctcatacgaatcccaaagaccgaagtcgcgctgctacaacgacgagacggccttctgtgttacaaatgccacagagagttatgtcattcatgaaagacaccaagacaaactgtgacgaggccggaccttgttacggctactcagacccttgtggccaagaatgcttcaagcatctcactacgcgttgcggaggtgtctcgcgggcgactacattcctgcgcactaatacagattataccggctttcgtggcataaacaggcttgcagcacatggtgaagatgaggaggaagatatatcagaattaagtcctacgcaacgcaggagtcgggcacattcgcgggcgagccatccgcccatggatgacgagtgtgactcggttgatccgagcgatgtcgaggcgcagcatcatcaccatgtggctaagaacgcctttctgtccatcggcctgcaaacatccgtggccattgccctccataaattccctgaaggctttatcacgtacgctacaaatcatgcgaatcccgcgctaggtttcaacgtattcctggcgctcttcgtgcacaacatctcagaaggatttgctctcgcattacctctctatatggctttgaacagtcgtatgaaagcgatcctctggtcttttttcctgggcggcttgagtcaaccactcggcgcgctcatcgcctttgcatggttcaaactggctgaccgtacgagcatgacgcctgatgccgttgcatacgggtgtctgtttgctgctacgtctggtattatggtcagtgttgccttgcagctttttgtcgagagtctgagcttgaatcacaaccagaatttgagcattctgttcgctttcttgggcatgacgctgttggggctcagcaatgcttttacgtcggatgtacactgagtactaaaggagacgtgcgcggtttcgagttattcgtcaatacggacaattggaagtgattcaaaagagcagtgtagtttcattaaaatggtcttgtgttttggtttgagcattggtatgggctacgatcatgggtttgggcggtatgcatcatttggcatggcgctttgttgggattggcgggtttatataatatggattacgattgtggcaggtattagatgcagtaccttgggagctcaaaaatgcattgattgggacatggctctggtagtacaataatgagctcggtagtctattgtcatagataatattgatacgctcttcagattgc

SEQ ID NO: 20442 - DNA, 1545 bp, Muscodor strobelii
  misc_feature: SGI cDNA ID NO. 566899
  misc_feature: Encodes the peptide sequence at SEQ ID NO 20443
atggccaacctggaggatcacaacgacctgaggggatgggttatgtgtatcatcagcggcatcgcctgcgtccttggtgcctcgatcatctgcgtcgatgtcttcgtcaggctgttccctggaaagaaagactttcgaatccaggacagcaatacttttctagcttgctcgctgagtctgagctttggtgtcatgctcttcatgtctttgaatagtatgcttcccgaggcaaaagaataccttagcaaagccaagttcaaagataatacggcccaactaatcctgattggctgtttcgtcggagggtttgtaggaattcagatactctcaagactgtttcaccagtttttgccatcacatgtcgttgattgcgatcatagccatagtcacgaggagagtcgcgcacatagcacttcgcatcatggagcgcggagacgctcgtctcgtgcgcgcagtgtggatagacatgttcacccagcgcatttcgagggcaatgcagcaaagcctcaaatggtcgagactctggaaaacggtcatgccaatgaatcgacaccactgctatcaaatcaagaccaacatcctcaattggatgcaccgctattaaagagagcaaagactgtccagattgcgcatccagctcatacgaatcccaaagaccgaagtcgcgctgctacaacgacgagacggccttctgtgttacaaatgccacagagagttatgtcattcatgaaagacaccaagacaaactgtgacgaggccggaccttgttacggctactcagacccttgtggccaagaatgcttcaagcatctcactacgcgttgcggaggtgtctcgcgggcgactacattcctgcgcactaatacagattataccggctttcgtggcataaacaggcttgcagcacatggtgaagatgaggaggaagatatatcagaattaagtcctacgcaacgcaggagtcgggcacattcgcgggcgagccatccgcccatggatgacgagtgtgactcggttgatccgagcgatgtcgaggcgcagcatcatcaccatgtggctaagaacgcctttctgtccatcggcctgcaaacatccgtggccattgccctccataaattccctgaaggctttatcacgtacgctacaaatcatgcgaatcccgcgctaggtttcaacgtattcctggcgctcttcgtgcacaacatctcagaaggatttgctctcgcattacctctctatatggctttgaacagtcgtatgaaagcgatcctctggtcttttttcctgggcggcttgagtcaaccactcggcgcgctcatcgcctttgcatggttcaaactggctgaccgtacgagcatgacgcctgatgccgttgcatacgggtgtctgtttgctgctacgtctggtattatggtcagtgttgccttgcagctttttgtcgagagtctgagcttgaatcacaaccagaatttgagcattctgttcgctttcttgggcatgacgctgttggggctcagcaatgcttttacgtcggatgtacactga

SEQ ID NO: 20443 - protein, 514 aa, Muscodor strobelii
  misc_feature: SGI Peptide ID NO. 566899
  misc_feature (10)..(507): Pfam Id: PF02535 Pfam Desc: ZIP Zinc transporter
  misc_feature (50)..(507): Pfam Id: PF02535 Pfam Desc: ZIP Zinc transporter
  misc_feature (2)..(509): NCBI GI: 39939834 Blast Desc: MGG_05323 [Magnaporthe grisea 70-15] gi|145010390|gb|EDJ95046.1| MGG_05323 [Magnaporthe grisea 70-15]
  misc_feature (8)..(509): NCBI GI: 46124615 Blast Desc: FG06685.1 [Gibberella zeae PH-1]
  misc_feature (8)..(509): NCBI GI: 256732823 Blast Desc: NECHADRAFT_38178 [Nectria haematococca mpVI 77-13-4]
  misc_feature (8)..(512): NCBI GI: 156032993 Blast Desc: SS1G_13572 [Sclerotinia sclerotiorum 1980] gi|154698975|gb|EDN98713.1| SS1G_13572 [Sclerotinia sclerotiorum 1980]
  misc_feature (8)..(511): NCBI GI: 154301491 Blast Desc: BC1G_10415 [Botryotinia fuckeliana B05.10] gi|150856155|gb|EDN31347.1| BC1G_10415 [Botryotinia fuckeliana B05.10]
  misc_feature (8)..(511): NCBI GI: 261360251 Blast Desc: vacuolar membrane zinc transporter [Verticillium albo-atrum VaMs.102]
  misc_feature (8)..(495): NCBI GI: 171686768 Blast Desc: protein product [Podospora anserina] gi|170943345|emb|CAP68998.1| protein product [Podospora anserina]
  misc_feature (65)..(509): NCBI GI: 85082928 Blast Desc: NCU00029 [Neurospora crassa OR74A] gi|28918099|gb|EAA27780.1| conserved [Neurospora crassa OR74A]
  misc_feature (4)..(511): NCBI GI: 169621307 Blast Desc: SNOG_13864 [Phaeosphaeria nodorum SN15] gi|160704226|gb|EAT78888.2| SNOG_13864 [Phaeosphaeria nodorum SN15]
  misc_feature (8)..(511): NCBI GI: 67539904 Blast Desc: AN6122.2 [Aspergillus nidulans FGSC A4] gi|40738907|gb|EAA58097.1| AN6122.2 [Aspergillus nidulans FGSC A4]
MANLEDHNDLRGWVMCIISGIACVLGASIICVDVFVRLFPGKKDFRIQDSNTFLACSLSLSFGVMLFMSLNSMLPEAKEYLSKAKFKDNTAQLILIGCFVGGFVGIQILSRLFHQFLPSHVVDCDHSHSHEESRAHSTSHHGARRRSSRARSVDRHVHPAHFEGNAAKPQMVETLENGHANESTPLLSNQDQHPQLDAPLLKRAKTVQIAHPAHTNPKDRSRAATTTRRPSVLQMPQRVMSFMKDTKTNCDEAGPCYGYSDPCGQECFKHLTTRCGGVSRATTFLRTNTDYTGFRGINRLAAHGEDEEEDISELSPTQRRSRAHSRASHPPMDDECDSVDPSDVEAQHHHHVAKNAFLSIGLQTSVAIALHKFPEGFITYATNHANPALGFNVFLALFVHNISEGFALALPLYMALNSRMKAILWSFFLGGLSQPLGALIAFAWFKLADRTSMTPDAVAYGCLFAATSGIMVSVALQLFVESLSLNHNQNLSILFAFLGMTLLGLSNAFTSDVH

SEQ ID NO: 20444 - DNA, 2312 bp, Muscodor strobelii; identical to SEQ ID NO: 20441
  misc_feature: SGI EST ID NO. CUFF.48187.1
  misc_feature: Variant of the nucleotide sequence at SEQ ID NO 20442

SEQ ID NO: 20445 - DNA, 2070 bp, Muscodor strobelii
  misc_feature: SGI cDNA ID NO. 566900
  misc_feature: Reduced expression when VOC is produced
  misc_feature: Encodes the peptide sequence at SEQ ID NO 20446
atgccagccgaccgaatgctcaacacggtcctacgggcctaccaggaccctccgaatcccactcaaacagacaagatcctcggaaccaccaacacgcttctatcgagtctcaacaatcccttgaatctctccctcctcacatcccacttcctgaccgctcgcgccatatggacccagcccgatggcttgcgcagttgcttgcgcatcatcagcatctacaataccgccgctatccacgtccgccagaacgagctggacaatgcgaacctcgcgcctgggcagcccccagtgggcagtgggttgagggccgagacatgggctcgcgcagtcgccaaaggattagatgataggtcgaatcgatggcagcacactttagtacttgctggtatactcatgggtatggagggcgatgacaggagatccctctcctggagtctaagatcaactctcgagcatgctgtggtcagagccgcaaacctagccttggaggaccattccaagacagatatcctaggcagaggtgctgtcgtgctcgcaatgacctttgctatgccgctgctgtcagcatccagcaaggaactcgtcaatggcaccgcccttcttccggcggtgatagaagccatgctaggggatgaaggattccagcatgcggaatttattcgtgccatttcgcttgatatggcacctgcgcgacttgcctggccctcgaattcgccatcagtgagccgcatacaggcattggaatccagaccgctagctcaaaacatgggacctctgtcccggcttgccgtcttcgctatccagcatgcgtctgactccaatgcagtccttcgcgcccacgaagcactcttagctttcaccacgggcttgctagataaatgggaacactgctccctgtccacggtcgacttgtctgtcgaacaagttagactgcctccagatgtgctccagggacagtggctaatgctatggcaacttctgaagaagatcatgttcacagtcgtcgccacagtacaacctatagtcggacgctgtcttcttgatccgtatctacgtcatgattccgtagcaccattactcgcctcaaaaactctacaaatcctccgcaacctctcattcatctctttccgagacggcggaaactcattccaagtctaccaattcacctacctcacctccttggacatcataacccgctacccagaagcaagcaccaaattcctcgcagagaccctcccaccaccaccacaaaccggcatcgtcccatcgccagtccaacaatctctaacactcttctacctcaacacagccgagcacctccccctcgctctctcaaccgcttcagcagagaccctaataatcacaccagcaacagcgcaccttgcgccaacctcctggctaacatccccctcaaacacaccaccctcctcccaaaccctccccttattcgaatcctcccactcggtaatcctatccgtgctctcctgtccccaacacggacacttcaccgcaaccctcgtaccattctacatcgacacactcctctcctcctttccttcgcgcatctctccacgacaattccgcctcgcattcaggacagtgatgcaagtcgcctccccacccttccccatctcggcctccgctccagaactcagcgagacactcctagaaatgctgcgtttccgggccgagacagcatcaaccgctcctttgccgcccacacccgaggataatgcccttaccgagtcagcgacaggacctatctctgagcagacagcgcttgttctagctttaatcgatgcattgccctacctccccacgacactagtcgatgaatggctcacccgcgcagcggaatcctgttctgcgatccaggacccgtttatgcgcgatacggcgcgcaggaggctgtgggatgtactggctgatggggagatggatgtcgagcgagctgttgcggggatcacgtggtgggggagtaggggagggagggagatgttgagggatggggaaggggagtttatgatgagtggtgctattgtgaaggaggatgcgaggagtcggctttag

SEQ ID NO: 20446 - protein, 689 aa, Muscodor strobelii
  misc_feature: SGI Peptide ID NO. 566900
  misc_feature (1)..(689): NCBI GI: 261360245 Blast Desc: peroxin 8 [Verticillium albo-atrum VaMs.102]
  misc_feature (1)..(689): NCBI GI: 256733279 Blast Desc: [Nectria haematococca mpVI 77-13-4]
  misc_feature (1)..(689): NCBI GI: 46124627 Blast Desc: FG06691.1 [Gibberella zeae PH-1]
  misc_feature (1)..(689): NCBI GI: 171686792 Blast Desc: protein product [Podospora anserina] gi|170943357|emb|CAP69010.1| protein product [Podospora anserina]
  misc_feature (1)..(689): NCBI GI: 164428763 Blast Desc: NCU00032 [Neurospora crassa OR74A] gi|157072269|gb|EAA27783.2| [Neurospora crassa OR74A]
  misc_feature (1)..(686): NCBI GI: 39939824 Blast Desc: MGG_05328 [Magnaporthe grisea 70-15] gi|145010385|gb|EDJ95041.1| MGG_05328 [Magnaporthe grisea 70-15]
  misc_feature (1)..(689): NCBI GI: 154301505 Blast Desc: BC1G_10422 [Botryotinia fuckeliana B05.10] gi|150856162|gb|EDN31354.1| BC1G_10422 [Botryotinia fuckeliana B05.10]
  misc_feature (1)..(686): NCBI GI: 156032959 Blast Desc: SS1G_13555 [Sclerotinia sclerotiorum 1980] gi|154698958|gb|EDN98696.1| SS1G_13555 [Sclerotinia sclerotiorum 1980]
  misc_feature (21)..(684): NCBI GI: 169621239 Blast Desc: SNOG_13828 [Phaeosphaeria nodorum SN15] gi|111057732|gb|EAT78852.1| SNOG_13828 [Phaeosphaeria nodorum SN15]
  misc_feature (1)..(689): NCBI GI: 259479647 Blast Desc: TPA: microbody (peroxisome) biogenesis protein peroxin 8 (Eurofung) [Aspergillus nidulans FGSC A4]
  misc_feature: Useful for introducing or modulating the production of volatile compounds
MPADRMLNTVLRAYQDPPNPTQTDKILGTTNTLLSSLNNPLNLSLLTSHFLTARAIWTQPDGLRSCLRIISIYNTAAIHVRQNELDNANLAPGQPPVGSGLRAETWARAVAKGLDDRSNRWQHTLVLAGILMGMEGDDRRSLSWSLRSTLEHAVVRAANLALEDHSKTDILGRGAVVLAMTFAMPLLSASSKELVNGTALLPAVIEAMLGDEGFQHAEFIRAISLDMAPARLAWPSNSPSVSRIQALESRPLAQNMGPLSRLAVFAIQHASDSNAVLRAHEALLAFTTGLLDKWEHCSLSTVDLSVEQVRLPPDVLQGQWLMLWQLLKKIMFTVVATVQPIVGRCLLDPYLRHDSVAPLLASKTLQILRNLSFISFRDGGNSFQVYQFTYLTSLDIITRYPEASTKFLAETLPPPPQTGIVPSPVQQSLTLFYLNTAEHLPLALSTASAETLIITPATAHLAPTSWLTSPSNTPPSSQTLPLFESSHSVILSVLSCPQHGHFTATLVPFYIDTLLSSFPSRISPRQFRLAFRTVMQVASPPFPISASAPELSETLLEMLRFRAETASTAPLPPTPEDNALTESATGPISEQTALVLALIDALPYLPTTLVDEWLTRAAESCSAIQDPFMRDTARRRLWDVLADGEMDVERAVAGITWWGSRGGREMLRDGEGEFMMSGAIVKEDARSRL

SEQ ID NO: 20447 - DNA, 2405 bp, Muscodor strobelii
  misc_feature: SGI EST ID NO. CUFF.47860.0
  misc_feature: Variant of the nucleotide sequence at SEQ ID NO 20445
ttcgaaacaacaccaaagcatcctcatgtcgcagcagaacaatggtagcatcgaatctcaatgcgcgccatgattgtaaaataatactcatatcgtggtcttcatcatgccagccgaccgaatgctcaacacggtcctacgggcctaccaggaccctccgaatcccactcaaacagacaagatcctcggaaccaccaacacgcttctatcgagtctcaacaatcccttgaatctctccctcctcacatcccacttcctgaccgctcgcgccatatggacccagcccgatggcttgcgcagttgcttgcgcatcatcagcatctacaataccgccgctatccacgtccgccagaacgagctggacaatgcgaacctcgcgcctgggcagcccccagtgggcagtgggttgagggccgagacatgggctcgcgcagtcgccaaaggattagatgataggtcgaatcgatggcagcacactttagtacttgctggtatactcatgggtatggagggcgatgacaggagatccctctcctggagtctaagatcaactctcgagcatgctgtggtcagagccgcaaacctagccttggaggaccattccaagacagatatcctaggcagaggtgctgtcgtgctcgcaatgacctttgctatgccgctgctgtcagcatccagcaaggaactcgtcaatggcaccgcccttcttccggcggtgatagaagccatgctaggggatgaaggattccagcatgcggaatttattcgtgccatttcgcttgatatggcacctgcgcgacttgcctggccctcgaattcgccatcagtgagccgcatacaggcattggaatccagaccgctagctcaaaacatgggacctctgtcccggcttgccgtcttcgctatccagcatgcgtctgactccaatgcagtccttcgcgcccacgaagcactcttagctttcaccacgggcttgctagataaatgggaacactgctccctgtccacggtcgacttgtctgtcgaacaagttagactgcctccagatgtgctccagggacagtggctaatgctatggcaacttctgaagaagatcatgttcacagtcgtcgccacagtacaacctatagtcggacgctgtcttcttgatccgtatctacgtcatgattccgtagcaccattactcgcctcaaaaactctacaaatcctccgcaacctctcattcatctctttccgagacggcggaaactcattccaagtctaccaattcacctacctcacctccttggacatcataacccgctacccagaagcaagcaccaaattcctcgcagagaccctcccaccaccaccacaaaccggcatcgtcccatcgccagtccaacaatctctaacactcttctacctcaacacagccgagcacctccccctcgctctctcaaccgcttcagcagagaccctaataatcacaccagcaacagcgcaccttgcgccaacctcctggctaacatccccctcaaacacaccaccctcctcccaaaccctccccttattcgaatcctcccactcggtaatcctatccgtgctctcctgtccccaacacggacacttcaccgcaaccctcgtaccattctacatcgacacactcctctcctcctttccttcgcgcatctctccacgacaattccgcctcgcattcaggacagtgatgcaagtcgcctccccacccttccccatctcggcctccgctccagaactcagcgagacactcctagaaatgctgcgtttccgggccgagacagcatcaaccgctcctttgccgcccacacccgaggataatgcccttaccgagtcagcgacaggacctatctctgagcagacagcgcttgttctagctttaatcgatgcattgccctacctccccacgacactagtcgatgaatggctcacccgcgcagcggaatcctgttctgcgatccaggacccgtttatgcgcgatacggcgcgcaggaggctgtgggatgtactggctgatggggagatggatgtcgagcgagctgttgcggggatcacgtggtgggggagtaggggagggagggagatgttgagggatggggaaggggagtttatgatgagtggtgctattgtgaaggaggatgcgaggagtcggctttaggattgagggggtggttgtgtggataagtgctgtgtatatggatgggagtgtgtgagagtagattataagtctacggtatgtattggggcttgcaatggacttctgagtcgaaactcgaacagctatagcaaatactagcacagagaaggtgtagtgcctatactaatcattaagctaatcacttccatcacgtttataatgtaaatccagcgtgattaaaagacctact

SEQ ID NO: 20448 - DNA, 468 bp, Muscodor strobelii
  misc_feature: SGI cDNA ID NO. 566901
  misc_feature: Encodes the peptide sequence at SEQ ID NO 20449
atgcaagtcgcctccccacccttccccatctcggcctccgctccagaactcagcgagacactcctagaaatgctgcgtttccgggccgagacagcatcaaccgctcctttgccgcccacacccgaggataatgcccttaccgagtcagcgacaggacctatctctgagcagacagcgcttgttctagctttaatcgatgcattgccctacctccccacgacactagtcgatgaatggctcacccgcgcagcggaatcctgttctgcgatccaggacccgtttatgcgcgatacggcgcgcaggaggctgtgggatgtactggctgatggggagatggatgtcgagcgagctgttgcggggatcacgtggtgggggagtaggggagggagggagatgttgagggatggggaaggggagtttatgatgagtggtgctattgtgaaggaggatgcgaggagtcggctttag

SEQ ID NO: 20449 - protein, 155 aa, Muscodor strobelii
  misc_feature: SGI Peptide ID NO. 566901
  misc_feature (1)..(152): NCBI GI: 39939824 Blast Desc: MGG_05328 [Magnaporthe grisea 70-15] gi|145010385|gb|EDJ95041.1| MGG_05328 [Magnaporthe grisea 70-15]
  misc_feature (1)..(155): NCBI GI: 261360245 Blast Desc: peroxin 8 [Verticillium albo-atrum VaMs.102]
  misc_feature (1)..(155): NCBI GI: 256733279 Blast Desc: [Nectria haematococca mpVI 77-13-4]
  misc_feature (1)..(155): NCBI GI: 164428763 Blast Desc: NCU00032 [Neurospora crassa OR74A] gi|157072269|gb|EAA27783.2| [Neurospora crassa OR74A]
  misc_feature (1)..(155): NCBI GI: 46124627 Blast Desc: FG06691.1 [Gibberella zeae PH-1]
  misc_feature (1)..(155): NCBI GI: 171686792 Blast Desc: protein product [Podospora anserina] gi|170943357|emb|CAP69010.1| protein product [Podospora anserina]
  misc_feature (1)..(153): NCBI GI: 189206812 Blast Desc: conserved [Pyrenophora tritici-repentis Pt-1C-BFP] gi|187975833|gb|EDU42459.1| conserved [Pyrenophora tritici-repentis Pt-1C-BFP]
  misc_feature (1)..(152): NCBI GI: 156032959 Blast Desc: SS1G_13555 [Sclerotinia sclerotiorum 1980] gi|154698958|gb|EDN98696.1| SS1G_13555 [Sclerotinia sclerotiorum 1980]
  misc_feature (1)..(150): NCBI GI: 169621239 Blast Desc: SNOG_13828 [Phaeosphaeria nodorum SN15] gi|111057732|gb|EAT78852.1| SNOG_13828 [Phaeosphaeria nodorum SN15]
  misc_feature (1)..(155): NCBI GI: 154301505 Blast Desc: BC1G_10422 [Botryotinia fuckeliana B05.10] gi|150856162|gb|EDN31354.1| BC1G_10422 [Botryotinia fuckeliana B05.10]
MQVASPPFPISASAPELSETLLEMLRFRAETASTAPLPPTPEDNALTESATGPISEQTALVLALIDALPYLPTTLVDEWLTRAAESCSAIQDPFMRDTARRRLWDVLADGEMDVERAVAGITWWGSRGGREMLRDGEGEFMMSGAIVKEDARSRL

SEQ ID NO: 20450 - DNA, 2405 bp, Muscodor strobelii; identical to SEQ ID NO: 20447
  misc_feature: SGI EST ID NO. CUFF.47860.0
  misc_feature: Variant of the nucleotide sequence at SEQ ID NO 20448

SEQ ID NO: 20451 - DNA, 708 bp, Muscodor strobelii
  misc_feature: SGI cDNA ID NO. 566902
  misc_feature: Reduced expression when VOC is produced
  misc_feature: Encodes the peptide sequence at SEQ ID NO 20452
atggctctacgcggacttgacctggaggagaaccgacggcggatgaagaacggtgatttgtatttctccttcgccgaagacctcgttgaagaccgcaggagatgccgcatagcctgcgaggaatacaaccatgccaagaaccctaccagacggcaggaggtccagttactccaagacatcctcggagacaagaccgtcttcccgcctccagcagccacggagaaagaggacgaggatctgttcagtggcttcctctggtgtgaccgtcccatcaagatggactatgggcataacgtaaaatttggcaaagacgtctacctcaactcgaattcggtttggattgactcggtccctatcaccgtgggagaccgtgttctgttcgggcccaattgcactatcatctcgggcacgcatcccacagatccgaaagtgcgtgcgggcatcaatggcccggagacaggcaagccagtcgtgatcggcgacgattgttggctcggtgccaatgtcatggtgctcccgggggttaccattggtcgaggctcgaccgtcggtgccggaagtgtcgtcacgaaggatatccctccattcatggtggcagtaggaaacccagcaagggcaatcaagccgatccgagaagtgcccgcggaggaactacctcctggatggacacctccagcagacattccaaattccgaagtcaagcagtaa

SEQ ID NO: 20452 - protein, 235 aa, Muscodor strobelii
  misc_feature: SGI Peptide ID NO. 566902
  misc_feature (1)..(219): NCBI GI: 261360247 Blast Desc: galactoside O-acetyltransferase [Verticillium albo-atrum VaMs.102]
  misc_feature (6)..(210): NCBI GI: 238493763 Blast Desc: acetyltransferase, CysE/LacA/LpxA/NodL family [Aspergillus flavus NRRL3357] gi|220696612|gb|EED52954.1| acetyltransferase, CysE/LacA/LpxA/NodL family [Aspergillus flavus
  misc_feature (12)..(216): NCBI GI: 255935687 Blast Desc: Pc13g04350 [Penicillium chrysogenum Wisconsin 54-1255] gi|211583490|emb|CAP91504.1| Pc13g04350 [Penicillium chrysogenum Wisconsin 54-1255]
  misc_feature (6)..(213): NCBI GI: 171680514 Blast Desc: protein product [Podospora anserina] gi|170939884|emb|CAP65110.1| protein product [Podospora anserina]
  misc_feature (14)..(216): NCBI GI: 240105897 Blast Desc: CPC735_054600 [Coccidioides posadasii C735 delta SOWgp]
  misc_feature (14)..(216): NCBI GI: 119192954 Blast Desc: CIMG_00854 [Coccidioides immitis RS]
  misc_feature (12)..(210): NCBI GI: 121698273 Blast Desc: acetyltransferase, CysE/LacA/LpxA/NodL family [Aspergillus clavatus NRRL 1] gi|119395910|gb|EAW06342.1| acetyltransferase, CysE/LacA/LpxA/NodL family [Aspergillus NRRL
  misc_feature (15)..(210): NCBI GI: 71000992 Blast Desc: acetyltransferase, CysE/LacA/LpxA/NodL family [Aspergillus fumigatus Af293] gi|66852815|gb|EAL93139.1| acetyltransferase, CysE/LacA/LpxA/NodL family [Aspergillus Af293]
  misc_feature (1)..(210): NCBI GI: 115442990 Blast Desc: ATEG_09680 [Aspergillus terreus NIH2624] gi|114188171|gb|EAU29871.1| ATEG_09680 [Aspergillus terreus NIH2624]
  misc_feature (1)..(210): NCBI GI: 119480645 Blast Desc: acetyltransferase, CysE/LacA/LpxA/NodL family [Neosartorya fischeri NRRL 181] gi|119408505|gb|EAW18454.1| acetyltransferase, CysE/LacA/LpxA/NodL family [Neosartorya NRRL
  misc_feature (8)..(210): SWISSPROT Homolog: EC 2.3.1.79 Maltose O-acetyltransferase
  misc_feature: Useful for introducing or modulating the production of volatile compounds
MALRGLDLEENRRRMKNGDLYFSFAEDLVEDRRRCRIACEEYNHAKNPTRRQEVQLLQDILGDKTVFPPPAATEKEDEDLFSGFLWCDRPIKMDYGHNVKFGKDVYLNSNSVWIDSVPITVGDRVLFGPNCTIISGTHPTDPKVRAGINGPETGKPVVIGDDCWLGANVMVLPGVTIGRGSTVGAGSVVTKDIPPFMVAVGNPARAIKPIREVPAEELPPGWTPPADIPNSEVKQ

SEQ ID NO: 20453 - DNA, 1828 bp, Muscodor strobelii
  misc_feature: SGI EST ID NO. CUFF.48204.0
  misc_feature: Variant of the nucleotide sequence at SEQ ID NO 20451
agggacataagtcagtgaatgaagtgatccaccggcacagcctctagaatctcgtgtcatctcctctactctgcaccttccatgatttcacccctacgcgttcctatctcgtgtgctttaggctccaggttgtacgtacacagtccatcttagttgagcacaattggcttgttcgtatatcggatctctacctgagatagtattacaccggtaacaacaccttagtggagcatagaacatagggatatagaaaccaccgattgtagccattcgttctcaacacttctcgtacttatagctctaggtagtagagattgaccattcaatctcaccatggctctacgcggacttgacctggaggagaaccgacggcggatgaagaacggtgatttgtatttctccttcgccgaagacctcgttgaagaccgcaggagatgccgcatagcctgcgaggaatacaaccatgccaagaaccctaccagacggcaggaggtccagttactccaagagtcagacttcttcctcacacatctactcggcattgccatattctaacactctccatatagcatcctcggagacaagaccgtcttcccgcctccagcagccacggagaaagaggacgaggatctgttcagtggcttcctctggtgtgaccgtcccatcaagatggactatgggcataacgtaaaatttggcaaagacgtctacctcaactcgaattcggtttggattgactcggtccctatcaccgtgggagaccgtgttctgttcgggcccaattgcactatcatctcgggcacgcatcccacagatccgaaagtgcgtgcgggcatcaatggcccggagacaggcaagccagtcgtgatcggcgacgattgttggctcggtgccaatgtcatggtgctcccgggggttaccattggtcgaggctcgaccgtcggtgccggaagtgtcgtcacgaaggatatccctccattcatggtggcagtaggaaacccagcaagggcaatcaagccgatccgagaagtgcccgcggaggaactacctcctggatggacacctccagcagacattccaaattccgaagtcaagcagtaaggcttttctagagacctccctgaatggtgaacgacgagacaatcagaactagagtattgattataccccagacaaaggggatccatgtagaaatttcgtagcatccggcctggtagagggcgccgagactagcgaaattgacagagtcagcatacggttcggcgaagcaagtgagaatccgccgtacatagacccagtgatactacccacaatcagggcttcaatgccagctatgacggcatatataaaaggtattgcggctagatatgtccatatcgttctcggtttcccaatctgcatgaccagagcaatagccgtggcgctcaagtggaaggcagagaagaagatcatggtccaaaggagagtgaagcgccatgactggtagacggaatagatattgcatttgtgaggtggccagcatatggaagggaatcgatggacttcgtacccatccgaaggatagtccttacaatttatgctgcgaggaaggtcagtcgccgcgtcacgtttgtcacgaaagcagggggataaactgactgtgcaggcatctggccggattctcgcaatggcagacgttcgcttgataggctaaggagaaagcattgccattcttaacgtaggaagacgagagctatataggtagtgatttaagaagtgaaggtccggcgccttcagatcggatggctgacttaggttcatgtagatgcgattgtggatgaggttggaa

SEQ ID NO: 20454 - DNA, 1086 bp, Muscodor strobelii
  misc_feature: SGI cDNA ID NO. 566903
  misc_feature: Reduced expression when VOC is produced
  misc_feature: Encodes the peptide sequence at SEQ ID NO 20455
atgtacgacatgccgtccgacgacttggaccctgtttctgtacctgcgcctatcgctgtgcctcctccaccacccgcgagcgcaacgctgtccagcccccaccccgacacaccgacggtctccatgtttaccacgtcgcccttccgaaccggcttctcgctgctcgacaccgtcagcgagcacgacgacgaccagaagacatgggagcccaacatgagaagccggcgcaaggcccgtcagcgctcctacgccgagacatcgcttgccgtgcccatggcccccatcaacacagcgcactctgcagacatggacactaacaatctcctgcctattctcagtcccgtcgcgcaacatgctcaaatcacgcccgacctgccgtacctccccggccgatccaaatccctcgagggcatagccgtccgatccttctgtctaggcgtcggcctcaccctatccgtcttattgatgctatctatcctgatatttacctcatctcctctatggcgcgtccccttcttcatcggcgccctctcgaccttccacttcctcgaattctggacgacggccaaatacaataccagcgttgcggctgtcagctcgttcctgttgacggccaactggcctgcctatgcgatcgcgcacgtgtcggcttcactagagtgtctcctcacgaacctcatatttcccagccgctcgtgggcacccttctacagcggacacatcctgctgctagtcggcttcatcttggtctttgttggacagactgcccgcagcgcagccatgatccaggcgggcgagtcattcaaccacacgattcagagaaagaagaaggacaatcacgacttggtcactacggggctctactctcgcttacgccacccatcgtatttcgggttcttctactggagtatcggcacacagcttgttttaggcaacccgatatgctttgttggctacctggttgtgctgtggaagttcttctcagcgcgcatcaaggatgaggaagagggactgactaggttctttggggaggagtatttggagtataagaagagggttggcacgggtattccgttgattagatga

SEQ ID NO: 20455 - protein, 361 aa, Muscodor strobelii
  misc_feature: SGI Peptide ID NO. 566903
  misc_feature (244)..(340): Pfam Id: PF04140 Pfam Desc: Isoprenylcysteine carboxyl methyltransferase (ICMT) family
  misc_feature (90)..(360): NCBI GI: 46124623 Blast Desc: FG06689.1 [Gibberella zeae PH-1]
  misc_feature (126)..(361): NCBI GI: 256732821 Blast Desc: NECHADRAFT_79411 [Nectria haematococca mpVI 77-13-4]
  misc_feature (70)..(360): NCBI GI: 85082949 Blast Desc: NCU00034 [Neurospora crassa OR74A] gi|28918104|gb|EAA27785.1| conserved [Neurospora crassa OR74A]
  misc_feature (99)..(360): NCBI GI: 145601915 Blast Desc: MGG_05331 [Magnaporthe grisea 70-15] gi|145010382|gb|EDJ95038.1| MGG_05331 [Magnaporthe grisea 70-15]
  misc_feature (123)..(360): NCBI GI: 116192053 Blast Desc: CHGG_05744 [Chaetomium globosum CBS 148.51] gi|88181657|gb|EAQ89125.1| CHGG_05744 [Chaetomium globosum CBS 148.51]
  misc_feature (124)..(361): NCBI GI: 238841926 Blast Desc: S-isoprenylcysteine O-methyltransferase [Microsporum canis CBS 113480]
  misc_feature (86)..(361): NCBI GI: 238493765 Blast Desc: prenyl cysteine carboxyl methyltransferase Ste14 [Aspergillus flavus NRRL3357] gi|220696613|gb|EED52955.1| prenyl cysteine carboxyl methyltransferase Ste14 [Aspergillus flavus
  misc_feature (123)..(314): NCBI GI: 171686796 Blast Desc: protein product [Podospora anserina] gi|170943359|emb|CAP69012.1| protein product [Podospora anserina]
  misc_feature (117)..(360): NCBI GI: 239606375 Blast Desc: prenyl cysteine carboxyl methyltransferase Ste14 [Ajellomyces dermatitidis ER-3]
  misc_feature (114)..(360): NCBI GI: 67539984 Blast Desc: AN6162.2 [Aspergillus nidulans FGSC A4] gi|40738758|gb|EAA57948.1| AN6162.2 [Aspergillus nidulans FGSC A4]
  misc_feature (163)..(361): SWISSPROT Homolog: EC 2.1.1.100 Protein-S-isoprenylcysteine O-methyltransferase
  misc_feature: Useful for introducing or modulating the production of volatile compounds
MYDMPSDDLDPVSVPAPIAVPPPPPASATLSSPHPDTPTVSMFTTSPFRTGFSLLDTVSEHDDDQKTWEPNMRSRRKARQRSYAETSLAVPMAPINTAHSADMDTNNLLPILSPVAQHAQITPDLPYLPGRSKSLEGIAVRSFCLGVGLTLSVLLMLSILIFTSSPLWRVPFFIGALSTFHFLEFWTTAKYNTSVAAVSSFLLTANWPAYAIAHVSASLECLLTNLIFPSRSWAPFYSGHILLLVGFILVFVGQTARSAAMIQAGESFNHTIQRKKKDNHDLVTTGLYSRLRHPSYFGFFYWSIGTQLVLGNPICFVGYLVVLWKFFSARIKDEEEGLTRFFGEEYLEYKKRVGTGIPLIR

SEQ ID NO: 20456 - DNA, 1687 bp, Muscodor strobelii
  misc_feature: SGI EST ID NO. CUFF.48235.1
  misc_feature: Variant of the nucleotide sequence at SEQ ID NO 20454
gggtagagctcaaataacccctgactctagggtccgcctcggagcttttttcgcatgagacgcggcctgcgacggacgctaaaattacctgcgtcgatatgatttcgtcactggcccgaaaaacaaagaatgttacactcgatttgcgccttgacgacaagcaggtcacgacgactgtcgatgactataacctttgtccttggtcaatgaaatccgcttgataggtctatcagcggtgcaacaaaaagaataagtgtccagcgcgacaatggactcgccgctcgacaggtaagcgcatctctcttattccatttcccttcgccttggagcccctcgaaacacacgacgctttgccatttgtccacgatactgccgactctccctcgactggctcccgtagacggatgcaacacatgtacgacatgccgtccgacgacttggaccctgtttctgtacctgcgcctatcgctgtgcctcctccaccacccgcgagcgcaacgctgtccagcccccaccccgacacaccgacggtctccatgtttaccacgtcgcccttccgaaccggcttctcgctgctcgacaccgtcagcgagcacgacgacgaccagaagacatgggagcccaacatgagaagccggcgcaaggcccgtcagcgctcctacgccgagacatcgcttgccgtgcccatggcccccatcaacacagcgcactctgcagacatggacactaacaatctcctgcctattctcagtcccgtcgcgcaacatgctcaaatcacgcccgacctgccgtacctccccggccgatccaaatccctcgagggcatagccgtccgatccttctgtctaggcgtcggcctcaccctatccgtcttattgatgctatctatcctgatatttacctcatctcctctatggcgcgtccccttcttcatcggcgccctctcgaccttccacttcctcgaattctggacgacggccaaatacaataccagcgttgcggctgtcagctcgttcctgttgacggccaactggcctgcctatgcgatcgcgcacgtgtcggcttcactagagtgtctcctcacgaacctcatatttcccagccgctcgtgggcacccttctacagcggacacatcctgctgctagtcggcttcatcttggtctttgttggacagactgcccgcagcgcagccatgatccaggcgggcgagtcattcaaccacacgattcagagaaagaagaaggacaatcacgacttggtcactacggggctctactctcgcttacgccacccatcgtatttcgggttcttctactggagtatcggcacacagcttgttttaggcaacccgatatgctttgttggctacctggttgtgctgtggaagttcttctcagcgcgcatcaaggatgaggaagagggactgactaggttctttggggaggagtatttggagtataagaagagggttggcacgggtattccgttgattagatgatggctagaagctaggagataccccgagatatgagagacggttggtgggtgtgcattagacatagacagatgttgtacattttgcagcctcggattggcatgagaatactaatatttcagaacactgatcacagtggaattttctatatggtagctcatatgacagtgccggtgtgaactttagcaatg

SEQ ID NO: 20457 - DNA, 2100 bp, Muscodor strobelii
  misc_feature: SGI cDNA ID NO. 566904
  misc_feature: Reduced expression when VOC is produced
  misc_feature: Encodes the peptide sequence at SEQ ID NO 20458
atgagttcagactactcttacgatgagcagggtcaattctaccccttcttcatctttaccctctccaccatcgtcaccctcccactcacttacagtctgctctcgccgacgaaggaccccgccgccctcgcaccgcgcaccaagacagactacaagccagatcatggcgacatcatcgacaagcagcgtaaggcgtaccggcgcaagcagcgcaagatcaagcgcggcattgctgccatactaggttgggccatcatggccggcatgctctacctcatcgtcaccacccagcgcaccaccctcaaattatggaacccctacgacatcctcggcctgtccgagtcctccaccgagaagcagatcaagtcacactacaagcgcctcggtctcaagttccatcccgacaagatccgccccgaccccgccaagaacgagaccctcgagtccctcaacgacaaatgggttgagctgaccaaggcctaccaggctttgactgacgaggaggttcgcaacaactggatccaatacggccatcccgacggcaagcagggcttctccatcggcattgctctccccaagttcatcgttacggacgggaacgggaagtacgtcgttctggtctatgccatgctcctcggtgtacttctcccataccttgtcggctcctggtggtatggcactcagcgcgtgaccaaggaaggcgtcgaagtcgagagcgccaacaacctgttccgtgaatacaccgacgctacgggcaccgacgacctaatcacagttttgagcacgggcaaggaataccgctcgttcctcaagggcgacaaggccgagtctgggcttgctaagattgagtccaggattttagcccctggtcaggtcactgaatttgcgggtggactcagagacaaggacaaggacaagctacaagatttggagggcggcgttaggagaaaagtcctctctcttctgtgggcttatttgggaagagtcgagctggaagatgacgctctcaacagcgccaagtacatggtggcccctatcgcccaaatgctatgtcaatcattcacagccattgccctcgcttatggcaactccgcacccctcctttcttcttactacctccgccaacgtttcatccaagcggtaccgccaaatggatcgcccctactccagctacctcactttacccctgccatcgcgaaggcgattgacggtgaatccaagacacccatggatgtccagactttcatgagcaagcccgaggcccaacggaagaagctggctgtaggcaagggtctgctgactgagcagcaattaagtactgccgtcgatgttgccaagcaattaccgcacttccaggtcgcgaaagctttcttcaaggttgccggcgaaaagtacatcatcccatcatccctcgtatccttcgttgtgaagggtcgtttcatccccccaggcactaccaacatcccggaaatcaacgagttagatctcgaagacgtggacccagcagaagacgacctcgacgccatgctcggtcgcaagaagacagtgaaagacgcaagcgggaaattagtatcggaggaacccctgaaaatcgcaccgccactagctttcgcaccacactacgctcgcgagcactcgccgagatggcacatcttcctatcggacagcaagcagggccgcatggctgtaccgccgttcacatttgccattttcgacaagccgatcttcacggcggacgggaaaccaacgtttgagatgcagacgatgaagatgcagtttgctgcgccaccgcaagcgggcaattacacattcgtcatgcatttagtgtgtgatagctatattggtttcgacaccaagatggaggtcacgcttagcgtggaagaggcgagcaaggctgcgcagatggctgctgaggacgagatcagtgaacctgaagaggattcactagcgggccaaatgaacgcaatgagaggaggacctgtcgcaccaccaaagaagaagaaggcagaggacgaggaaagcagcgaggaggagagcggcacggatgtcgaggagagcgatacgagtgctactaatactgacaccgaggatgagtcttga

SEQ ID NO: 20458 - protein, 699 aa, Muscodor strobelii
  misc_feature: SGI Peptide ID NO. 566904
  misc_feature (105)..(174): Pfam Id: PF00226 Pfam Desc: DnaJ domain
  misc_feature (209)..(568): Pfam Id: PF02889 Pfam Desc: Sec63 Brl domain
  misc_feature (209)..(269): Pfam Id: PF02889 Pfam Desc: Sec63 Brl domain
  misc_feature (317)..(400): Pfam Id: PF02889 Pfam Desc: Sec63 Brl domain
  misc_feature (1)..(699): NCBI GI: 46124533 Blast Desc: FG06644.1 [Gibberella zeae PH-1]
  misc_feature (1)..(684): NCBI GI: 39939840 Blast Desc: MGG_05320 [Magnaporthe grisea 70-15] gi|145010393|gb|EDJ95049.1| MGG_05320 [Magnaporthe grisea 70-15]
  misc_feature (3)..(689): NCBI GI: 156037670 Blast Desc: SS1G_12549 [Sclerotinia sclerotiorum 1980] gi|154697957|gb|EDN97695.1| SS1G_12549 [Sclerotinia sclerotiorum 1980]
  misc_feature (3)..(689): NCBI GI: 154316343 Blast Desc: BC1G_03757 [Botryotinia fuckeliana B05.10] gi|150846543|gb|EDN21736.1| BC1G_03757 [Botryotinia fuckeliana B05.10]
  misc_feature (1)..(675): NCBI GI: 85081216 Blast Desc: NCU00169 [Neurospora crassa OR74A] gi|28917755|gb|EAA27446.1| NCU00169 [Neurospora crassa OR74A]
  misc_feature (2)..(698): NCBI GI: 119186481 Blast Desc: CIMG_03288 [Coccidioides immitis RS]
  misc_feature (2)..(682): NCBI GI: 261189925 Blast Desc: translocation complex componenet [Ajellomyces dermatitidis SLH14081] gi|239591609|gb|EEQ74190.1| translocation complex componenet [Ajellomyces dermatitidis SLH14081]
  misc_feature (2)..(696): NCBI GI: 240108556 Blast Desc: DnaJ domain containing protein [Coccidioides posadasii C735 delta SOWgp]
  misc_feature (2)..(682): NCBI GI: 239612861 Blast Desc: translocation complex component [Ajellomyces dermatitidis ER-3]
  misc_feature (2)..(667): NCBI GI: 225561561 Blast Desc: translocation protein sec63 [Ajellomyces capsulatus G186AR]
  misc_feature: Useful for introducing or modulating the production of volatile compounds
MSSDYSYDEQGQFYPFFIFTLSTIVTLPLTYSLLSPTKDPAALAPRTKTDYKPDHGDIIDKQRKAYRRKQRKIKRGIAAILGWAIMAGMLYLIVTTQRTTLKLWNPYDILGLSESSTEKQIKSHYKRLGLKFHPDKIRPDPAKNETLESLNDKWVELTKAYQALTDEEVRNNWIQYGHPDGKQGFSIGIALPKFIVTDGNGKYVVLVYAMLLGVLLPYLVGSWWYGTQRVTKEGVEVESANNLFREYTDATGTDDLITVLSTGKEYRSFLKGDKAESGLAKIESRILAPGQVTEFAGGLRDKDKDKLQDLEGGVRRKVLSLLWAYLGRVELEDDALNSAKYMVAPIAQMLCQSFTAIALAYGNSAPLLSSYYLRQRFIQAVPPNGSPLLQLPHFTPAIAKAIDGESKTPMDVQTFMSKPEAQRKKLAVGKGLLTEQQLSTAVDVAKQLPHFQVAKAFFKVAGEKYIIPSSLVSFVVKGRFIPPGTTNIPEINELDLEDVDPAEDDLDAMLGRKKTVKDASGKLVSEEPLKIAPPLAFAPHYAREHSPRWHIFLSDSKQGRMAVPPFTFAIFDKPIFTADGKPTFEMQTMKMQFAAPPQAGNYTFVMHLVCDSYIGFDTKMEVTLSVEEASKAAQMAAEDEISEPEEDSLAGQMNAMRGGPVAPPKKKKAEDEESSEEESGTDVEESDTSATNTDTEDES

SEQ ID NO: 20459 - DNA, 2630 bp, Muscodor strobelii
  misc_feature: SGI EST ID NO. CUFF.47905.0
  misc_feature: Variant of the nucleotide sequence at SEQ ID NO 20457
ttggcgcggccttggcattcgttaattcccatcagaggccacgattcaacagctgcagcagtttacactgaacatctccacgataataataatccaagatcaccacttcgacaccaccaaactccgtcgcccacttccagtccgtaacacacacacgatcaggttaggcgacatcttgactccttttcaaaagaccctgtcgtagggcacgtctgcgccatgagttcagactactcttacgatgagcagggtcaattctaccccttcttcatctttaccctctccaccatcgtcaccctcccactcacttacagtctgctctcgccgacgaaggaccccgccgccctcgcaccgcgcaccaagacagactacaagccagatcatggcgacatcatcgacaagcagcgtaaggcgtaccggcgcaagcagcgcaagatcaagcgcggcattgctgccatactaggttgggccatcatggccggcatgctctacctcatcgtcaccacccagcgcaccaccctcaaattatggaacccctacgacatcctcggcctgtccgagtcctccaccgagaagcagatcaagtcacactacaagcgcctcggtctcaagttccatcccgacaagatccgccccgaccccgccaagaacgagaccctcgagtccctcaacgacaaatgggttgagctgaccaaggcctaccaggctttgactgacgaggaggttcgcaacaactggatccaatacggccatcccgacggcaagcagggcttctccatcggcattgctctccccaagttcatcgttacggacgggaacgggaagtacgtcgttctggtctatgccatgctcctcggtgtacttctcccataccttgtcggctcctggtggtatggcactcagcgcgtgaccaaggaaggcgtcgaagtcgagagcgccaacaacctgttccgtgaatacaccgacgctacgggcaccgacgacctaatcacagttttgagcacgggcaaggaataccgctcgttcctcaagggcgacaaggccgagtctgggcttgctaagattgagtccaggattttagcccctggtcaggtcactgaatttgcgggtggactcagagacaaggacaaggacaagctacaagatttggagggcggcgttaggagaaaagtcctctctcttctgtgggcttatttgggaagagtcgagctggaagatgacgctctcaacagcgccaagtacatggtggcccctatcgcccaaatgctatgtcaatcattcacagccattgccctcgcttatggcaactccgcacccctcctttcttcttactacctccgccaacgtttcatccaagcggtaccgccaaatggatcgcccctactccagctacctcactttacccctgccatcgcgaaggcgattgacggtgaatccaagacacccatggatgtccagactttcatgagcaagcccgaggcccaacggaagaagctggctgtaggcaagggtctgctgactgagcagcaattaagtactgccgtcgatgttgccaagcaattaccgcacttccaggtcgcgaaagctttcttcaaggttgccggcgaaaagtacatcatcccatcatccctcgtatccttcgttgtgaagggtcgtttcatccccccaggcactaccaacatcccggaaatcaacgagttagatctcgaagacgtggacccagcagaagacgacctcgacgccatgctcggtcgcaagaagacagtgaaagacgcaagcgggaaattagtatcggaggaacccctgaaaatcgcaccgccactagctttcgcaccacactacgctcgcgagcactcgccgagatggcacatcttcctatcggacagcaagcagggccgcatggctgtaccgccgttcacatttgccattttcgacaagccgatcttcacggcggacgggaaaccaacgtttgagatgcagacgatgaagatgcagtttgctgcgccaccgcaagcgggcaattacacattcgtcatgcatttagtgtgtgatagctatattggtttcgacaccaagatggaggtcacgcttagcgtggaagaggcgagcaaggctgcgcagatggctgctgaggacgagatcagtgaacctgaagaggattcactagcgggccaaatgaacgcaatgagaggaggacctgtcgcaccaccaaagaagaagaaggcagaggacgaggaaagcagcgaggaggagagcggcacggatgtcgaggagagcgatacgagtgctactaatactgacaccgaggatgagtcttgatgcgactaggtatagatcaatgggaagaaagttcaaattcgcaatacgaatatcaccgcatgtgtattaagtacctacctacgtatatctaagcggggaaatgcggccgagatggttaggagacgggaaggaagagaaaataagagtggagggagaagagagattgagagagagagagagattgcatggctggtgcttgggcgttaaggctgtcgtatttagtatttaggtagaggactgaccgcggttggtctgcgtttgttgtggttgatatatatatggtggtttcattttgttcattttaagctgct

SEQ ID NO: 20460 - DNA, 816 bp, Muscodor strobelii
  misc_feature: SGI cDNA ID NO. 566905
  misc_feature: Encodes the peptide sequence at SEQ ID NO 20461
atgcctataccaacattcgaccggtgtcgtatcggtgatgaaatggtcgttttgaagaatgtgcagactcactccgattttaccggatcaacgttagcagatacgagtactgcaaaggtaccagctaagcagatggcgtctctgtccctgacactgctaaaggaaaaccagtcttctatcaaggagcctggtcgcgcagaaagcaatcagcatgaatccccggaaaaggcacagaaaacaatcgccgagatcgtgcccgacaactctcggggcacccgttggatagtaggggcaccgctgccaatagagccctgtgaccctcctaaggaggataatattcttagcttcagagctcctgctatctcttattctcggttcaaaatatctcgcgaaaaagattatctcgtacagctaccttatatccaccagcctaggaaccaagcagtccgtcgcatcttcgatgatcaaggtcagcactgcggtctttggtgggaacaggccgggtatggttatgtcggacttggtatagatgccgatgcagaagaacaaatattgcttgtgggtgtctcgacatatggcgatgtgtatcatcgtcgcgacggaccggatagagtggagggtgagattgaatttttcgatagcgaagcttttcctgctgttggtctaggaagtggacttgtttatgtgttggcagttgatatggatataccagataccgctagaacgggagtgggatatcgctatacagttgctgtcatccatatcaaggcttgggaagcggcgaagccgcagatgactgacttgaggattgcgtga

SEQ ID NO: 20461 - protein, 271 aa, Muscodor strobelii
  misc_feature: SGI Peptide ID NO. 566905
MPIPTFDRCRIGDEMVVLKNVQTHSDFTGSTLADTSTAKVPAKQMASLSLTLLKENQSSIKEPGRAESNQHESPEKAQKTIAEIVPDNSRGTRWIVGAPLPIEPCDPPKEDNILSFRAPAISYSRFKISREKDYLVQLPYIHQPRNQAVRRIFDDQGQHCGLWWEQAGYGYVGLGIDADAEEQILLVGVSTYGDVYHRRDGPDRVEGEIEFFDSEAFPAVGLGSGLVYVLAVDMDIPDTARTGVGYRYTVAVIHIKAWEAAKPQMTDLRIA

SEQ ID NO: 20462 - DNA, 591 bp, Muscodor strobelii
  misc_feature: SGI cDNA ID NO. 566906
  misc_feature: Encodes the peptide sequence at SEQ ID NO 20463
atgtcgagtcattcaactgcagaattagagcgtataggaaagattgaaattgcagaacagacgcgaaggaaggtgcgagaggcattagcatcaggcaatattccagtagataaagagatccagctacgtgcctccaccgccggcctgttgaccaaattatatgacgatatcaaacatccaaccttcattcatgatgcaatccaccacaaggaaacgatcctccgtcttatatgtcgggaggctcatgaatatcctacatacctcaactcattaacgaaagcgaggacttctgaatttatggtcactggatctcgacatgcactagatctcgctattgaggctgaacgcgagggttcacagctaatttggcggtttgatccggaaagctatgactctgaaactcgattagatatcaattttaactttgggtttgcgctttctcgtcgacacgcaaattctgcgaatttagaggacattgacgaggctatcgtttgctccaagaccatagatgatggtgcagccaaaggttcagaccaatacttcttggggttaaacaaccttgtttctcagatgcgcaggagactggagtag

SEQ ID NO: 20463 - protein, 196 aa, Muscodor strobelii
  misc_feature: SGI Peptide ID NO. 566906
MSSHSTAELERIGKIEIAEQTRRKVREALASGNIPVDKEIQLRASTAGLLTKLYDDIKHPTFIHDAIHHKETILRLICREAHEYPTYLNSLTKARTSEFMVTGSRHALDLAIEAEREGSQLIWRFDPESYDSETRLDINFNFGFALSRRHANSANLEDIDEAIVCSKTIDDGAAKGSDQYFLGLNNLVSQMRRRLE

SEQ ID NO: 20464 - DNA, 684 bp, Muscodor strobelii
  misc_feature: SGI cDNA ID NO. 566907
  misc_feature: Reduced expression when VOC is produced
  misc_feature: Encodes the peptide sequence at SEQ ID NO 20465
atggcgggaagaactaatcccacgaatgtcccgggtgacaaagtaccagcagaggatatcatcttggagactggcgcttcacttttacaggaatttcaacctgttaagcagctctgcgcccatctgaacgccttccatacctacgccgacgaccctggccgattcgtcgagacgaatcactattgcgcccacctcactgaagacgtccgccaatgcatcttatacgacggacctggtcctaatgcccgtctaatcggaatcgagtacatgataacacccaagctctacgatactcttcctcccgaggagcggaagttgtggcactcacatgtctacgaagtgaaatccggcatgctcatcatgccaggaccgacaatcccaggtgtgcagcaagcatgggaagcagccgaaacccaggagatgaagcacgtcattgggttatatggcaaagtgtatcatctctggcagacggatcgaggcgatgagctgcccctcggcgagcctcaattgatgactagctttactgctgataaccagtttgatttcgagaagattgtcggggatcgggataagagattcggtgttgattggaaaagaaagaagtatctgagagagggtattgaggagccgaagatccatgaagatgctgattcagcttggaagacaagacgcaattctatgtga

SEQ ID NO: 20465 - protein, 227 aa, Muscodor strobelii
  misc_feature: SGI Peptide ID NO. 566907
  misc_feature (11)..(210): Pfam Id: PF06884 Pfam Desc: Domain of function (DUF1264)
  misc_feature (12)..(221): NCBI GI: 46137931 Blast Desc: FG10480.1 [Gibberella zeae PH-1]
  misc_feature (12)..(223): NCBI GI: 256734925 Blast Desc: [Nectria haematococca mpVI 77-13-4]
  misc_feature (1)..(223): NCBI GI: 261354438 Blast Desc: conserved [Verticillium albo-atrum VaMs.102]
  misc_feature (5)..(221): NCBI GI: 85096675 Blast Desc: NCU07120 [Neurospora crassa OR74A] gi|28921790|gb|EAA31067.1| NCU07120 [Neurospora crassa OR74A]
  misc_feature (6)..(219): NCBI GI: 169867025 Blast Desc: CC1G_12851 [Coprinopsis cinerea okayama7#130] gi|116498828|gb|EAU81723.1| CC1G_12851 [Coprinopsis cinerea okayama7#130]
  misc_feature (5)..(221): NCBI GI: 39942842 Blast Desc: MGG_03501 [Magnaporthe grisea 70-15] gi|145009943|gb|EDJ94599.1| MGG_03501 [Magnaporthe grisea 70-15]
  misc_feature (9)..(223): NCBI GI: 171682936 Blast Desc: protein product [Podospora anserina] gi|170941427|emb|CAP67078.1| protein product [Podospora anserina]
  misc_feature (22)..(220): NCBI GI: 189198964 Blast Desc: PTRG_05486 [Pyrenophora tritici-repentis Pt-1C-BFP] gi|187982918|gb|EDU48406.1| PTRG_05486 [Pyrenophora tritici-repentis Pt-1C-BFP]
  misc_feature (12)..(213): NCBI GI: 212529834 Blast Desc: DUF1264 domain protein [Penicillium marneffei ATCC 18224] gi|210074472|gb|EEA28559.1| DUF1264 domain protein [Penicillium marneffei ATCC 18224]
  misc_feature (5)..(221): NCBI GI: 115387323 Blast Desc: conserved [Aspergillus terreus NIH2624] gi|114195251|gb|EAU36951.1| conserved [Aspergillus terreus NIH2624]
  misc_feature: Useful for introducing or modulating the production of volatile compounds
MAGRTNPTNVPGDKVPAEDIILETGASLLQEFQPVKQLCAHLNAFHTYADDPGRFVETNHYCAHLTEDVRQCILYDGPGPNARLIGIEYMITPKLYDTLPPEERKLWHSHVYEVKSGMLIMPGPTIPGVQQAWEAAETQEMKHVIGLYGKVYHLWQTDRGDELPLGEPQLMTSFTADNQFDFEKIVGDRDKRFGVDWKRKKYLREGIEEPKIHEDADSAWKTRRNSM

SEQ ID NO: 20466 - DNA, 1280 bp, Muscodor strobelii
  misc_feature: SGI EST ID NO. CUFF.47891.0
  misc_feature: Variant of the nucleotide sequence at SEQ ID NO 20464
tgtacgagtaaggtcgtaaataaggataagagatcagatttaagatgaggattagagcgtcagacataatatgacttcccctgccatttaaacatcaaatatcgctgtgaatatgatgggtctcaatcagaaaagtcacaggagcatcagctccgaattgatgcagcctggatcgaaattatgacatcagtagaatggcatcattgtgtgacgacgttaccgtacagaacaacatgaaatgattgacgatcgttcgtcaatagataaacatgttagttcttcgatctgagtgcacaagctaaagagaagataatctgcgacaggctcttattctaatcttcacctcatgcctcagtgcctcaattgacagaagcaacgaggtctgagcaaagatggcgggaagaactaatcccacgaatgtcccgggtgacaaagtaccagcagaggatatcatcttggagactggcgcttcacttttacaggaatttcaacctgttaagcagctctgcgcccatctgaacgccttccatacctacgccgacgaccctggccgattcgtcgagacgaatcactattgcgcccacctcactgaagacgtccgccaatgcatcttatacgacggacctggtcctaatgcccgtctaatcggaatcgagtacatgataacacccaagctctacgatactcttcctcccgaggagcggaagttgtggcactcacatgtctacgaagtgaaatccggcatgctcatcatgccaggaccgacaatcccaggtgtgcagcaagcatgggaagcagccgaaacccaggagatgaagcacgtcattgggttatatggcaaagtgtatcatctctggcagacggatcgaggcgatgagctgcccctcggcgagcctcaattgatgactagctttactgctgataaccagtttgatttcgagaagattgtcggggatcgggataagagattcggtgttgattggaaaagaaagaagtatctgagagagggtattgaggagccgaagatccatgaagatgctgattcagcttggaagacaagacgcaattctatgtgagatgctaaggcttgtcggacatttcaagcaggttgtgaccttgcacgcagcactgcattgtgtagaagaaagcaaagagaaaagcatgaattaaattacagtgtcgacatgccagagtcttgatcttgaaaatggggcatctccaaaagctataatgacagattgaactgggagaaagcgggaagtggtaaaattgtggtgata

SEQ ID NO: 20467 - DNA, 1818 bp, Muscodor strobelii
  misc_feature: SGI cDNA ID NO. 566908
  misc_feature: Reduced expression when VOC is produced
  misc_feature: Encodes the peptide sequence at SEQ ID NO 20468
atggccgcatcgcgccgcggccaaccgccccttcatgtgcgcctgccctcacagcccagcgtcgttgctctgcccgacttaccgcccatctccgccctcttcctcatagatttcgatgtcaaggcgggctacactgtgtcctggaaggcgtcgaaaccgggcatcgagcttgaaggtgtcgtcgaatacaagtcgctgccctcgggtctacataccgtatccgaggatctgatatacttcgtccacgatgattatgccggactaagtgcctttgtgaacgcgcctgttgacgatagcgcagcccgcaatgcacggatgttggccgtcggcatcttggtgccactgagctacggacgcttggggcgagcatggaaacatgccgagagtctcaaagccattgcgtcaaaactagttgtaaatagtaaagaagtaggtatattagaggaatactgggatagaaaccaggctcgagaatctgtccccgatgatgcgatacccaaagacactgtcgaatcacccgagataccagcccccaaaaaggcgtcgcaaaagcacagcaggaagcgctcatcctccgatgggacagcgttgatgctaccaggccacagactctctccattccacccggcctggagcctgaccaagctcttgaacacctttgggcccctcattttcccaattcaccgcgctgcgttgttgcgaaagaggatattgatatcaggccatgcaccggtggaagaggcttgtaactttgtctacgatatatccattcttgccaatatccccgtctcaaccttcgactcgctcccgccccactctccgccgtatcgtctacgccccttattctccattggtgtgcatgatatcccattcttaaccgaagacgctaaatatgccgcaaacccggatggaaataatcaggacttgggaacgggctggatagcatgcacaacggacagcatcctctctaagaaagacacgctgtgggacatgctaataaccatgccaccgccccacgcctcccaggcgagaaaacacatttggcccactgtggaattctccgggcaccccgtaaaagcaacgcaacgagacatgcgacgctttcgttcgcttaaagcaggcatcgcgcgcttgagcataggtagccccttcgcttcacccgcgacgccgcgcccaactttgcagaccgaagaagacaactcgcttctcgacgatgcggaagctatcgtggagcccacgagctggacggcgcttgcttatagcggattcatgtggtgggcgtctgcgggcgagaaacagcgctctgacgagtctgaagaagcttcgcacgacgcagctctcctggctgatgtggcgaacaacggaactatgagaatggagatgcctggatccgcgggcatgtctacttccatttcttcacttacgccgagacggtcatctactgctgtgtccgcgccactggatgcggaggaggcgaggaccgaacttgcaattattgcgtattttcatcgtcttacagagcagatattgagcgcacttgcggatgtcgtggactcgctgagcgaaagtgaagaggacgatacgccgggcggcgatggagatgaaagcgatgtactcctgggggcagagatagagggcgagcgtgaaatcgagggccacggggtcagggttgagccggatgtggtgaagcgcatgggacttgatgtttggagtaagtccgatgcggagttcgtcacggcgttattacagacttatttcgatcggtctgcgtatgtcgagggcaagggagttgaaatttgtggaattagggtgtgttga

SEQ ID NO: 20468 - protein, 605 aa, Muscodor strobelii
  misc_feature: SGI Peptide ID NO. 566908
  misc_feature (1)..(605): NCBI GI: 256733304 Blast Desc: NECHADRAFT_92979 [Nectria haematococca mpVI 77-13-4]
  misc_feature (1)..(605): NCBI GI: 46124531 Blast Desc: FG06643.1 [Gibberella zeae PH-1]
  misc_feature (1)..(605): NCBI GI: 171686994 Blast Desc: protein product [Podospora anserina] gi|170943458|emb|CAP69111.1| protein product [Podospora anserina]
  misc_feature (17)..(605): NCBI GI: 39972805 Blast Desc: MGG_11100 [Magnaporthe grisea 70-15] gi|145009209|gb|EDJ93920.1| MGG_11100 [Magnaporthe grisea 70-15]
  misc_feature (1)..(605): NCBI GI: 164428906 Blast Desc: NCU00167 [Neurospora crassa OR74A] gi|157072333|gb|EAA27444.2| conserved [Neurospora crassa OR74A]
  misc_feature (1)..(605): NCBI GI: 154316341 Blast Desc: BC1G_03756 [Botryotinia fuckeliana B05.10] gi|150846542|gb|EDN21735.1| BC1G_03756 [Botryotinia fuckeliana B05.10]
  misc_feature (1)..(604): NCBI GI: 169767396 Blast Desc: [Aspergillus oryzae RIB40] gi|83766024|dbj|BAE56167.1| protein product [Aspergillus oryzae]
  misc_feature (1)..(604): NCBI GI: 225681826 Blast Desc: conserved [Paracoccidioides brasiliensis Pb03]
  misc_feature (28)..(604): NCBI GI: 240108594 Blast Desc: CPC735_009440 [Coccidioides posadasii C735 delta SOWgp]
  misc_feature (3)..(604): NCBI GI: 225560236 Blast Desc: conserved [Ajellomyces capsulatus G186AR]
  misc_feature: Useful for introducing or modulating the production of volatile compounds
MAASRRGQPPLHVRLPSQPSVVALPDLPPISALFLIDFDVKAGYTVSWKASKPGIELEGVVEYKSLPSGLHTVSEDLIYFVHDDYAGLSAFVNAPVDDSAARNARMLAVGILVPLSYGRLGRAWKHAESLKAIASKLVVNSKEVGILEEYWDRNQARESVPDDAIPKDTVESPEIPAPKKASQKHSRKRSSSDGTALMLPGHRLSPFHPAWSLTKLLNTFGPLIFPIHRAALLRKRILISGHAPVEEACNFVYDISILANIPVSTFDSLPPHSPPYRLRPLFSIGVHDIPFLTEDAKYAANPDGNNQDLGTGWIACTTDSILSKKDTLWDMLITMPPPHASQARKHIWPTVEFSGHPVKATQRDMRRFRSLKAGIARLSIGSPFASPATPRPTLQTEEDNSLLDDAEAIVEPTSWTALAYSGFMWWASAGEKQRSDESEEASHDAALLADVANNGTMRMEMPGSAGMSTSISSLTPRRSSTAVSAPLDAEEARTELAIIAYFHRLTEQILSALADVVDSLSESEEDDTPGGDGDESDVLLGAEIEGEREIEGHGVRVEPDVVKRMGLDVWSKSDAEFVTALLQTYFDRSAYVEGKGVEICGIRVC

SEQ ID NO: 20469 - DNA, 2405 bp, Muscodor strobelii
  misc_feature: SGI EST ID NO. CUFF.47893.0
  misc_feature: Variant of the nucleotide sequence at SEQ ID NO 20467
cgacgtcctcaggcagccaggtcccgcctcattatcgtgaacatgacaagcgtgacatgccatcggatggtgcaaaccacaatcaactggctaaactaccttcaacggccaacactgtacagaccattgcgactagcattaggacagcagtagatttcaatatcaattgcgcaatacgctgcttttccttctcttgcctatgcgctcaatgatgcgcttgaggtgcgcgctgtgctaattgccccggttccacgcccgacctcgacatccacgatccacacctcagcacttcgacaccatggccgcatcgcgccgcggccaaccgccccttcatgtgcgcctgccctcacagcccagcgtcgttgctctgcccgacttaccgcccatctccgccctcttcctcatagatttcgatgtcaaggcgggctacactgtgtcctggaaggcgtcgaaaccgggcatcgagcttgaaggtgtcgtcgaatacaagtcgctgccctcgggtctacataccgtatccgaggatctgatatacttcgtccacgatgattatgccggactaagtgcctttgtgaacgcgcctgttgacgatagcgcagcccgcaatgcacggatgttggccgtcggcatcttggtgccactgagctacggacgcttggggcgagcatggaaacatgccgagagtctcaaagccattgcgtcaaaactagttgtaaatagtaaagaagtaggtatattagaggaatactgggatagaaaccaggctcgagaatctgtccccgatgatgcgatacccaaagacactgtcgaatcacccgagataccagcccccaaaaaggcgtcgcaaaagcacagcaggaagcgctcatcctccgatgggacagcgttgatgctaccaggccacagactctctccattccacccggcctggagcctgaccaagctcttgaacacctttgggcccctcattttcccaattcaccgcgctgcgttgttgcgaaagaggatattgatatcaggccatgcaccggtggaagaggcttgtaactttgtctacgatatatccattcttgccaatatccccgtctcaaccttcgactcgctcccgccccactctccgccgtatcgtctacgccccttattctccattggtgtgcatgatatcccattcttaaccgaagacgctaaatatgccgcaaacccggatggaaataatcaggacttgggaacgggctggatagcatgcacaacggacagcatcctctctaagaaagacacgctgtgggacatgctaataaccatgccaccgccccacgcctcccaggcgagaaaacacatttggcccactgtggaattctccgggcaccccgtaaaagcaacgcaacgagacatgcgacgctttcgttcgcttaaagcaggcatcgcgcgcttgagcataggtagccccttcgcttcacccgcgacgccgcgcccaactttgcagaccgaagaagacaactcgcttctcgacgatgcggaagctatcgtggagcccacgagctggacggcgcttgcttatagcggattcatgtggtgggcgtctgcgggcgagaaacagcgctctgacgagtctgaagaagcttcgcacgacgcagctctcctggctgatgtggcgaacaacggaactatgagaatggagatgcctggatccgcgggcatgtctacttccatttcttcacttacgccgagacggtcatctactgctgtgtccgcgccactggatgcggaggaggcgaggaccgaacttgcaattattgcgtattttcatcgtcttacagagcagatattgagcgcacttgcggatgtcgtggactcgctgagcgaaagtgaagaggacgatacgccgggcggcgatggagatgaaagcgatgtactcctgggggcagagatagagggcgagcgtgaaatcgagggccacggggtcagggttgagccggatgtggtgaagcgcatgggacttgatgtttggagtaagtccgatgcggagttcgtcacggcgttattacagacttatttcgatcggtctgcgtatgtcgagggcaagggagttgaaatttgtggaattagggtgtgttgaaagaaaaaggtttgttcggcagggatcactatacggttatagggagggtatggattggaggtttgaaggattgtataaatagggtatgagcacagagatacgtgctggcaaatgcagtacatagcagagaagtatgaaatgaagagcgacgtctaatcgggatcaagatggcttattgctacatgatatgcgcaaataggagacgcgagataggccaaaattgttaagagaacaaaagcacaagccctgtgggttagatgtcaagcataccattgcgactatataccag

SEQ ID NO: 20470 - DNA, 858 bp, Muscodor strobelii
  misc_feature: SGI cDNA ID NO. 566909
  misc_feature: Encodes the peptide sequence at SEQ ID NO 20471
atggaagcaggtctagcagacctcaagaaagaagtcgcactcctgcgcaaagaagtctcgagagtctcggacgaggccgaagtgcgaaaagttcacttcaagtatgggtattatcttgataagtgtctatacaacgaggttgtggatatgtacgcggaccacccagacacatacgtcgagttcctgggatcgcgataccgtggtaaagaaggcgtcaagcgactttataacggacggttccagagtgccttcgtgaaggggcgcaatggacctgttcatggcttcttgcttgatcatattatgatgcaggatattgtcgatgttgatccgacgggcacacatgcttggtgtcgcatgagggctttgatgcaagccggaacacacaagtcaatccgtgagacgcaccccagaggacacgtgcaatggtgggagggcggcctctacgagaacgaatacctcaaagaaaacggtgtctggaagctattcagatacagatactttcccttctggcacgccgagttcgagactggatggagcataacgaaggaaaactacattccttggccaacaaagaccttcccagaagatccgtatggacccgacgagctcattgaacagaagatgttgtggcctgatacgagggtcatcccatttcactatccgcatcctgttactgggaaacgtgtcgcggatgatgatttgcgcgccccgaattatggacaggaggttagtgaggcggaacccccgctgagtttggctctgccggagggtcaggagagagctggggagggaaaaacttggagtagtgagggctcgactagggtcttgccggaattggttgagaatctcgagatttga

SEQ ID NO: 20471 - protein, 285 aa, Muscodor strobelii
  misc_feature: SGI Peptide ID NO. 566909
  misc_feature (1)..(281): NCBI GI: 171680474 Blast Desc: protein product [Podospora anserina] gi|170939864|emb|CAP65090.1| protein product [Podospora anserina]
  misc_feature (1)..(282): NCBI GI: 85089767 Blast Desc: NCU09455 [Neurospora crassa OR74A] gi|28919422|gb|EAA28864.1| conserved [Neurospora crassa OR74A]
  misc_feature (50)..(282): NCBI GI: 116179202 Blast Desc: CHGG_00229 [Chaetomium globosum CBS 148.51] gi|88184526|gb|EAQ91994.1| CHGG_00229 [Chaetomium globosum CBS 148.51]
  misc_feature (1)..(258): NCBI GI: 189195210 Blast Desc: conserved [Pyrenophora tritici-repentis Pt-1C-BFP] gi|187979822|gb|EDU46448.1| conserved [Pyrenophora tritici-repentis Pt-1C-BFP]
  misc_feature (5)..(259): NCBI GI: 169597791 Blast Desc: SNOG_01685 [Phaeosphaeria nodorum SN15] gi|111070214|gb|EAT91334.1| SNOG_01685 [Phaeosphaeria nodorum SN15]
  misc_feature (1)..(252): NCBI GI: 256726312 Blast Desc: NECHADRAFT_94702 [Nectria haematococca mpVI 77-13-4]
  misc_feature (46)..(252): NCBI GI: 39977293 Blast Desc: MGG_06549 [Magnaporthe grisea 70-15] gi|145016010|gb|EDK00500.1| MGG_06549 [Magnaporthe grisea 70-15]
  misc_feature (5)..(230): NCBI GI: 87198818 Blast Desc: Saro_0796 [Novosphingobium aromaticivorans DSM 12444] gi|87134499|gb|ABD25241.1| Saro_0796 [Novosphingobium aromaticivorans DSM 12444]
  misc_feature (6)..(230): NCBI GI: 87200818 Blast Desc: Saro_2805 [Novosphingobium aromaticivorans DSM 12444] gi|87136499|gb|ABD27241.1| Saro_2805 [Novosphingobium aromaticivorans DSM 12444]
  misc_feature (6)..(182): NCBI GI: 269922676 Blast Desc: conserved [Brevundimonas subvibrioides ATCC 15264] gi|269143103|gb|EEZ69525.1| conserved [Brevundimonas subvibrioides ATCC 15264]
MEAGLADLKKEVALLRKEVSRVSDEAEVRKVHFKYGYYLDKCLYNEVVDMYADHPDTYVEFLGSRYRGKEGVKRLYNGRFQSAFVKGRNGPVHGFLLDHIMMQDIVDVDPTGTHAWCRMRALMQAGTHKSIRETHPRGHVQWWEGGLYENEYLKENGVWKLFRYRYFPFWHAEFETGWSITKENYIPWPTKTFPEDPYGPDELIEQKMLWPDTRVIPFHYPHPVTGKRVADDDLRAPNYGQEVSEAEPPLSLALPEGQERAGEGKTWSSEGSTRVLPELVENLEI

SEQ ID NO: 20472 - DNA, 1406 bp, Muscodor strobelii
  misc_feature: SGI EST ID NO. CUFF.47896.0
  misc_feature: Variant of the nucleotide sequence at SEQ ID NO 20470
ctgcagtcgggtccctagtacatctgcgagtagacttgtcttgcgtatatgtcatctgaaaatttcccatctattgtttctccatatcaaaatactcctaccatatccaaaaacaaacctcagaaaaaatggaagcaggtctagcagacctcaagaaagaagtcgcactcctgcgcaaagaagtctcgagagtctcggacgaggccgaagtgcgaaaagttcacttcaagtatgggtattatcttgataagtgtctatacaacgaggttgtggatatgtacgcggaccacccagacacatacgtcgagttcctgggatcgcgataccgtggtaaagaaggcgtcaagcgactttataacggacggttccagagtgccttcgtgaaggggcgcaatggacctgttcatggcttcttgcttgatcatattatgatgcaggatattgtcgatgttgatccgacgggcacacatgcttggtgtcgcatgagggctttgatgcaagccggaacacacaagtcaatccgtgagacgcaccccagaggacacgtgcaatggtgggagggcggcctctacgagaacgaatacctcaaagaaaacggtgtctggaagctattcagatacagatactttcccttctggcacgccgagttcgagactggatggagcataacgaaggaaaactacattccttggccaacaaagaccttcccagaagatccgtatggacccgacgagctcattgaacagaagatgttgtggcctgatacgagggtcatcccatttcactatccgcatcctgttactgggaaacgtgtcgcggatgatgatttgcgcgccccgaattatggacaggaggttagtgaggcggaacccccgctgagtttggctctgccggagggtcaggagagagctggggagggaaaaacttggagtagtgagggctcgactagggtcttgccggaattggttgagaatctcgagatttgagggtaggtgcatagcctaaagtaggggttaggagagggggaggaggggatgatgggtggttgcaggacggtagttggagaaggccatatatggaggctattgccggtatccagtcgcatgttgaatttggagctatatagcgattagtactgagttagtaatggtttacagtgtcttgaaaatgtatttcaacaattacctgataggctgttgaaccgaggcacaatgattcaatgcacagcataactgccggtgttctcaacgccgaagatcttgcatgaacttgtagcgtttcgcttattcctaaaggcgatagcaacgtcgtgcatctcgtgcatctcgtgaaccctatctgtcgcacgagcacagcatcagagcaacatggcgcacctcgaagccctggcgcctgagatatcgctg

SEQ ID NO: 20473 - DNA, 2361 bp, Muscodor strobelii
  misc_feature: SGI cDNA ID NO. 566910
  misc_feature: Encodes the peptide sequence at SEQ ID NO 20474
atggcgcacctcgaagccctggcgcctgagatatcgctgtatccgtatagcaatgggaagagagtgggcgaccgcgtgaagtttcccgatactccggctttctcgtcgatgaataagacctcaaggtttgaaggagatgttttcaatttggaggtcaccggcgagatcccacgtgatatcaatgggactttttaccgtgtgcagcctgatcatcgatttccgccgatgtttgaggatgatattcattttaacggagatggtagtgtcacagccattcgtatcgccgacggccacgcagactttaagcagcgatatgtgcgtacggacaagttccaagcagaagagaaagcgagacatagtttgtttgggcgatatcgcaacccatacaccgacaacgaaagcgtgaaaggtgtcatccggacggtgtcgaatacgaacatcacattttggcgtggcatgttgttggcgagtaaggaggacggcccaccatttgccatggaccctgtgacgcttaagacgctgggccggtacgattttgaagggcaaattaaaacgcctactttcaccgcacacccaaaatttgacccagatacgggagaaatgttgtgttttgcgtacgaggccggtaaagatggttcagattgtggagtggatgtcgtcacttggacaatcaatgccgacggcgtcaagacggaagagctctggtttgaggccccgtttgcgggcatgattcacgattgtggggtctcgaagaactttatggtgttggcgttgacacccataaagatgtcactagaccgacttaagcgaggtggtaacaagtttgcttgggatccgaaggaagaccaagcgtacggccttgttccgcgccgaggtggcagagccgaagatgtgatatggttccgggcagataatggcttccatggtcacgtcgccgggtgttacgaaaatgaggagggaaatgtcatactagatctcaccgtcgccgacggtaatgtgttcttttggtttccgcctgagggcgaaaagccagattttggacagcgtgctcgtttaagcagtccaacttgcaggtgggtgtttgatccaaaggcaaagtctggtactcgagtgaaaccactcttacagtgggaaaccaatggagagttttcgcggatcgacgatcgagtcgttacaaagaagtataagcacttttggcagctcaaagtcgatcctactaggccttacgactttgctaaatgtggtccaccagctggtggtctcttcaattgcatggctcattatacgtgggattcagataatgaaaacaaaataggcgacgaagatgtgtctttcgccggacccacagccacattccaagagccagtattcataccgaaagatgggggaggcgagggagaaggctatcttgccgcgttgaagaataatctggatgagctgaggaacgatgtcgtgatttggaatgctcaaaagctctcagccggccctcttgcgacgttgcatctgcccttcaagcttcgcttaggcttccatggcaactttgtcgatcacagagacattgaagcgtggcagaagcgtcgatcaggcgaattggggccagtgaaatgtgcgaattctccgctcccctggcaggctgcgcttatgaccaatggcaatggcactggcgatgtgtcaactgaaaccttggacgagtcgttaaacaagccaaagcttataacttatcgacccaagcttgctaatatgggaattgttgctgcgctgctatatacggtagttgctgcggccgttctggccacggcacggccgtctgatattctcgagagatcggattctttgccaaatggctataccatggcgcccatgacctggacaggtaccatcgacgaaggcggcgcagaggtctccttccagggcacgatccaggaaataactgctgagattcgaaaaataaactccgacttcacttggcaaaactcccctctttcggctttgaccacggtggtagacgatcctgagcctattcacgaaatcatctgcaacgtgggaggcgactcgaaagtgacctcgttcgacgcgtgggaagccgtcttagctttctccaatgagcagggctctttgacattcgatggcggctctacagcaacgccaacttgcagtcgagcgtactgctccaacctggggatctcttgcaagctctggtatggatatgagaagttcttcccaaaacaaccttcgcaaatgctctgcctctgggtaatagacgaatttgtcattctcatcttcgccaagaagctcctcaagaccataggctccaatgccaaagggcaaccattcagcctctgcccaatcgagcaggcctag

SEQ ID NO: 20474 - protein, 786 aa, Muscodor strobelii
  misc_feature: SGI Peptide ID NO. 566910
  misc_feature (25)..(517): Pfam Id: PF03055 Pfam Desc: Retinal pigment epithelial membrane protein
  misc_feature (44)..(325): Pfam Id: PF03055 Pfam Desc: Retinal pigment epithelial membrane protein
  misc_feature (453)..(517): Pfam Id: PF03055 Pfam Desc: Retinal pigment epithelial membrane protein
  misc_feature (1)..(555): NCBI GI: 116179204 Blast Desc: CHGG_00230 [Chaetomium globosum CBS 148.51] gi|88184527|gb|EAQ91995.1| CHGG_00230 [Chaetomium globosum CBS 148.51]
  misc_feature (1)..(549): NCBI GI: 171680472 Blast Desc: protein product [Podospora anserina] gi|170939863|emb|CAP65089.1| protein product [Podospora anserina]
  misc_feature (1)..(548): NCBI GI: 189195212 Blast Desc: lignostilbene-alpha,beta-dioxygenase isozyme III [Pyrenophora tritici-repentis Pt-1C-BFP] gi|187979823|gb|EDU46449.1| lignostilbene-alpha,beta-dioxygenase
  misc_feature (1)..(551): NCBI GI: 240111171 Blast Desc: carotenoid cleavage dioxygenase, [Coccidioides posadasii C735 delta SOWgp]
  misc_feature (1)..(551): NCBI GI: 119189625 Blast Desc: conserved [Coccidioides immitis RS]
  misc_feature (1)..(551): NCBI GI: 67541797 Blast Desc: AN7062.2 [Aspergillus nidulans FGSC A4] gi|40742001|gb|EAA61191.1| AN7062.2 [Aspergillus nidulans FGSC A4] gi|259483622|tpe|CBF79164.1| TPA: conserved [Aspergillus FGSC
  misc_feature (28)..(546): NCBI GI: 256726313 Blast Desc: NECHADRAFT_94703 [Nectria haematococca mpVI 77-13-4]
  misc_feature (1)..(549): NCBI GI: 39977291 Blast Desc: MGG_06548 [Magnaporthe grisea 70-15] gi|145016011|gb|EDK00501.1| MGG_06548 [Magnaporthe grisea 70-15]
  misc_feature (28)..(521): NCBI GI: 256723057 Blast Desc: NECHADRAFT_42458 [Nectria haematococca mpVI 77-13-4]
  misc_feature (26)..(522): NCBI GI: 222106904 Blast Desc: crocetin dialdehyde [Agrobacterium vitis S4] gi|221738083|gb|ACM38979.1| crocetin dialdehyde [Agrobacterium vitis S4]
  misc_feature (47)..(520): SWISSPROT Homolog: EC 1.13.11.51 9-cis-epoxycarotenoid dioxygenase
MAHLEALAPEISLYPYSNGKRVGDRVKFPDTPAFSSMNKTSRFEGDVFNLEVTGEIPRDINGTFYRVQPDHRFPPMFEDDIHFNGDGSVTAIRIADGHADFKQRYVRTDKFQAEEKARHSLFGRYRNPYTDNESVKGVIRTVSNTNITFWRGMLLASKEDGPPFAMDPVTLKTLGRYDFEGQIKTPTFTAHPKFDPDTGEMLCFAYEAGKDGSDCGVDVVTWTINADGVKTEELWFEAPFAGMIHDCGVSKNFMVLALTPIKMSLDRLKRGGNKFAWDPKEDQAYGLVPRRGGRAEDVIWFRADNGFHGHVAGCYENEEGNVILDLTVADGNVFFWFPPEGEKPDFGQRARLSSPTCRWVFDPKAKSGTRVKPLLQWETNGEFSRIDDRVVTKKYKHFWQLKVDPTRPYDFAKCGPPAGGLFNCMAHYTWDSDNENKIGDEDVSFAGPTATFQEPVFIPKDGGGEGEGYLAALKNNLDELRNDVVIWNAQKLSAGPLATLHLPFKLRLGFHGNFVDHRDIEAWQKRRSGELGPVKCANSPLPWQAALMTNGNGTGDVSTETLDESLNKPKLITYRPKLANMGIVAALLYTVVAAAVLATARPSDILERSDSLPNGYTMAPMTWTGTIDEGGAEVSFQGTIQEITAEIRKINSDFTWQNSPLSALTTVVDDPEPIHEIICNVGGDSKVTSFDAWEAVLAFSNEQGSLTFDGGSTATPTCSRAYCSNLGISCKLWYGYEKFFPKQPSQMLCLWVIDEFVILIFAKKLLKTIGSNAKGQPFSLCPIEQA

SEQ ID NO: 20475 - DNA, 546 bp, Muscodor strobelii
  misc_feature: SGI cDNA ID NO. 566911
  misc_feature: Encodes the peptide sequence at SEQ ID NO 20476
atgttgtctatcttgagaaaggcgaggctgaaggacaaggagatgcggattctcatgttgggcttggacaatgcggggaagacgaccatcgtgaagaagatcatgaatgaggatattaataccgttagcccgacgctggggttcatcatcaagactattgagtatgaagggtataagctgaatatctgggatgtcggcggtcagaagaccctacgttcatactggcgcaattacttcgagaagacggatgcgctaatctgggtcgtcgatgcgacggatcggctccgtatcgatgattgtcgggaggaattgcacgggttattacaagaagagcgtctatctggtgcgagtcttctggtctttgccaacaagacggatgtgcagggttgtatggacgaggcggaacttctacaggggctccagcttaaagccattcgaacgcatcagtggcatgttttgagatgtagtgcggttacgggggagaatctgaatgagggcctcgcgtgggtggtgcaggatgctaagaaaagactttttctctattga

SEQ ID NO: 20476 - protein, 181 aa, Muscodor strobelii
  misc_feature: SGI Peptide ID NO. 566911
  misc_feature (1)..(174): Pfam Id: PF00025 Pfam Desc: ADP-ribosylation factor family
  misc_feature (15)..(126): Pfam Id: PF01926 Pfam Desc: GTPase of function
  misc_feature (16)..(176): Pfam Id: PF00071 Pfam Desc: Ras family
  misc_feature (1)..(181): NCBI GI: 164428943 Blast Desc: NCU00218 [Neurospora crassa OR74A] gi|157072345|gb|EAA27367.2| NCU00218 [Neurospora crassa OR74A]
  misc_feature (1)..(181): NCBI GI: 261354109 Blast Desc: ADP-ribosylation factor 4 [Verticillium albo-atrum VaMs.102]
  misc_feature (1)..(181): NCBI GI: 256733306 Blast Desc: [Nectria haematococca mpVI 77-13-4]
  misc_feature (1)..(181): NCBI GI: 46124525 Blast Desc: FG06640.1 [Gibberella zeae PH-1]
  misc_feature (1)..(181): NCBI GI: 226295331 Blast Desc: ADP-ribosylation factor family protein [Paracoccidioides brasiliensis Pb18]
  misc_feature (1)..(181): NCBI GI: 119186495 Blast Desc: CIMG_03295 [Coccidioides immitis RS]
  misc_feature (1)..(181): NCBI GI: 189208416 Blast Desc: ADP-ribosylation factor [Pyrenophora tritici-repentis Pt-1C-BFP] gi|187976634|gb|EDU43260.1| ADP-ribosylation factor [Pyrenophora tritici-repentis Pt-1C-BFP]
  misc_feature (1)..(181): NCBI GI: 116208178 Blast Desc: conserved [Chaetomium globosum CBS 148.51] gi|88183979|gb|EAQ91447.1| conserved [Chaetomium globosum CBS 148.51]
  misc_feature (1)..(181): NCBI GI: 154282917 Blast Desc: conserved [Ajellomyces capsulatus NAm1] gi|150410434|gb|EDN05822.1| conserved [Ajellomyces capsulatus NAm1]
  misc_feature (1)..(181): NCBI GI: 261189903 Blast Desc: ADP-ribosylation factor family protein [Ajellomyces dermatitidis SLH14081] gi|239591598|gb|EEQ74179.1| ADP-ribosylation factor family protein [Ajellomyces dermatitidis
MLSILRKARLKDKEMRILMLGLDNAGKTTIVKKIMNEDINTVSPTLGFIIKTIEYEGYKLNIWDVGGQKTLRSYWRNYFEKTDALIWVVDATDRLRIDDCREELHGLLQEERLSGASLLVFANKTDVQGCMDEAELLQGLQLKAIRTHQWHVLRCSAVTGENLNEGLAWVVQDAKKRLFLY

SEQ ID NO: 20477 - DNA, 1408 bp, Muscodor strobelii
  misc_feature: SGI EST ID NO. CUFF.47934.0
  misc_feature: Variant of the nucleotide sequence at SEQ ID NO 20475
tcgcattgcaactcgaaatcaaatatagacgactccaatctctcgtaccgattgatcaatcagcagattatatattcactgacacttggcggctacaatgttgtctatcttgagaaaggcgaggctgaaggacaaggagatgcggattctcatgttgggcttggacaatgcggggaagacgaccatcgtgaagaagatcatgaatgaggatattaataccgttagcccgacgctggggttcatcatcaagactattgagtatgaagggtataagctgaatatctgggatgtcggcggtcagaagaccctacgttcatactggcgcaattacttcgagaagacggatgcgctaatctgggtcgtcgatgcgacggatcggctccgtatcgatgattgtcgggaggaattgcacgggttattacaagaagagcgtctatctggtgcgagtcttctggtctttgccaacaagacggatgtgcagggttgtatggacgaggcggaacttctacaggggctccagcttaaagccattcgaacgcatcagtggcatgttttgagatgtagtgcggttacgggggagaatctgaatgagggcctcgcgtgggtggtgcaggatgctaagaaaagactttttctctattgagcatcgttactattactgagcttaattgagagtctcatatagccaaccatcgatcatatttgtagcaacctgtatctaaacagccgatccaggttgagttgagtgcatcgcaccttaggtcctaaatttgatgcactggccagggccgccaatcaatttgatctgctccctctgcgggcgctcgtacctgttgaagacgtctgctggcgcccctacatcactgcaattcgcaaaaagcacactacagcacatccatctaattgaacctttgcttgccaacccgctaagccacgtgtattgcgctgactgttataatacaaatagtctggtgaacaaggcataataattcctgcaaaggcatcgcaactagtaagactcgcatcttatacactgaactgttcggtgattgaggcctcaatgccaatatgcaactcattgcaagggccgttgactacctaggtgtgtagtttgggaggatataaagcccttcccatcagcacttcccattgaacctagttctgcatgtggcgatgaatctccgactgaaatcaagtattagcttaccttcttacttgtaagatatctacagctcacgacatatgaataggcattcgtcactaaagtagaatcgtgtctccttggctgtgagtaccgttcttttcatacctgttaatgtcaattggggtagaaaacgtgggggttgggatcgaaccattagagcggaaatagccggcgctaccgggaccagacgatgtgcgacagaac

SEQ ID NO: 20478 - DNA, 801 bp, Muscodor strobelii
  misc_feature: SGI cDNA ID NO. 566912
  misc_feature: Encodes the peptide sequence at SEQ ID NO 20479
atgacgcgaccgggaaagaagcggataatagttcttctagtatgctgtgatggcacatggcagaattctgacaatggctatctcaagtcgagcaaaaagcacaacgtgcccaagctacagactccctccaatgttacccgtatttctcgatgcttccgaaggacatgcacagatggaacgttccagattatatactatcaatctggagtgggatcacgagcaggctcactgaaccggcttcttggaggcgcgttcggcatcggaatttcagagcatattcgcgaagcttattctttcatttgcgcaaactatctcgatggagatgaaattgttcttctcgggttcagtcgtggcgcgtttaccgccaggtcaatcggcggtatcatatcagaccttggtttacttacacgagaaggcatggagtacttctatccaatcttcaaagacatgcagaactggaggaacgatagttacaaggacccatttccgacgcagcctttcaccaataagcccaaaggcgtgcatgcggcgatgaattatcgcgagcggttacttgagaaaaaatttaccagggtgaagggaaatgacgggactggtagtctgatccaagttaaagcgattgacttggaatcaaacattgcgcccacgaataagttccagcctttccaaactggatggatagaattgctgacacttctcacatatcagctctacaatactcgcctctcaaacaagattcaacatggctttcacgcacttgcactagatgagacaagacctccttttagcccgactctctag

SEQ ID NO: 20479 - protein, 266 aa, Muscodor strobelii
  misc_feature: SGI Peptide ID NO. 566912
  misc_feature (12)..(266): NCBI GI: 256733214 Blast Desc: NECHADRAFT_38858 [Nectria haematococca mpVI 77-13-4]
  misc_feature (2)..(266): NCBI GI: 46125845 Blast Desc: FG07300.1 [Gibberella zeae PH-1]
  misc_feature (12)..(266): NCBI GI: 154316309 Blast Desc: BC1G_03740 [Botryotinia fuckeliana B05.10] gi|150846526|gb|EDN21719.1| BC1G_03740 [Botryotinia fuckeliana B05.10]
  misc_feature (7)..(266): NCBI GI: 156037644 Blast Desc: SS1G_12536 [Sclerotinia sclerotiorum 1980] gi|154697944|gb|EDN97682.1| SS1G_12536 [Sclerotinia sclerotiorum 1980]
  misc_feature (12)..(266): NCBI GI: 189204866 Blast Desc: conserved [Pyrenophora tritici-repentis Pt-1C-BFP] gi|187985867|gb|EDU51355.1| conserved [Pyrenophora tritici-repentis Pt-1C-BFP]
  misc_feature (12)..(266): NCBI GI: 169610175 Blast Desc: SNOG_08184 [Phaeosphaeria nodorum SN15] gi|160702000|gb|EAT84460.2| SNOG_08184 [Phaeosphaeria nodorum SN15]
  misc_feature (12)..(266): NCBI GI: 261360237 Blast Desc: conserved [Verticillium albo-atrum VaMs.102]
  misc_feature (1)..(266): NCBI GI: 116191275 Blast Desc: CHGG_05355 [Chaetomium globosum CBS 148.51] gi|88181268|gb|EAQ88736.1| CHGG_05355 [Chaetomium globosum CBS 148.51]
  misc_feature (12)..(266): NCBI GI: 171681120 Blast Desc: protein product [Podospora anserina] gi|170940518|emb|CAP65746.1| protein product [Podospora anserina]
  misc_feature (7)..(266): NCBI GI: 85109723 Blast Desc: NCU05694 [Neurospora crassa OR74A] gi|28924706|gb|EAA33820.1| conserved [Neurospora crassa OR74A]
MTRPGKKRIIVLLVCCDGTWQNSDNGYLKSSKKHNVPKLQTPSNVTRISRCFRRTCTDGTFQIIYYQSGVGSRAGSLNRLLGGAFGIGISEHIREAYSFICANYLDGDEIVLLGFSRGAFTARSIGGIISDLGLLTREGMEYFYPIFKDMQNWRNDSYKDPFPTQPFTNKPKGVHAAMNYRERLLEKKFTRVKGNDGTGSLIQVKAIDLESNIAPTNKFQPFQTGWIELLTLLTYQLYNTRLSNKIQHGFHALALDETRPPFSPTL

SEQ ID NO: 20480 - DNA, 672 bp, Muscodor strobelii
  misc_feature: SGI cDNA ID NO. 566913
  misc_feature: Encodes the peptide sequence at SEQ ID NO 20481
atgcctgtgtatagcatcaccgtcagaaacaactctggtgctctgcaaaactactatatcacaaacgacccaccttctctcacaggttccgctggttctaagccttggagctcagtcatctcgtcagcgcattgtccagatggtgcaaccgccaaattcgagattgataccagaagttactatgcctattgcacgacctctgatggaaaaccaggcgacggagtggacgcaacggtaacccaacgccgtccagtgacccttggacaagtcaacgaggatggctcgttgactcctggatcatcggtgaagattatagtacaggagggaacgcctgaactagacgcagtggatcaatcgaacggttctagaggatcatttcaattccaaacaggcaacgatttcacaagtcgggatgctaaggaggaacatttcatgattggatatggaaatgaagcagcgccgttcgcccttttcacgcccttgccaaacgcaaactacatgatccaaccacgcgatgtgttctacctcagtttcggccagacgcgtcgcggttctatcattgacgtcacatcgttgggtgaagtgctcaagatagacttcgagtctctctcaacttcgcatgttacggttgatgaagaccagacaggaaaattaaccctgcaagaggaatag

SEQ ID NO: 20481 - protein, 223 aa, Muscodor strobelii
  misc_feature: SGI Peptide ID NO. 566913
  misc_feature (1)..(221): NCBI GI: 256726284 Blast Desc: NECHADRAFT_82035 [Nectria haematococca mpVI 77-13-4]
  misc_feature (4)..(214): NCBI GI: 115399636 Blast Desc: [Aspergillus terreus NIH2624] gi|114191100|gb|EAU32800.1| [Aspergillus terreus NIH2624]
  misc_feature (22)..(222): NCBI GI: 256723365 Blast Desc: [Nectria haematococca mpVI 77-13-4]
  misc_feature (1)..(221): NCBI GI: 171682870 Blast Desc: protein product [Podospora anserina] gi|170941394|emb|CAP67044.1| protein product [Podospora anserina]
  misc_feature (4)..(221): NCBI GI: 256726283 Blast Desc: [Nectria haematococca mpVI 77-13-4]
  misc_feature (4)..(212): NCBI GI: 115399632 Blast Desc: [Aspergillus terreus NIH2624] gi|114191099|gb|EAU32799.1| [Aspergillus terreus NIH2624]
  misc_feature (4)..(200): NCBI GI: 121711028 Blast Desc: conserved [Aspergillus clavatus NRRL 1] gi|119401280|gb|EAW11704.1| conserved [Aspergillus clavatus NRRL 1]
  misc_feature (3)..(214): NCBI GI: 46127677 Blast Desc: FG08216.1 [Gibberella zeae PH-1]
  misc_feature (6)..(200): NCBI GI: 121720128 Blast Desc: ACLA_060030 [Aspergillus clavatus NRRL 1] gi|119404974|gb|EAW15336.1| ACLA_060030 [Aspergillus clavatus NRRL 1]
MPVYSITVRNNSGALQNYYITNDPPSLTGSAGSKPWSSVISSAHCPDGATAKFEIDTRSYYAYCTTSDGKPGDGVDATVTQRRPVTLGQVNEDGSLTPGSSVKIIVQEGTPELDAVDQSNGSRGSFQFQTGNDFTSRDAKEEHFMIGYGNEAAPFALFTPLPNANYMIQPRDVFYLSFGQTRRGSIIDVTSLGEVLKIDFESLSTSHVTVDEDQTGKLTLQEE

SEQ ID NO: 20482 - DNA, 755 bp, Muscodor strobelii
  misc_feature: SGI EST ID NO. CUFF.47943.1
  misc_feature: Variant of the nucleotide sequence at SEQ ID NO 20480
ctgagatgcacagtcgtttccagctgaaatactttatgacgagtctaaacactgactactactatttgcgactaggtaatgtgctgttgctgaagcattactgacgggtgaagccgatgaatcttgtgatactatcgaagtatccgaattgaaagtctggacatgcttcagtatataatccaagcaacaattcactcgttcgaacaagtctctgcaccagtacctacctcataagcgacggagtggacgcaacggtaacccaacgccgtccagtgacccttggacaagtcaacgaggatggctcgttgactcctggatcatcggtgaagattatagtacaggagggaacgcctgaactagacgcagtggatcaatcgaacggttctagaggatcatttcaattccaaacaggcaacgatttcacaagtcgggatgctaaggaggaacatttcatgattggatatggaaatgaagcagcgccgttcgcccttttcacgcccttgccaaacgcaaactacatgatccaaccacgcgatgtgttctacctcagtttcggccagacgcgtcgcggttctatcattgacgtcacatcgttgggtgaagtgctcaagatagacttcgagtctctctcaacttcgcatgttacggttgatgaagaccagacaggaaaattaaccctgcaagaggaatagaaataggagcataggtactgtaggaataatacaccagcctattcataattataagaatgtccc

SEQ ID NO: 20483 - DNA, 558 bp, Muscodor strobelii
  misc_feature: SGI cDNA ID NO. 566914
  misc_feature: Encodes the peptide sequence at SEQ ID NO 20484
atgctatcttcttctgtcatattccttctcgctctaagcagcgccgtcgcctttaagacgaacgtagaccacacttctgagatgaccgagacagtgcgcgcaaaatctggatacagcattgatgagttcaatgacctggttgaagaggtgctcgacgcatgcgatagcaatggctgcgacttgaacactgagaagtgtaatgttgctcattgcatttccatcgacggagataactccgatgataaccacgacaacatactcgacatcgtcggcaagttcatcaaggcttcaatgaagaccgaggacgacacccttgatgaatgtaccagctccgggtgcggtttcgcgcccgccgtcaactacaccattcctggctatatatccttgaggcggaactacgatagcggtgatcctaacactttgtataaagtgtctatcaaaacaacggaggcgaaggatgcatgcggtgccgtgttcgatgccttgtcggctgcggccgggccacttgaggggggagacctatttggtgcgatcaaggttgcagcttgcaccaactaa

SEQ ID NO: 20484 - protein, 185 aa, Muscodor strobelii
  misc_feature: SGI Peptide ID NO. 566914
MLSSSVIFLLALSSAVAFKTNVDHTSEMTETVRAKSGYSIDEFNDLVEEVLDACDSNGCDLNTEKCNVAHCISIDGDNSDDNHDNILDIVGKFIKASMKTEDDTLDECTSSGCGFAPAVNYTIPGYISLRRNYDSGDPNTLYKVSIKTTEAKDACGAVFDALSAAAGPLEGGDLFGAIKVAACTN

SEQ ID NO: 20485 - DNA, 1220 bp, Muscodor strobelii
  misc_feature: SGI EST ID NO. CUFF.47936.0
  misc_feature: Variant of the nucleotide sequence at SEQ ID NO 20483
cacaaggttcattgtgatccgacgccagtcggcttgatagggcttcactgcgaaagtagcgaggcaacggcgaggctgtgcctatttatggacatacaacgacacatatgacgtatcaaggtaacgtttggaggatgagactcgaatagcagttcgtcatgtggcatgttcgatactgtccaccttcgctcatcggtctataaatgcaggtttgcgaccctcagtccatgaagcacagcattctaaccattttcttctattcacctgttccatctgttttatcttgcccgcagctcgtgtcgtcgtcaatcctgaagttttcccgaaacgaagcgacaatgctatcttcttctgtcatattccttctcgctctaagcagcgccgtcgcctttaagacgaacgtagaccacacttctgagatgaccgagacagtgcgcgcaaaatctggatacagcattgatgagttcaatgacctggttgaagaggtgctcgacgcatgcgatagcaatggctgcgacttgaacactgagaagtgtaatgttgctcattgcatttccatcgacggagataactccgatgataaccacgacaacatactcgacatcgtcggcaagttcatcaaggcttcaatgaagaccgaggacgacacccttgatgaatgtaccagctccgggtgcggtttcgcgcccgccgtcaactacaccattcctggctatatatccttgaggcggaactacgatagcggtgatcctaacactttgtataaagtgtctatcaaaacaacggaggcgaaggatgcatgcggtgccgtgttcgatgccttgtcggctgcggccgggccacttgaggggggagacctatttggtgcgatcaaggttgcagcttgcaccaactaaaagaagatgaaggatgctgtgaatattaatacggtctttcttcttctaagccttgggcagtcttctcaggggcgttgtttgtggaagttgggtttgtagtgtgaggctctagaataaacatcactctgtgggtccgaatgtgtctataatatctcctgccacttatcctaggcactctgatccccatgtggcagctcagctactggacggtacaattactcaagtaaagtaaaaggtaaccgatcaattgaacgcgcatattccaatcagatagatatgtcttattgaaaaatgcagctgtcaaacatttgcgacttagcccgg

SEQ ID NO: 20486 - DNA, 4554 bp, Muscodor strobelii
  misc_feature: SGI cDNA ID NO. 566915
  misc_feature: Encodes the peptide sequence at SEQ ID NO 20487
atgtctgaggacgtgtcacgcttcctgtcgcaagtgaaagagttgggagagcgccgaatagaagaagatgaggccagatcgagagaattagaagagaagatactacaagaccgaagagaacggcaagcccgccgcgccgaacgcgctcggtctatttcaccgcagaaatcctcgcccgcgaataccccaccaccgtcgtctcagcgcacgaatatccaaccttcgggccgccttgacctcgaggcttctcctgcacttgagccccctcctgctctccagtccgactcattgcctcaagctgaagacactatggactacgctggccctgtgtcgacttcgccctccaaggagaacgaggcgcctatcgacgcagagatcaaatcaaattatccggcgacacccacgaggtcgaataccaccgccaggggattatcttggcaacggcggcccaactcgcaggcctcggaacggtctcaaagccggccgctgtctatggtcgctaccgaaaatgcggcccgtttctccaaccctgtctccaatcctacccccgagcccgagtccgctaccgaaggtctgtctaaagaccagatagcatcagccctgtcgtccaaagacccatcatggttccgtcagacggctgatcgaggtactaactctgccgcctaccggaagaatcaggtcgaagacagccaaactgtggacatgtcatccatgcgaactcagctcccgggtatgtcgcgtaatacgtcgagtgaggctcctagtaacgagtatactccacgtccggattcctcagtgcagcgtaatagtgtcacttcgcctaccagtctttcgagcagtttgagactagatcctccttcgaacgatgttaaaatagatactgagccggagtcgcgagggttgacttctccgctcggacggacctctcctacaaagtctgatcgcccggtttcgccgactaaaggtatgggtggcttcgtccagagtgccatgatgaaacgctcggacagtgtcagcaaacggtggagcgttcagtcgcctgggggcctgcaacgcgcagactccgttgcttcgaaccgcggcagctacgggacgcctaacagaatgagcgtgagcgccaagccgaaacctacgagtttgtcacgtgaaacatcgacagatcctgggagaccaggctcgagcgagagtgacaaggctctcagtctcgatgttacggcatcttcagaaccgcaagcacaagaatcagacaaggtctctcctcctgttagtccctcaaagactatggaccctcgaagatggagtcctcagaagtcttcttggctagagtccgcgctgaacaaacccgagtcccccaaaccgaaatcaactgcaccaccgtctactcagccagcatggatggcggaacttcaaaaagcgaaagcccagaaagcgacgagcacgagtggagataccaacaaaactcctgctgtttcacacaaacatcaagtcagtattgggggtcttatgaggtcatctgctccgggtatcaacacagctgcgccaggccggactggtcttcacaatccatcatcatcgataggaaaaagtagtggatctgcgttcgcttctgcgacgcctaaagaaccgcaaactcctctagtcccaagtctgcagaaatcaacatctgagcccgctgctgagatcaagcctctagagaagcaagcccctgtcatcaggccaaaacccgagaccccgcccaagaaagatttccgggcaaacctgaagcctagggtacaaccgccaacggcgtcaggcggcactcaagaagtcgagttcaagaacgtttttggcaatctacgaaaagccaccacccagaattatgtcgctcccgacgaactcaagaataacattacgaggggcaaggctgcgttaaacataacaggtggtccccagaagaccgagcgcagagatgagttcaaagatgctattctagctaagaagaaggaatttcaggcggtccaatctgaaggacgcggtatcacccgaaacaacagtgtatcatccgagcagccaattcccgaaggcctcctcaggcgaagtgaacttggccggtctaatacagtgaaacgaggttcggtttcttccgaggcatcagctcccgagacaaggagaccgagtgtacagtccaaccgcatctcgactgagaaacaagatcggtttggcccgtttgaaaagcgcggctctgtcacggaatcttctgctttggcgcctcaacgctcagacgcggcggttgaaccgcccatcacaagacaactgcctgttgtcaaaccaaattccatagtagaaccgagtaaagaatcaagtgctcccactcggcttcctggaaagctaggcggaggcactttggcaaaccgatttaaccccgcccttgctggtcttcttgcccgaggaccacctggctctggaaacaacgctgctaactcgtcctctgacacgatgtcaagtcgtcgcacagaagataatgagaaggaagccgcgccgggccccaagttgacgcacatgacgaaaaatcgtgcgcgtggacccaagagaaaagcaccgacgacggcttctgcgagtagtacctctctgaaggagccagagtctagtgatacgaatctcgtgcaaaatgacaagcctcccgcggaacaggcgccgtcacctcttgcgcagcctgaagtcattacgctcgttgactcgtcgaagagaagatatgaggcacccgaaacacccaaacctcagccggtcgccctcaagagctctactgagccgttagatagttctcctgatccaactccggctcctttgaggcctcagagaactggtaacagaattcacgaacaggtagccgcgtttgcagcacagaggaaccagcctattgtgcgcaagagtacggacgaagcacaggaatctacagtgcaacccccatcaccaagaaagttgaatatgaaccgtatgtctagatttggtgacattgcttccccgacagatgtggcgagtagcgcagagcaatccaaagcatctgaacctcttgtcgtgaaggagtcctccaaccctgctcctcgtgaaatacagacgttacagccacgatcaccgcccttgaataagcccaagatgcctctaccccaacctctgtcattaccttcgaggcaatcctcaaaagacgagataccgtccagagttgcagagccggaagtaaaatcgagttccccaatgggtgctagaccattacctgtcccaccgacaagcgtctcgaccaaggatactatcaacctgcctgtgcggcctctcccatcaccagggcccaaagcatctcccattccatcgcccgcgcgatcacctacgaagcagtcaatggataccactgttgtcttgaaagagtttttcggcccgaatcggcctcagaggaattatcaggtcgacgctgccgagattctaatgcagcggccaagcccattccctcccaagatccaaaccctcagctgccagcttttccacttctccgctgaaggtaaaaagttacctgttcccgctcatcacgaacgaacactgttcgaacgtgaaatgtacatctgctctcacacgttcaagaacgaagctggtaaaaaagtgtcagaagtttatttttgggccggtgacgaagtacccaggtcgactattgaagatgccgccatttttgtcgctcgagaagcacgctctatgggtggtacattgatcaagatgcagcaaggcaaagagacaccagagttcattcaagcccttggaggcattgtgatcacacaacgcggatccggaacaaaatatgactcgctcgctcctcatatgctgtgtggaaggcgatacaaaggccatgttgtctttgacgaagtcgacttcacgccatctgcactctgctcaggcttcccctatctcatctcccagggcggtcgatgctacttatggaaaggcaaaggcagcggagttgacgagcttagttgcgcacgtctaataggcatggactacgcactctcgggtgagatggaagaggtcgaagatggtcgtgaaccagccaccttttgggatctttttggcggcgcaaatcgatttggatcggcagatcactggcgtctgaagccaaactacgataaatactgcagcagactgttcttatccgatgcaacgtctaagcaacaaatcgcagaattgtctcaattcgtacagacagatcttcagcctacaaatatctacgtgatcgacgcgttcttcgagttatacatagtcgtaggatcacaggcacaatcccaatacgcatcattccacaatgcgctggactttgcgcaggaatacgcgattctcgcagcgggcatggaagaccggccgttcgtgccgatttctacagtggtgcttgagggtatccccagggatatgaagagtgtgtttaggaagtggagagatgaaaatagtcccacggttacgaatgtcaatacggggttgaagagaggacgcagtttgaaggtcgttacgcttaatcaggcgcttcaggcgctgagcgactag

SEQ ID NO: 20487 - protein, 1517 aa, Muscodor strobelii
  misc_feature: SGI Peptide ID NO. 566915
  misc_feature (1289)..(1359): Pfam Id: PF00626 Pfam Desc: Gelsolin repeat
  misc_feature (3)..(1517): NCBI GI: 261354110 Blast Desc: conserved [Verticillium albo-atrum VaMs.102]
  misc_feature (582)..(1517): NCBI GI: 256733305 Blast Desc: NECHADRAFT_60471 [Nectria haematococca mpVI 77-13-4]
  misc_feature (910)..(1517): NCBI GI: 145601939 Blast Desc: MGG_05315 [Magnaporthe grisea 70-15] gi|145010400|gb|EDJ95056.1| MGG_05315 [Magnaporthe grisea 70-15]
  misc_feature (899)..(1517): NCBI GI: 171685614 Blast Desc: protein product [Podospora anserina] gi|170942768|emb|CAP68421.1| protein product [Podospora anserina]
  misc_feature (1068)..(1515): NCBI GI: 46124527 Blast Desc: FG06641.1 [Gibberella zeae PH-1]
  misc_feature (1118)..(1517): NCBI GI: 85080772 Blast Desc: NCU00219 [Neurospora crassa OR74A] gi|28917674|gb|EAA27368.1| [Neurospora crassa OR74A]
  misc_feature (1)..(1101): NCBI GI: 46124527 Blast Desc: FG06641.1 [Gibberella zeae PH-1]
  misc_feature (1)..(872): NCBI GI: 116208180 Blast Desc: CHGG_03383 [Chaetomium globosum CBS 148.51] gi|88183980|gb|EAQ91448.1| CHGG_03383 [Chaetomium globosum CBS 148.51]
  misc_feature (1155)..(1517): NCBI GI: 116208180 Blast Desc: CHGG_03383 [Chaetomium globosum CBS 148.51] gi|88183980|gb|EAQ91448.1| CHGG_03383 [Chaetomium globosum CBS 148.51]
  misc_feature (1)..(997): NCBI GI: 145601939 Blast Desc: MGG_05315 [Magnaporthe grisea 70-15] gi|145010400|gb|EDJ95056.1| MGG_05315 [Magnaporthe grisea 70-15]
MSEDVSRFLSQVKELGERRIEEDEARSRELEEKILQDRRERQARRAERARSISPQKSSPANTPPPSSQRTNIQPSGRLDLEASPALEPPPALQSDSLPQAEDTMDYAGPVSTSPSKENEAPIDAEIKSNYPATPTRSNTTARGLSWQRRPNSQASERSQSRPLSMVATENAARFSNPVSNPTPEPESATEGLSKDQIASALSSKDPSWFRQTADRGTNSAAYRKNQVEDSQTVDMSSMRTQLPGMSRNTSSEAPSNEYTPRPDSSVQRNSVTSPTSLSSSLRLDPPSNDVKIDTEPESRGLTSPLGRTSPTKSDRPVSPTKGMGGFVQSAMMKRSDSVSKRWSVQSPGGLQRADSVASNRGSYGTPNRMSVSAKPKPTSLSRETSTDPGRPGSSESDKALSLDVTASSEPQAQESDKVSPPVSPSKTMDPRRWSPQKSSWLESALNKPESPKPKSTAPPSTQPAWMAELQKAKAQKATSTSGDTNKTPAVSHKHQVSIGGLMRSSAPGINTAAPGRTGLHNPSSSIGKSSGSAFASATPKEPQTPLVPSLQKSTSEPAAEIKPLEKQAPVIRPKPETPPKKDFRANLKPRVQPPTASGGTQEVEFKNVFGNLRKATTQNYVAPDELKNNITRGKAALNITGGPQKTERRDEFKDAILAKKKEFQAVQSEGRGITRNNSVSSEQPIPEGLLRRSELGRSNTVKRGSVSSEASAPETRRPSVQSNRISTEKQDRFGPFEKRGSVTESSALAPQRSDAAVEPPITRQLPVVKPNSIVEPSKESSAPTRLPGKLGGGTLANRFNPALAGLLARGPPGSGNNAANSSSDTMSSRRTEDNEKEAAPGPKLTHMTKNRARGPKRKAPTTASASSTSLKEPESSDTNLVQNDKPPAEQAPSPLAQPEVITLVDSSKRRYEAPETPKPQPVALKSSTEPLDSSPDPTPAPLRPQRTGNRIHEQVAAFAAQRNQPIVRKSTDEAQESTVQPPSPRKLNMNRMSRFGDIASPTDVASSAEQSKASEPLVVKESSNPAPREIQTLQPRSPPLNKPKMPLPQPLSLPSRQSSKDEIPSRVAEPEVKSSSPMGARPLPVPPTSVSTKDTINLPVRPLPSPGPKASPIPSPARSPTKQSMDTTVVLKEFFGPNRPQRNYQVDAAEILMQRPSPFPPKIQTLSCQLFHFSAEGKKLPVPAHHERTLFEREMYICSHTFKNEAGKKVSEVYFWAGDEVPRSTIEDAAIFVAREARSMGGTLIKMQQGKETPEFIQALGGIVITQRGSGTKYDSLAPHMLCGRRYKGHVVFDEVDFTPSALCSGFPYLISQGGRCYLWKGKGSGVDELSCARLIGMDYALSGEMEEVEDGREPATFWDLFGGANRFGSADHWRLKPNYDKYCSRLFLSDATSKQQIAELSQFVQTDLQPTNIYVIDAFFELYIVVGSQAQSQYASFHNALDFAQEYAILAAGMEDRPFVPISTVVLEGIPRDMKSVFRKWRDENSPTVTNVNTGLKRGRSLKVVTLNQALQALSD

SEQ ID NO: 20488 - DNA, 5321 bp, Muscodor strobelii
  misc_feature: SGI EST ID NO. CUFF.47991.0
  misc_feature: Variant of the nucleotide sequence at SEQ ID NO 20486
cggcagccgaagaaacccacggaacccactttgtcttttgctccgatgctcaaatgtcgtcgattattggtgaattgaccgacgggcatccgttaaagaaacaagtcacatcagagtttgagacggttgctggatagcccaaaccaaatcgaccctcgcgatacgagcttcacctgaactggaggcagtctatcctctaattgtccgattcttccttagctaaacccaaaacccaacgcatcgcaacgagcgcgtgtccgtgttgccgtgtcatgctcgctccagcgccgcggcctcagctgtaaacaatagaccctaatcgccccgatgtctgaggacgtgtcacgcttcctgtcgcaagtgaaagagttgggagagcgccgaatagaagaagatgaggccagatcgagagaattagaagagaagatactacaagaccgaagagaacggcaagcccgccgcgccgaacgcgctcggtctatttcaccgcagaaatcctcgcccgcgaataccccaccaccgtcgtctcagcgcacgaatatccaaccttcgggccgccttgacctcgaggcttctcctgcacttgagccccctcctgctctccagtccgactcattgcctcaagctgaagacactatggactacgctggccctgtgtcgacttcgccctccaaggagaacgaggcgcctatcgacgcagagatcaaatcaaattatccggcgacacccacgaggtcgaataccaccgccaggggattatcttggcaacggcggcccaactcgcaggcctcggaacggtctcaaagccggccgctgtctatggtcgctaccgaaaatgcggcccgtttctccaaccctgtctccaatcctacccccgagcccgagtccgctaccgaaggtctgtctaaagaccagatagcatcagccctgtcgtccaaagacccatcatggttccgtcagacggctgatcgaggtactaactctgccgcctaccggaagaatcaggtcgaagacagccaaactgtggacatgtcatccatgcgaactcagctcccgggtatgtcgcgtaatacgtcgagtgaggctcctagtaacgagtatactccacgtccggattcctcagtgcagcgtaatagtgtcacttcgcctaccagtctttcgagcagtttgagactagatcctccttcgaacgatgttaaaatagatactgagccggagtcgcgagggttgacttctccgctcggacggacctctcctacaaagtctgatcgcccggtttcgccgactaaaggtatgggtggcttcgtccagagtgccatgatgaaacgctcggacagtgtcagcaaacggtggagcgttcagtcgcctgggggcctgcaacgcgcagactccgttgcttcgaaccgcggcagctacgggacgcctaacagaatgagcgtgagcgccaagccgaaacctacgagtttgtcacgtgaaacatcgacagatcctgggagaccaggctcgagcgagagtgacaaggctctcagtctcgatgttacggcatcttcagaaccgcaagcacaagaatcagacaaggtctctcctcctgttagtccctcaaagactatggaccctcgaagatggagtcctcagaagtcttcttggctagagtccgcgctgaacaaacccgagtcccccaaaccgaaatcaactgcaccaccgtctactcagccagcatggatggcggaacttcaaaaagcgaaagcccagaaagcgacgagcacgagtggagataccaacaaaactcctgctgtttcacacaaacatcaagtcagtattgggggtcttatgaggtcatctgctccgggtatcaacacagctgcgccaggccggactggtcttcacaatccatcatcatcgataggaaaaagtagtggatctgcgttcgcttctgcgacgcctaaagaaccgcaaactcctctagtcccaagtctgcagaaatcaacatctgagcccgctgctgagatcaagcctctagagaagcaagcccctgtcatcaggccaaaacccgagaccccgcccaagaaagatttccgggcaaacctgaagcctagggtacaaccgccaacggcgtcaggcggcactcaagaagtcgagttcaagaacgtttttggcaatctacgaaaagccaccacccagaattatgtcgctcccgacgaactcaagaataacattacgaggggcaaggctgcgttaaacataacaggtggtccccagaagaccgagcgcagagatgagttcaaagatgctattctagctaagaagaaggaatttcaggcggtccaatctgaaggacgcggtatcacccgaaacaacagtgtatcatccgagcagccaattcccgaaggcctcctcaggcgaagtgaacttggccggtctaatacagtgaaacgaggttcggtttcttccgaggcatcagctcccgagacaaggagaccgagtgtacagtccaaccgcatctcgactgagaaacaagatcggtttggcccgtttgaaaagcgcggctctgtcacggaatcttctgctttggcgcctcaacgctcagacgcggcggttgaaccgcccatcacaagacaactgcctgttgtcaaaccaaattccatagtagaaccgagtaaagaatcaagtgctcccactcggcttcctggaaagctaggcggaggcactttggcaaaccgatttaaccccgcccttgctggtcttcttgcccgaggaccacctggctctggaaacaacgctgctaactcgtcctctgacacgatgtcaagtcgtcgcacagaagataatgagaaggaagccgcgccgggccccaagttgacgcacatgacgaaaaatcgtgcgcgtggacccaagagaaaagcaccgacgacggcttctgcgagtagtacctctctgaaggagccagagtctagtgatacgaatctcgtgcaaaatgacaagcctcccgcggaacaggcgccgtcacctcttgcgcagcctgaagtcattacgctcgttgactcgtcgaagagaagatatgaggcacccgaaacacccaaacctcagccggtcgccctcaagagctctactgagccgttagatagttctcctgatccaactccggctcctttgaggcctcagagaactggtaacagaattcacgaacaggtagccgcgtttgcagcacagaggaaccagcctattgtgcgcaagagtacggacgaagcacaggaatctacagtgcaacccccatcaccaagaaagttgaatatgaaccgtatgtctagatttggtgacattgcttccccgacagatgtggcgagtagcgcagagcaatccaaagcatctgaacctcttgtcgtgaaggagtcctccaaccctgctcctcgtgaaatacagacgttacagccacgatcaccgcccttgaataagcccaagatgcctctaccccaacctctgtcattaccttcgaggcaatcctcaaaagacgagataccgtccagagttgcagagccggaagtaaaatcgagttccccaatgggtgctagaccattacctgtcccaccgacaagcgtctcgaccaaggatactatcaacctgcctgtgcggcctctcccatcaccagggcccaaagcatctcccattccatcgcccgcgcgatcacctacgaagcagtcaatggataccactgttgtcttgaaagagtttttcggcccgaatcggcctcagaggaattatcaggtcgacgctgccgagattctaatgcagcggccaagcccattccctcccaagatccaaaccctcagctgccagcttttccacttctccgctgaaggtaaaaagttacctgttcccgctcatcacgaacgaacactgttcgaacgtgaaatgtacatctgctctcacacgttcaagaacgaagctggtaaaaaagtgtcagaagtttatttttgggccggtgacgaagtacccaggtcgactattgaagatgccgccatttttgtcgctcgagaagcacgctctatgggtggtacattgatcaagatgcagcaaggcaaagagacaccagagttcattcaagcccttggaggcattgtgatcacacaacgcggatccggaacaaaatatgactcgctcgctcctcatatgctgtgtggaaggcgatacaaaggccatgttgtctttgacgaagtcgacttcacgccatctgcactctgctcaggcttcccctatctcatctcccagggcggtcgatgctacttatggaaaggcaaaggcagcggagttgacgagcttagttgcgcacgtctaataggcatggactacgcactctcgggtgagatggaagaggtcgaagatggtcgtgaaccagccaccttttgggatctttttggcggcgcaaatcgatttggatcggcagatcactggcgtctgaagccaaactacgataaatactgcagcagactgttcttatccgatgcaacgtctaagcaacaaatcgcagaattgtctcaattcgtacagacagatcttcagcctacaaatatctacgtgatcgacgcgttcttcgagttatacatagtcgtaggatcacaggcacaatcccaatacgcatcattccacaatgcgctggactttgcgcaggaatacgcgattctcgcagcgggcatggaagaccggccgttcgtgccgatttctacagtggtgcttgagggtatccccagggatatgaagagtgtgtttaggaagtggagagatgaaaatagtcccacggttacgaatgtcaatacggggttgaagagaggacgcagtttgaaggtcgttacgcttaatcaggcgcttcaggcgctgagcgactaggaaccgtctcagaaccgtggcaattgcatcaattggagcccgagaaggaagcctgtgccgaagagactttggtgagaggaggaggattaatgggtttgagggtaggagtgagagggagggattgtgttgtgttcttgttatatatagggtatctggcagggctttaaggggggaggtggttttgatttttgttggtgttgaggaaggtggaaaatggtgcattgtctttatggggcgtatttatatatcgattgagttccggggtaaaatcggggtgtgagatgaataaatagggtgttgttgtcacatagagttgagacgatgttgcgtttatgctggcgatgattgtgttgtgagtttcgttctttatgagtcgttcgttttctctcagaccgtcatccttgctcattgctagaaaagtgcacagtgtacatgtttcg

SEQ ID NO: 20489 - DNA, 1227 bp, Muscodor strobelii
  misc_feature: SGI cDNA ID NO. 566916
  misc_feature: Encodes the peptide sequence at SEQ ID NO 20490
atgaagagcttggttattctggcctgcttatcaacggtcttcgcagagtcttactcgtatccccaaggaaccgcatccacggactatcttacaacctatacgaccgtcacaacttgtccagcgacccaaacagtaacaactggaggtagtacttacattcaaaccatattgactacgtctaccatcgtcgtcacagaatgtccgggaggttcatgtgaaggtggcgaagtcacgaagactctgccggacacaacagttggaactaccacacaagtcgaagtcacttatacgactacctgtccaataactgaaactatcactattggcggatcgactcaaacacagactcgcacagtcaccagtgttgttgttactcatgtcgacactacaattgtagagacagcaacggctccaccggtcactaaaactacacgtcaagttattcgcactaccgaaacttctctatgccctgtcacggaaacaaagacagttgcaggaggaacggttgtggtcacttggatctcaacagctactatcattacggatgtcccttttacggttacaaaagaagtttcgacatcggtttttgagactgtgacatatccagtaacgacgatcgctacagtgtcagagggaacgaccaaatatcttaccaaaaccgacacgtccattttctctactatccaagagtttaccgttacgaaaaccatacctatctcaatcacagacacagcaactgaatacacgtcattcactgtcaccgaatcggtgtggacttctgtttacgaaaccatcactcatgctgagacgaccttcactactgtctcctcgggttctacgatctgtataacagaaactggtacttccaccctctatatcactcaagagtttacggccacagaaactgttcccattacagtaaccgatgaagttgatattactatcacgtcggcagccagcgccgaaaatacagttactacctaccctacggtttgggtcacatacacggacactactatcattagtgggacggcatatcctactacaataaccctccccacgacaatgagtacgacactcacacaacccatctctgtttcaagcagctctctagcgtacccgaccatgactgatcctatacaagtatcgaccggctttgcggcaccgcaggctactccatactctgagctgttctttatggtagctggccttgttgccgtactgtaa

SEQ ID NO: 20490 - protein, 408 aa, Muscodor strobelii
  misc_feature: SGI Peptide ID NO. 566916
  misc_feature (129)..(356): NCBI GI: 171686996 Blast Desc: protein product [Podospora anserina] gi|170943459|emb|CAP69112.1| protein product [Podospora anserina]
  misc_feature (68)..(243): NCBI GI: 85079689 Blast Desc: NCU00175 [Neurospora crassa OR74A] gi|28917461|gb|EAA27162.1| NCU00175 [Neurospora crassa OR74A]
  misc_feature (88)..(243): NCBI GI: 171686996 Blast Desc: protein product [Podospora anserina] gi|170943459|emb|CAP69112.1| protein product [Podospora anserina]
  misc_feature (89)..(260): NCBI GI: 116191801 Blast Desc: CHGG_05618 [Chaetomium globosum CBS 148.51] gi|88181531|gb|EAQ88999.1| CHGG_05618 [Chaetomium globosum CBS 148.51]
  misc_feature (39)..(227): NCBI GI: 156051904 Blast Desc: [Sclerotinia sclerotiorum 1980] gi|154705137|gb|EDO04876.1| [Sclerotinia sclerotiorum 1980]
  misc_feature (50)..(237): NCBI GI: 256733285 Blast Desc: NECHADRAFT_100233 [Nectria haematococca mpVI 77-13-4]
  misc_feature (88)..(166): NCBI GI: 154289973 Blast Desc: [Botryotinia fuckeliana B05.10] gi|150848520|gb|EDN23713.1| [Botryotinia fuckeliana B05.10]
  misc_feature (39)..(227): NCBI GI: 156051904 Blast Desc: [Sclerotinia sclerotiorum 1980] gi|154705137|gb|EDO04876.1| [Sclerotinia sclerotiorum 1980]
  misc_feature (76)..(183): NCBI GI: 154289973 Blast Desc: [Botryotinia fuckeliana B05.10] gi|150848520|gb|EDN23713.1| [Botryotinia fuckeliana B05.10]
  misc_feature (33)..(192): NCBI GI: 256733285 Blast Desc: NECHADRAFT_100233 [Nectria haematococca mpVI 77-13-4]
MKSLVILACLSTVFAESYSYPQGTASTDYLTTYTTVTTCPATQTVTTGGSTYIQTILTTSTIVVTECPGGSCEGGEVTKTLPDTTVGTTTQVEVTYTTTCPITETITIGGSTQTQTRTVTSVVVTHVDTTIVETATAPPVTKTTRQVIRTTETSLCPVTETKTVAGGTVVVTWISTATIITDVPFTVTKEVSTSVFETVTYPVTTIATVSEGTTKYLTKTDTSIFSTIQEFTVTKTIPISITDTATEYTSFTVTESVWTSVYETITHAETTFTTVSSGSTICITETGTSTLYITQEFTATETVPITVTDEVDITITSAASAENTVTTYPTVWVTYTDTTIISGTAYPTTITLPTTMSTTLTQPISVSSSSLAYPTMTDPIQVSTGFAAPQATPYSELFFMVAGLVAVL

SEQ ID NO: 20491 - DNA, 2190 bp, Muscodor strobelii
  misc_feature: SGI cDNA ID NO. 566917
  misc_feature: Encodes the peptide sequence at SEQ ID NO 20492
atgctgacgaaaaagcaaggccatctagcgagaatgacaaacgccactcattctggagtgaccagtggtcatttggccgacatatcaaatggccagcaacaagtgcagagcatcgtccctctcatctgctatatatgtcccgagacaccgaagtggacggacaagcatgggctctttgagcatctcctcagtactcgtcataagacaatggtgaaaaagagatcgactgagaaccctgaactgaaatcgcctcagggacgatttcttgcatggtggcgcaagtaccacatcgatcaagagttgaaagagtactgcagcactaaggaaaagttggctgcgactgcacaaacccctttgaaacccttgcctaggatttgctacatctgctcagaaaccaccgagttctcggatcaacagggtctgattgtgcatttactctcagacaagcattgcgataacttccgccaaggcctcctaggcaacttcggtgaccagtctgcgcttgccaaattcttggcatggtaccaggaacatgatgttgcgcttctggtgagacaccacaaagaaggcacgaatgcacgtgtccaagttctcgacaagctgtctgggaatcgtagccagccgcagagtgttgaaaacgatcttgaaaatgcccagcacgcgctaattccccagaaccgaatggaggaaatccctttggtttgtttcatctgcccaggcaacaacgacttctcagatcaagcacacttgatggatcatctcgattctgaaagtcacctgagccaaatggctcgcctgagtgcaacgcgcggaactgttcaaattgattctcgacttcgacagtgggatgcgtggtttttcaagtacaagatcggagagaaactactggcgcggggcaaaatcaagtacggcccttgtcaagaagatgccaatgagcctgtaatcggaggcggaaaccttgatgcagtcgacgacggtctatatccgagccctgcatcagctccaactcggagctcctacgatgctgccgaggaagatattgcaaagcaggattggaatgcaactcggcattccaagcgagagagagcttcctcagaagagattgaacagcacaataatgccttcaccgaggttattacgaaatgggtcaaagacactcatgtcgttcaggcggacgtaactgaattacaacatcgtaaggattgcgatgtagagcctgaaacaggccgcctactagatccgattctatatcctcacacgcttagagtagccaagacggacgacaaagacaaagacaaagacaatgcatctctggcagcgaacgagaggattcacgcttatttcgctcaacatcccgaacgatttctgcgggctcaggatgctagattccaccgattacgaagcaaaaaggctcgcagagagagtcaaaaggagacagaaatggaggcagctcgtaaagcagcagaagcagcagagctagcgcaagaggcagcacgaaagctacctcgaattccgtgtcacttccgtcccgcagacccccgagatattgacgctatcactgatctgtacaacaaggaggtctcctgccaatcgaccgtaatggagctacagcatctaccaagtgctcatatgcagaatctcctgaagatttgcaatgcctcgtcccttcccttcgctgttgcagtagaaggcgaaagcgcctccctgaatatcaaaaaggagaaactccttgggtttgcgatgatcatccaaggcactcgaggtttcaccggtctaaacgaggtcatgggaaaagttggtggaaaactgatcgttgtcgttgacaatgcatttcgcaagaagaatattggaactgcattaatgaatctggttctgtcaagctgttctagcaattgtccaaagcaacgggatggatacgactttatcaatcccgagaagatcagcggcctgaacgaagttgatgtcaccaacctgaagttcttctacattgacatagaagtcatcatccaatctgggactaccgagcgggaatcacgggaaagcagtgatcgtttcaaatggatctcagatttccttgaagatagattctgcatgctcctgaacagatacgaacatcatgcactttacaatggccacgattggttcgacaagctcacgtttcgccacaacgcccggaatctgggatgttaa

SEQ ID NO: 20492 - protein, 729 aa, Muscodor strobelii
  misc_feature: SGI Peptide ID NO. 566917
  misc_feature (378)..(696): NCBI GI: 164428941 Blast Desc: NCU00217 [Neurospora crassa OR74A] gi|157072344|gb|EAA27366.2| [Neurospora crassa OR74A]
  misc_feature (366)..(722): NCBI GI: 116208176 Blast Desc: CHGG_03381 [Chaetomium globosum CBS 148.51] gi|88183978|gb|EAQ91446.1| CHGG_03381 [Chaetomium globosum CBS 148.51]
  misc_feature (311)..(643): NCBI GI: 171685618 Blast Desc: protein product [Podospora anserina] gi|170942770|emb|CAP68423.1| protein product [Podospora anserina]
  misc_feature (467)..(696): NCBI GI: 145601935 Blast Desc: MGG_05316 [Magnaporthe grisea 70-15] gi|145010398|gb|EDJ95054.1| MGG_05316 [Magnaporthe grisea 70-15]
  misc_feature (366)..(653): NCBI GI: 46124523 Blast Desc: FG06639.1 [Gibberella zeae PH-1]
  misc_feature (391)..(641): NCBI GI: 258563226 Blast Desc: conserved [Uncinocarpus reesii 1704] gi|237907865|gb|EEP82266.1| conserved [Uncinocarpus reesii 1704]
  misc_feature (467)..(641): NCBI GI: 255941702 Blast Desc: Pc16g13210 [Penicillium chrysogenum Wisconsin 54-1255] gi|211586243|emb|CAP93991.1| Pc16g13210 [Penicillium chrysogenum Wisconsin 54-1255]
  misc_feature (448)..(641): NCBI GI: 115492617 Blast Desc: [Aspergillus terreus NIH2624] gi|114197796|gb|EAU39496.1| [Aspergillus terreus NIH2624]
  misc_feature (502)..(692): NCBI GI: 145230902 Blast Desc: An01g13130 [Aspergillus niger] gi|134055838|emb|CAK37360.1| protein product [Aspergillus niger]
  misc_feature (402)..(629): NCBI GI: 256733307 Blast Desc: NECHADRAFT_79465 [Nectria haematococca mpVI 77-13-4]
MLTKKQGHLARMTNATHSGVTSGHLADISNGQQQVQSIVPLICYICPETPKWTDKHGLFEHLLSTRHKTMVKKRSTENPELKSPQGRFLAWWRKYHIDQELKEYCSTKEKLAATAQTPLKPLPRICYICSETTEFSDQQGLIVHLLSDKHCDNFRQGLLGNFGDQSALAKFLAWYQEHDVALLVRHHKEGTNARVQVLDKLSGNRSQPQSVENDLENAQHALIPQNRMEEIPLVCFICPGNNDFSDQAHLMDHLDSESHLSQMARLSATRGTVQIDSRLRQWDAWFFKYKIGEKLLARGKIKYGPCQEDANEPVIGGGNLDAVDDGLYPSPASAPTRSSYDAAEEDIAKQDWNATRHSKRERASSEEIEQHNNAFTEVITKWVKDTHVVQADVTELQHRKDCDVEPETGRLLDPILYPHTLRVAKTDDKDKDKDNASLAANERIHAYFAQHPERFLRAQDARFHRLRSKKARRESQKETEMEAARKAAEAAELAQEAARKLPRIPCHFRPADPRDIDAITDLYNKEVSCQSTVMELQHLPSAHMQNLLKICNASSLPFAVAVEGESASLNIKKEKLLGFAMIIQGTRGFTGLNEVMGKVGGKLIVVVDNAFRKKNIGTALMNLVLSSCSSNCPKQRDGYDFINPEKISGLNEVDVTNLKFFYIDIEVIIQSGTTERESRESSDRFKWISDFLEDRFCMLLNRYEHHALYNGHDWFDKLTFRHNARNLGC

SEQ ID NO: 20493 - DNA, 2046 bp, Muscodor strobelii
  misc_feature: SGI cDNA ID NO. 566918
  misc_feature: Encodes the peptide sequence at SEQ ID NO 20494
atggcttcctcgtcgagcagtgtctcagccgagacaagcccgcccccaacacctatagacatcagctcacgccctagtacaccacctgagatagcaccaaaagagaagcgacgccagaagttactccgaggaatacagcgcatatcatctacgccatcgctggctcatatcggccgagctcgatcttcaagtgccccttatggaagtcgagcgagcttgtcatgtgtgagcctcgcctcgccggcgtcttttgctccggctttctcgggaagtatcccaccgggatactttcctaacggacagtcgtccttcccaggtactccaggtgttgattttccatcactcgatggcgtcgacgcccttttggcaccacgcaagaatgccaacgtctccattttgcctctttctccgaccaccgcgtccctccctaccgacgtcgtcacgttgcggtccaggtcaggcagtgcaaggaaatcctttcacgaatttctggctgccatgccccacgagattcgaatccaaatattctcttacctcaagccaagggagctagttcgtgcttcccgcgtaaaccatgagttccacaagttctgctttgatggacagctgtggacgcgccttgatgcatccgacttttacagcgaaataccagcggagtctctggccaagatcatcgcatcggcaggtccgttcattaaggatctcaatgttcgtgggtgcctccagatcgaacacaataagcgtgcagagatacttgtaacggcctgcaagaatctgatcaatgcgtctttagaaggatgcaggaacttccagcgaccgactctacacaatcttatacgaagcaatgagaggctgaccaacctgaacttgacaagtatgacagctgtcacgaatagtacttgcaagattatatcacagcattgtccccagctcgagagcctcaacgtgtcttggtgcaagcacatggacgcgaaaggtgtcaaaatgattgttctgggatgtcctaagctaaaggacttgcgggccggggaaattaaggggtttgacagcttagaggtggccaaggctatattcgaaacaaacagactcgagcatttagtccttagtggctgtgcggaccttactgattcgtcctttaagaccatagttcgagggatccggcctgaaattgatatcctcaccaacagaccgatcgttccgcctaggaagctccggcacctggatttgagtcgatgttctcagttgaccacagatagcgttcaaattcttggtcacctcgtaccggaacttgaaggcttacaactcagcagatgtacatcgttgacagacgctgcattggaacccattcttgcctcaactccgcatctgactctccttgaattagaagatctttctgagctcacaaacgacatcttatcgaagcacctagctaaggccccttgtgcagcaacactagagcatctttcagtgagctattgtgagaatctaggggatagtggaatgctccctgtaatgaaggaatgtgttggtctcaagacggtggatatggacaacacaaagattggggaccttgttctccaagaagctgctgcgatggtgcgctcacgtgcagctcggacatcaaatcgcaattcacgtccacgtattggtctgaaactcgtcgtatacgattgtcaatttgtcacatggacaggcattcgagagatcttatcatggaatgcggagattcgacagccacacggaaccaagccaacctacccgacggaagttatcggcttgaaatgcttctatggttggaagcagacggtggagcagcatacgcaacgagtcttgcgaggcgatttcaccgccgcttcacgactggagaggaagtgggccgactatatgcaagccgtcgaagaagcaggtgctagtggtgctggcattcgccgtcggaggcggagagctagagaggctcagctgcttcatgcagatgaggaaggaggcataatcaatgcgaatcgcaggcgtgcaaggaccatggcggcttcttgtgccatcatgtga

SEQ ID NO: 20494 - protein, 681 aa, Muscodor strobelii
  misc_feature: SGI Peptide ID NO. 566918
  misc_feature (162)..(209): Pfam Id: PF00646 Pfam Desc: F-box domain
  misc_feature (8)..(681): NCBI GI: 46125183 Blast Desc: FG06969.1 [Gibberella zeae PH-1]
  misc_feature (43)..(660): NCBI GI: 154295215 Blast Desc: BC1G_13421 [Botryotinia fuckeliana B05.10] gi|150844148|gb|EDN19341.1| BC1G_13421 [Botryotinia fuckeliana B05.10]
  misc_feature (8)..(681): NCBI GI: 85109814 Blast Desc: NCU06250 [Neurospora crassa OR74A] gi|28924752|gb|EAA33865.1| conserved [Neurospora crassa OR74A]
  misc_feature (29)..(640): NCBI GI: 171686676 Blast Desc: protein product [Podospora anserina] gi|170943299|emb|CAP68952.1| protein product [Podospora anserina]
  misc_feature (25)..(681): NCBI GI: 189188354 Blast Desc: F-box/LRR repeat containing protein 2 [Pyrenophora tritici-repentis Pt-1C-BFP] gi|187972122|gb|EDU39621.1| F-box/LRR repeat containing protein 2 [Pyrenophora tritici-repentis
  misc_feature (33)..(532): NCBI GI: 116192199 Blast Desc: CHGG_05817 [Chaetomium globosum CBS 148.51] gi|88181730|gb|EAQ89198.1| CHGG_05817 [Chaetomium globosum CBS 148.51]
  misc_feature (33)..(658): NCBI GI: 169623124 Blast Desc: SNOG_14791 [Phaeosphaeria nodorum SN15] gi|111056863|gb|EAT77983.1| SNOG_14791 [Phaeosphaeria nodorum SN15]
  misc_feature (22)..(681): NCBI GI: 119498189 Blast Desc: F-box domain protein [Neosartorya fischeri NRRL 181] gi|119414016|gb|EAW23955.1| F-box domain protein [Neosartorya fischeri NRRL 181]
  misc_feature (22)..(681): NCBI GI: 70989143 Blast Desc: F-box domain protein [Aspergillus fumigatus Af293] gi|66847052|gb|EAL87383.1| F-box domain protein [Aspergillus fumigatus Af293]
  misc_feature (22)..(681): NCBI GI: 159128834 Blast Desc: F-box domain protein [Aspergillus fumigatus A1163]
MASSSSSVSAETSPPPTPIDISSRPSTPPEIAPKEKRRQKLLRGIQRISSTPSLAHIGRARSSSAPYGSRASLSCVSLASPASFAPAFSGSIPPGYFPNGQSSFPGTPGVDFPSLDGVDALLAPRKNANVSILPLSPTTASLPTDVVTLRSRSGSARKSFHEFLAAMPHEIRIQIFSYLKPRELVRASRVNHEFHKFCFDGQLWTRLDASDFYSEIPAESLAKIIASAGPFIKDLNVRGCLQIEHNKRAEILVTACKNLINASLEGCRNFQRPTLHNLIRSNERLTNLNLTSMTAVTNSTCKIISQHCPQLESLNVSWCKHMDAKGVKMIVLGCPKLKDLRAGEIKGFDSLEVAKAIFETNRLEHLVLSGCADLTDSSFKTIVRGIRPEIDILTNRPIVPPRKLRHLDLSRCSQLTTDSVQILGHLVPELEGLQLSRCTSLTDAALEPILASTPHLTLLELEDLSELTNDILSKHLAKAPCAATLEHLSVSYCENLGDSGMLPVMKECVGLKTVDMDNTKIGDLVLQEAAAMVRSRAARTSNRNSRPRIGLKLVVYDCQFVTWTGIREILSWNAEIRQPHGTKPTYPTEVIGLKCFYGWKQTVEQHTQRVLRGDFTAASRLERKWADYMQAVEEAGASGAGIRRRRRRAREAQLLHADEEGGIINANRRRARTMAASCAIM

SEQ ID NO: 20495 - DNA, 957 bp, Muscodor strobelii
  misc_feature: SGI cDNA ID NO. 566919
  misc_feature: Encodes the peptide sequence at SEQ ID NO 20496
atgacattcgatccaagaaaagatattccagatctaagcggcaaagtgattcttgtcaccggcggaaacacaggtttaggtgcagcaacgataaaattcattgccccacgaaacccacattgcatctacctctgcgcccgaccaccctcggttccacaaggcgaagagctcgcttcaagtctggagatctcatatccaaacctcgacgtacgggttcgacctctggacctcgcgtcatttacaagcatcaacaacttcgctgctgcatttataaaagaagccgaacggctagatgtattgttcataaatgctggtatctctagcacagcgccagccgttacagatgagggttacgaggcgcaattcggcgtgaactatcttgggcatgcgcttctcacccaattattaatgccgaagttgttgaaaacagcggccgaaagcagcgacagcgatgtccgaatacttgtcacgtcttcgatggcagcctttcttggcgcgccaccgaatggcctcgccctcgatgatatcaagaagcctgatgctcttgctactccatatcagcgctacgggcattcgaaacttagcttgatcctttttgcacgaaaactttctcaactttacccatccataaccaccgtgtcttttgatccaggtcaagtgaagacagatctcttccgaaaggcgacagggataaactactgggttctgatgacagtgggtatgctcataatgtatgctaccggcgtaaacgtcgaaaagggttctgaatgcgggctgtgggttctgtcttcgaaggagctcaagaatggagcccattatgagcccgttggtattttacaggaaacgaaaaagttcatcacggatcaagagctcgccaacacgttgtgggagtggacaagcatggagctgcagaaacatggcgcaccagggtggccgacattacgagtctcaaaataa

SEQ ID NO: 20496 - protein, 318 aa, Muscodor strobelii
  misc_feature: SGI Peptide ID NO. 566919
  misc_feature (15)..(191): Pfam Id: PF00106 Pfam Desc: short chain dehydrogenase
  misc_feature (15)..(167): Pfam Id: PF00106 Pfam Desc: short chain dehydrogenase
  misc_feature (2)..(311): NCBI GI: 256730450 Blast Desc: NECHADRAFT_29805 [Nectria haematococca mpVI 77-13-4]
  misc_feature (1)..(306): NCBI GI: 145253595 Blast Desc: An17g00810 [Aspergillus niger] gi|134083878|emb|CAK43009.1| protein product [Aspergillus niger]
  misc_feature (5)..(307): NCBI GI: 256729544 Blast Desc: NECHADRAFT_84229 [Nectria haematococca mpVI 77-13-4]
  misc_feature (1)..(311): NCBI GI: 259483182 Blast Desc: TPA: conserved [Aspergillus nidulans FGSC A4]
  misc_feature (1)..(306): NCBI GI: 119480111 Blast Desc: oxidoreductase, short-chain dehydrogenase/reductase family [Neosartorya fischeri NRRL 181] gi|119408238|gb|EAW18187.1| oxidoreductase, short-chain family
  misc_feature (1)..(306): NCBI GI: 159128997 Blast Desc: oxidoreductase, short-chain dehydrogenase/reductase family [Aspergillus fumigatus A1163]
  misc_feature (3)..(307): NCBI GI: 154289435 Blast Desc: BC1G_16002 [Botryotinia fuckeliana B05.10] gi|150849386|gb|EDN24579.1| BC1G_16002 [Botryotinia fuckeliana B05.10]
  misc_feature (2)..(306): NCBI GI: 145246022 Blast Desc: An12g01730 [Aspergillus niger] gi|134079972|emb|CAK48456.1| protein product [Aspergillus niger]
  misc_feature (9)..(306): NCBI GI: 70989477 Blast Desc: oxidoreductase, short-chain dehydrogenase/reductase family [Aspergillus fumigatus Af293] gi|66847219|gb|EAL87550.1| oxidoreductase, short-chain dehydrogenase/reductase family Af293]
  misc_feature (3)..(299): NCBI GI: 119172988 Blast Desc: CIMG_10039 [Coccidioides immitis RS]
MTFDPRKDIPDLSGKVILVTGGNTGLGAATIKFIAPRNPHCIYLCARPPSVPQGEELASSLEISYPNLDVRVRPLDLASFTSINNFAAAFIKEAERLDVLFINAGISSTAPAVTDEGYEAQFGVNYLGHALLTQLLMPKLLKTAAESSDSDVRILVTSSMAAFLGAPPNGLALDDIKKPDALATPYQRYGHSKLSLILFARKLSQLYPSITTVSFDPGQVKTDLFRKATGINYWVLMTVGMLIMYATGVNVEKGSECGLWVLSSKELKNGAHYEPVGILQETKKFITDQELANTLWEWTSMELQKHGAPGWPTLRVSK

SEQ ID NO: 20497 - DNA, 4532 bp, Muscodor strobelii
  misc_feature: SGI EST ID NO. CUFF.48062.0
  misc_feature: Variant of the nucleotide sequence at SEQ ID NO 20495
cttgtcaccggcggaaacacaggtttaggtgcagcaacgataaaattcattgccccacgaaacccacattgcatctacctctgcgcccgaccaccctcggttccacaaggcgaagagctcgcttcaagtctggagatctcatatccaaacctcgacgtacgggttcgacctctggacctcgcgtcatttacaagcatcaacaacttcgctgctgcatttataaaagaagccgaacggctagatgtattgttcataaatgctggtatctctagcacagcgccagccgttacagatgagggttacgaggcgcaattcggcgtgaactatcttgggcatgcgcttctcacccaattattaatgccgaagttgttgaaaacagcggccgaaagcagcgacagcgatgtccgaatacttgtcacgtcttcgatggcagcctttcttggcgcgccaccgaatggcctcgccctcgatgatatcaagaagcctgatgctcttgctactccatatcagcgctacgggcattcgaaacttagcttgatcctttttgcacgaaaactttctcaactttacccatccataaccaccgtgtcttttgatccaggtcaagtgaagacagatctcttccgaaaggcgacagggataaactactgggttctgatgacagtgggtatgctcataatgtatgctaccggcgtaaacgtcgaaaagggttctgaatgcgggctgtgggttctgtcttcgaaggagctcaagaatggagcccattatgagcccgttggtattttacaggaaacgaaaaagttcatcacggatcaagagctcgccaacacgttgtgggagtggacaagcatggagctgcagaaacatggcgcaccagggtggccgacattacgagtctcaaaataagatacacaaatattgcgatttcgtggatacatatctggaccgcacagtaggcttcaatattatctagtctctgcagactaataaatcatccggcttaagtgctgaaggccataagtggctgtgatgaaaaggattctcaatcatacagtcaatctgaaaacaacgactggcacaattgttcgtatccgttcagtacggccaatgcaatattacttaacagtcaaaaatgtatgagtgcataatgatcctgggatgcctaggcacgatagttcaccagacgccagattagctatcctcagaagccacaggtaatggaagcaagtactgccgtatgataaaatataaatcaaacatcagaaaagttgttgggttctcattctcttcggattcgtagccaattattataagtcgtgaacgaactgatcttgaaacgtgtggctctgtccatcaactgtccacgtcaaagcccctctatggtaagtatcgcagtcttataaacagaatatcatgcagtcgctcctcctaacgcctaaaatctctatcctagaagatagatagacccatatcatgatcatggtttgtgtatcaagacaattccaatatcacctcctttatgatgtagaaatacgaatagcccggccagtgtctctcacatgatggcacaagaagccgccatggtccttgcacgcctgcgattcgcattgattatgcctccttcctcatctgcatgaagcagctgagcctctctagctctccgcctccgacggcgaatgccagcaccactagcacctgcttcttcgacggcttgcatatagtcggcccacttcctctccagtcgtgaagcggcggtgaaatcgcctcgcaagactcgttgcgtatgctgctccaccgtctgcttccaaccatagaagcatttcaagccgataacttccgtcgggtaggttggcttggttccgtgtggctgtcgaatctccgcattccatgataagatctctcgaatgcctgtccatgtgacaaattgacaatcgtatacgacgagtttcagaccaatacgtggacgtgaattgcgatttgatgtccgagctgcacgtgagcgcaccatcgcagcagcttcttggagaacaaggtccccaatctttgtgttgtccatatccaccgtcttgagaccaacacattccttcattacagggagcattccactatcccctagattctcacaatagctcactgaaagatgctctagtgttgctgcacaaggggccttagctaggtgcttcgataagatgtcgtttgtgagctcagaaagatcttctaattcaaggagagtcagatgcggagttgaggcaagaatgggttccaatgcagcgtctgtcaacgatgtacatctgctgagttgtaagccttcaagttccggtacgaggtgaccaagaatttgaacgctatctgtggtcaactgagaacatcgactcaaatccaggtgccggagcttcctaggcggaacgatcggtctgttggtgaggatatcaatttcaggccggatccctcgaactatggtcttaaaggacgaatcagtaaggtccgcacagccactaaggactaaatgctcgagtctgtttgtttcgaatatagccttggccacctctaagctgtcaaaccccttaatttccccggcccgcaagtcctttagcttaggacatcccagaacaatcattttgacacctttcgcgtccatgtgcttgcaccaagacacgttgaggctctcgagctggggacaatgctgtgatataatcttgcaagtactattcgtgacagctgtcatacttgtcaagttcaggttggtcagcctctcattgcttcgtataagattgtgtagagtcggtcgctggaagttcctgcatccttctaaagacgcattgatcagattcttgcaggccgttacaagtatctctgcacgcttattgtgttcgatctggaggcacccacgaacattgagatccttaatgaacggacctgccgatgcgatgatcttggccagagactccgctggtatttcgctgtaaaagtcggatgcatcaaggcgcgtccacagctgtccatcaaagcagaacttgtggaactcatggtttacgcgggaagcacgaactagctcccttggcttgaggtaagagaatatttggattcgaatctcgtggggcatggcagccagaaattcgtgaaaggatttccttgcactgcctgacctggaccgcaacgtgacgacgtcggtagggagggacgcggtggtcggagaaagaggcaaaatggagacgttggcattcttgcgtggtgccaaaagggcgtcgacgccatcgagtgatggaaaatcaacacctggagtacctgggaaggacgactgtccgttaggaaagtatcccggtgggatacttcccgagaaagccggagcaaaagacgccggcgaggcgaggctcacacatgacaagctcgctcgacttccataaggggcacttgaagatcgagctcggccgatatgagccagcgatggcgtagatgatatgcgctgtattcctcggagtaacttctggcgtcgcttctcttttggtgctatctcaggtggtgtactagggcgtgagctgatgtctataggtgttgggggcgggcttgtctcggctgagacactgctcgacgaggaagccatttccgtgtaggaataatattgaatcgcctcgccgctggacttgttgagttattgaagaagggcgcgaaggcaaggtgctcgaagaactgacaccaatgaaatcaattgacgagcggtcccaattgagaccgaaatcaagagcaacgcaaagcttgaactgcaatggtctattcgcttaagatgaagtgcggggcagtgccgaagttgagatgttggagttggagatttctcccgtaaaagtcaatggccttcttgttctatggtaaattcaaacggtctgaatcaatggctaccgagacatgactctctgggccacggccaggcttacgctagaaagtacgcagaacgggcaacgttggtaaacgagtgtgtggccgaatttggtgagggagtgagccagacccgaaaagcaataatcgcgtaagtgaagcaaagtagctgagttcgctgaagagaagatgaaatcggccgggcgatttggtattattatgagacgaccaaaatcagctcagctcgggtatgtgatggtcgtctcgagggccagtccagtctcggcaaactaacgggtccccaacagacaggtgtctatggcctagttttgcgggacggtcagctcgggtacggcgtcgtactataagtatttgactcgcgggcctgcctgatgatcataagctaaatacacgcgaacaaccgagtagatctggcaccagaagctcggttcgggcatatataataatgactgcaatttagttcgatgaaaagacaagcagagaggtatcctgatttgagggttttggagtcccacacaacacaccaatgcttacaggcacgagacgacgtcgacctgagaaatagagtgtttagagtcgaattacaattggagaagattgatctagtcaatcgattctgaaaagtgttggttacaggacga

SEQ ID NO: 20498 - DNA, 1593 bp, Muscodor strobelii
  misc_feature: SGI cDNA ID NO. 566920
  misc_feature: Encodes the peptide sequence at SEQ ID NO 20499
atgtcttggctactttcttacatacccttccttcccacaccaaggccgctaccagcagttgtgccgacggatgaggttgtgccagtacatctgtttgataatacttcgactttacgaaaagtgataatggtctggtcattccgctttgaagaagtcctggaccctgaaaagttgaacgattccctatctcgactgtttcaaatggaaggatggcgcaaattaggaggtagattcagacgacgcccagacggcggcgtggagattcatatccccagaccgttctcagacgaccgatcaccagtgtatttcacaaaggaacatttcaatacaccaatgagtgaccatgatctagcatcacaactaccgcgggcatcagaaaatatctctatatttccggggccacgatacttcaacccgctgcatcttgggccaggttcggcgcgaagttgggatgactatatctatggtgacctgccacagtttgcactccacatcctgacatttacagacgggacaatcgtcactctaagccattcgcatgtgaccgcggatctgatcagctttgagactataatcaacgcatggagtctcgttctgaatggcaagccggaattggtgccaccattcacaccacttcatgaagatggtatggcaggattgctgggaccagcgaaagaaaatcatgtgctctctgggaaggagctcaatggctggagattggcgtattgggggttgtcgacattgtataattctagacgagtcggtctagaatcaaagcttgtctgtataccgaaaaagaggatggataagataatgtgggaatgcagaaaacaaattgagtcgaagattgatccagaaacgaaggtcatggagcctttcataagcgaaggggacgtgttaatcgccttgttaaatcaaatcacagcacagatggagaagcctggctcgacacgcaatctcatgacgatgatagctctcgatcctcgcaatcgcgtgccttcgctttttcgaccgaatactgccgtagtgcaaaattcgccgacggcaattttcttcaactttccctcggacaaagctctgacactgtctattggggaattggccttgctttcccgtgaggcaatcctaacacaagcgacagaggagcagatgaaagcctacagcgctatgtcggcggaaaacgtacgatcgagcgatatgaatgtgatgtttggcgataaggacatgtcgttccagctcatttcaaattggctcaaaggcaaactcatggacaagctggattgcactgctgcgattatcaaggaggcaccggaacgcacacaaggcagacgcggccatcccatctatttccatggcacggatccagattctatcgacagtgcccttcttattcctcttattgttgttatgaacaccgactacgatggcaataaatggctgtcttgtgttttgcctaaaaaagtatggagtgggttcctcgaggctcttgattcttttgctagtcctagctccagactacagcagaagtcagacgacgtggttaacaagtcatgttcttgtgtgtctatattgccaatgacttcgtgttcttga

SEQ ID NO: 20499 - protein, 530 aa, Muscodor strobelii
  misc_feature: SGI Peptide ID NO. 566920
  misc_feature (83)..(499): NCBI GI: 242815755 Blast Desc: aminoadipate-semialdehyde dehydrogenase, [Talaromyces stipitatus ATCC 10500] gi|218714971|gb|EED14394.1| aminoadipate-semialdehyde dehydrogenase, [Talaromyces stipitatus
  misc_feature (22)..(489): NCBI GI: 256728740 Blast Desc: NECHADRAFT_24373 [Nectria haematococca mpVI 77-13-4]
  misc_feature (8)..(484): NCBI GI: 256723332 Blast Desc: NECHADRAFT_86526 [Nectria haematococca mpVI 77-13-4]
  misc_feature (3)..(497): NCBI GI: 255956041 Blast Desc: Pc21g17770 [Penicillium chrysogenum Wisconsin 54-1255] gi|211590484|emb|CAP96674.1| Pc21g17770 [Penicillium chrysogenum Wisconsin 54-1255]
  misc_feature (18)..(501): NCBI GI: 256728735 Blast Desc: NECHADRAFT_50656 [Nectria haematococca mpVI 77-13-4]
  misc_feature (10)..(505): NCBI GI: 238506511 Blast Desc: conserved [Aspergillus flavus NRRL3357] gi|220689170|gb|EED45521.1| conserved [Aspergillus flavus NRRL3357]
  misc_feature (24)..(496): NCBI GI: 189200202 Blast Desc: conserved [Pyrenophora tritici-repentis Pt-1C-BFP] gi|187983537|gb|EDU49025.1| conserved [Pyrenophora tritici-repentis Pt-1C-BFP]
  misc_feature (41)..(489): NCBI GI: 256722366 Blast Desc: NECHADRAFT_94767 [Nectria haematococca mpVI 77-13-4]
  misc_feature (10)..(501): NCBI GI: 255950836 Blast Desc: Pc22g22910 [Penicillium chrysogenum Wisconsin 54-1255] gi|211593202|emb|CAP99579.1| Pc22g22910 [Penicillium chrysogenum Wisconsin 54-1255]
  misc_feature (12)..(500): NCBI GI: 121714889 Blast Desc: LysR family regulatory protein, [Aspergillus clavatus NRRL 1] gi|119403210|gb|EAW13628.1| LysR family regulatory protein, [Aspergillus clavatus NRRL 1]
MSWLLSYIPFLPTPRPLPAVVPTDEVVPVHLFDNTSTLRKVIMVWSFRFEEVLDPEKLNDSLSRLFQMEGWRKLGGRFRRRPDGGVEIHIPRPFSDDRSPVYFTKEHFNTPMSDHDLASQLPRASENISIFPGPRYFNPLHLGPGSARSWDDYIYGDLPQFALHILTFTDGTIVTLSHSHVTADLISFETIINAWSLVLNGKPELVPPFTPLHEDGMAGLLGPAKENHVLSGKELNGWRLAYWGLSTLYNSRRVGLESKLVCIPKKRMDKIMWECRKQIESKIDPETKVMEPFISEGDVLIALLNQITAQMEKPGSTRNLMTMIALDPRNRVPSLFRPNTAVVQNSPTAIFFNFPSDKALTLSIGELALLSREAILTQATEEQMKAYSAMSAENVRSSDMNVMFGDKDMSFQLISNWLKGKLMDKLDCTAAIIKEAPERTQGRRGHPIYFHGTDPDSIDSALLIPLIVVMNTDYDGNKWLSCVLPKKVWSGFLEALDSFASPSSRLQQKSDDVVNKSCSCVSILPMTSCS

SEQ ID NO: 20500 - DNA, 4575 bp, Muscodor strobelii
  misc_feature: SGI cDNA ID NO. 566921
  misc_feature: Encodes the peptide sequence at SEQ ID NO 20501
atgagcaaagccatcttgtcgaaacatgacatcgattcctcggacatattaaagatatcgaagcagtgcgatattgcagtggaccaaatagaagatgtatactcatgcacctctttgcaggaagccaccatcattgagtccgtaatacatgccggcgccagcgtgttccaattcctactcaatctcgctccagatgttgaccttgatcgtttctgtgttgccttacagaaagtagtttcactcaactcaattctacgtactcgatttgccgagtgtcagaatggctacgtccaggtcattgcgaaagaaactcaccatacgcagtggatagcgggtgttgtggatgagtatctgcgtttggacaaagcaaaaccattgagtctaggaatgccactgcttcgaaccgcaatctgcgatcgcaaactgatcgtcacggtccatcacggtatcatggatcatcggtcgttgacccctttgtttgaagatatactcagtatataccatgagagagaactgccgaaacgagtcgatttcaaggactttgtgatgaaatgcctaagtctggacgagtctgccgccaaagcgttctgggatggccgattcaaaggtgtgcctaccatctacccgagaacagaactaggctatgttcctctagccacgcagatgattaaacaggatatatcgacatgtcgagtcaacaaagatttttcacaggcacatattccttcatatatcgaggtggcttgggctttgactgcatctacatattgtggcaatgaaagtgttgcatttggtatggtactgtcaggctggacttctacatcagatgttgagactacgatgggtccaactatcgcagtaattcctgtacaagtggacttaaagcacaataccactcttgaaggaatcttgaaagacagtgcaaccgcccggcggcagcttcagacacacccggctttgcaatacgggttgaagaaggttcgtgctgtaagcgagtcggctcgcgtcgcgtcaggtttccaaactctgttaaacatccgaccacgctggtatgatcctaaagacgatgccgaaatctcatttgactcaatggacgaacctcatggcgcattcgcactatcggtctcctgcgatctcaatgacgatggtgtatcactcagagcggtattcgatccacaagtggttggtgaacaacagattcgtagagtgttgcaccaatttgagcactatcttcaatcacttatagtcgcacctcgctcgacaaaacttaatcaaataccgcgcctgaacgcctatgatctcagagagctcatcgggttgaacacgaagttgccccggaaagtgggcgttaaggcgagtattcatggtctcttcagtgccaaagctaaggaacttccctcgaggatggtaatcgatgctcacgacggcaagattacatattcggaattagacgacatcacgaaccgtcttgcacgagacttgcgggatcggggtgtcgccagcggagctgccgtggctgtgatcttcgaaaagtctttgtggataattgttgctgtacttggagttttgaaagctggcggcgtttgcgttcctatctcgatatctgatccaaaggatcggaggagcacaaaaatttcccaagcggatgccaaaatcattctcacttcgacggtgcagtatgaagattctgttggtctcgctccaaacgtttacgaaataagctcaaagactgtggcgtctttaccaaaagctgagtctcaaatggagtggacgactcctccggacagcctcgcatatattttatatacaagcggtagcacaggattacccaagggtgttatgctcgagcaccaaaacttgactactttgttggaatgttgcattcagtactttgattggttaccgaatactcgaattctgcagtttgctgcctatgtgtgggatatgagtattgcagaaatatggtgtgctttggtctctggctcctgtctttgtattccgtcggaagaagaccgtggatcggatcttacaggctacattgtcaataacgaagtcaattgtgcaattcttaccccgacagtcattcgaactctttcgcctatcgaactgcctaatctgaagtatctcatctcggctggagaagcagtttctcctgaagcatcgaagatttgggggaaagatcgacgtttctataacggatggggtccatgcgagtgctccttctttagctccattggggagctaaccccaagttcacggtattttgagagcattgggaaccctatcaataattctctatggatagtgaatccaaagaatgccgatgaacttgcgccaattggtgctataggtgaaatctacattgcgggtccgggtgttgctcggggctatctaaacgatgaaaccaagacgaagacagcctttgtcaagccacctgtttgggccccaacgagagagcaagacgcacccagattctatcgtacgggagacttggccaaatacaacgaagatgggagcatctgctttgttggtagacaagacactcaagtgaaaattcgaggtcaacgacttgaacttggagaggttgagagtgtagtgacgagctgtagcgacgtccgagatgccttcgttactaccaaaatatcacagggccggacggaactagttgctgttgtatgtctcgctgatcctgctctgccaagcgacgcagttctccaggaccttgcagataatttccatgcaactagtgctaaattgcttcgtgcaatccgtaattacacaagagccaagttaccaccatacatggttccaaccgtctggttgcccgttgaaaaactaccacagacgatatctgcgaagatcgaccgtcaagccattgtccagtatctgaagactaaaagtgtatcatctgcgagaactgcattggaagaaacgacagggcaattggtgacaccgcctcgcacagcaagtgagaaactgttatgttcaatatggtcgtcagttttatctctttcagcaccgagtgttggatgtgaaagctttttcatgcacctcggaggcgactcaattacggcaatgcaaatagtcagcagagctcgaaagcatggattgcggatttctatgcaatctttgttttcggacagtcttgcctccatcgccgagactacgatgagacatcagaatacaaatgatgcgatagcaccacatgacaacgctaaggcagaaagagacactactatcaagggagacgaaggtatcttgagcgagctcggccggctggcccagcctattgattcacaggatatccaagccatcgtacctgctacacacggacaagctacaatgattgaaataggcgagaccggaggtcgaggttattacatgaacttcaaccttgacttcgagcctagtctcgagaccagtcgccttcgaaaagcctgtaatcaggttcttcggaaccattcgatcctacgcacagttttcgttcgatgcaaatcgactatccaacaaatcgtcctcacgaacgcatttgtcgatatggtggttgaagaaataaattacacgcaaacactctcatttgaccaaggtagagctttagcatgttttcatttaatttctgacagccaaaattgtcaacgacttgtcctcgagatccatcacgctctctacgatgcgatttctctaggcctcatacttcgagatcttggtgcagcgtatgcccaagaaaccgtcaccgacggtccggactttcatacctggatctcacacatcaagacactcgataacatggcctcgaagaaattctggggcgagactttacaaggcagttcaatgccatacctggtaccagaagtagccgggggcctacgtgggtatccgcttgatgagcaagtacacgtccgaacttcgctgcagaacatcaaaacgagtttcgggacgccctcaagtgccgtcaaggcagcttggtctattctcatctctctagctctaaagacgcaagacgtcgtcttcggagaagttagcgcgaatcggtttctaccgtttccagatatcgagaaggtaaagggcccttgtgtcaaccaagtaccagtgagagcacgtctcagctcggaggcaactcttgcttcattaattgaacagattcaggatctttcggtgaacggcatgcccttccatcacctggaaactggcacaatcttggcagattgcagtccgtggccaaattgcgctcggttcagcactgcggtcgtttaccaaaatcatgactccattcctgaagcctttcgtattggagaggtgcgagtcaacatgtcggacgatggaaaactaggagacacaaccgacatccacgtcatcgcagtgccgcgatccgataccttggaagtagaacttcgctactcgtctcacgtgttcccttctgagcaaattcagtggatagctcagacccttggacacatcctggatgccttcccttcaagccttagcaagacactagacgagttggaaacggatattcgtagcaaggtgcatccatatacagtgccaaagaactcggccactcccgcatccctctga

SEQ ID NO: 20501 - protein, 1524 aa, Muscodor strobelii
  misc_feature: SGI Peptide ID NO. 566921
  misc_feature (479)..(877): Pfam Id: PF00501 Pfam Desc: AMP-binding enzyme
  misc_feature (30)..(295): Pfam Id: PF00668 Pfam Desc: Condensation domain
  misc_feature (1102)..(1369): Pfam Id: PF00668 Pfam Desc: Condensation domain
  misc_feature (992)..(1056): Pfam Id: PF00550 Pfam Desc: Phosphopantetheine attachment site
  misc_feature (1102)..(1242): Pfam Id: PF00668 Pfam Desc: Condensation domain
  misc_feature (30)..(216): Pfam Id: PF00668 Pfam Desc: Condensation domain
  misc_feature (248)..(295): Pfam Id: PF00668 Pfam Desc: Condensation domain
  misc_feature (1320)..(1369): Pfam Id: PF00668 Pfam Desc: Condensation domain
  misc_feature (992)..(1045): Pfam Id: PF00550 Pfam Desc: Phosphopantetheine attachment site
  misc_feature (5)..(1521): NCBI GI: 242815755 Blast Desc: aminoadipate-semialdehyde dehydrogenase, [Talaromyces stipitatus ATCC 10500] gi|218714971|gb|EED14394.1| aminoadipate-semialdehyde dehydrogenase, [Talaromyces stipitatus
  misc_feature (6)..(1074): NCBI GI: 169612726 Blast Desc: SNOG_09488 [Phaeosphaeria nodorum SN15] gi|111061633|gb|EAT82753.1| SNOG_09488 [Phaeosphaeria nodorum SN15]
  misc_feature (125)..(1338): NCBI GI: 115390498 Blast Desc: [Aspergillus terreus NIH2624] gi|114195150|gb|EAU36850.1| [Aspergillus terreus NIH2624]
  misc_feature (4)..(1511): NCBI GI: 238842426 Blast Desc: polyketide synthase [Microsporum canis CBS 113480]
  misc_feature (6)..(1469): NCBI GI: 115436950 Blast Desc: [Aspergillus terreus NIH2624] gi|114188501|gb|EAU30201.1| [Aspergillus terreus NIH2624]
  misc_feature (12)..(1471): NCBI GI: 238845960 Blast Desc: peptide synthetase [Microsporum canis CBS 113480]
  misc_feature (15)..(1471): NCBI GI: 169782552 Blast Desc: [Aspergillus oryzae RIB40] gi|83774482|dbj|BAE64605.1| protein product [Aspergillus oryzae]
  misc_feature (19)..(1509): NCBI GI: 121704124 Blast Desc: nonribosomal peptide synthase, [Aspergillus clavatus NRRL 1] gi|119398470|gb|EAW08900.1| nonribosomal peptide synthase, [Aspergillus clavatus NRRL 1]
  misc_feature (11)..(1483): NCBI GI: 59876531 Blast Desc: nonribosomal peptide synthetase 1 [Cochliobolus heterostrophus]
  misc_feature (12)..(1455): NCBI GI: 121710978 Blast Desc: nonribosomal peptide synthase, [Aspergillus clavatus NRRL 1] gi|119401255|gb|EAW11679.1| nonribosomal peptide synthase, [Aspergillus clavatus NRRL 1]
  misc_feature (28)..(1423): SWISSPROT Homolog: EC 5.1.1.11 Phenylalanine racemase (ATP-hydrolyzing)
MSKAILSKHDIDSSDILKISKQCDIAVDQIEDVYSCTSLQEATIIESVIHAGASVFQFLLNLAPDVDLDRFCVALQKVVSLNSILRTRFAECQNGYVQVIAKETHHTQWIAGVVDEYLRLDKAKPLSLGMPLLRTAICDRKLIVTVHHGIMDHRSLTPLFEDILSIYHERELPKRVDFKDFVMKCLSLDESAAKAFWDGRFKGVPTIYPRTELGYVPLATQMIKQDISTCRVNKDFSQAHIPSYIEVAWALTASTYCGNESVAFGMVLSGWTSTSDVETTMGPTIAVIPVQVDLKHNTTLEGILKDSATARRQLQTHPALQYGLKKVRAVSESARVASGFQTLLNIRPRWYDPKDDAEISFDSMDEPHGAFALSVSCDLNDDGVSLRAVFDPQVVGEQQIRRVLHQFEHYLQSLIVAPRSTKLNQIPRLNAYDLRELIGLNTKLPRKVGVKASIHGLFSAKAKELPSRMVIDAHDGKITYSELDDITNRLARDLRDRGVASGAAVAVIFEKSLWIIVAVLGVLKAGGVCVPISISDPKDRRSTKISQADAKIILTSTVQYEDSVGLAPNVYEISSKTVASLPKAESQMEWTTPPDSLAYILYTSGSTGLPKGVMLEHQNLTTLLECCIQYFDWLPNTRILQFAAYVWDMSIAEIWCALVSGSCLCIPSEEDRGSDLTGYIVNNEVNCAILTPTVIRTLSPIELPNLKYLISAGEAVSPEASKIWGKDRRFYNGWGPCECSFFSSIGELTPSSRYFESIGNPINNSLWIVNPKNADELAPIGAIGEIYIAGPGVARGYLNDETKTKTAFVKPPVWAPTREQDAPRFYRTGDLAKYNEDGSICFVGRQDTQVKIRGQRLELGEVESVVTSCSDVRDAFVTTKISQGRTELVAVVCLADPALPSDAVLQDLADNFHATSAKLLRAIRNYTRAKLPPYMVPTVWLPVEKLPQTISAKIDRQAIVQYLKTKSVSSARTALEETTGQLVTPPRTASEKLLCSIWSSVLSLSAPSVGCESFFMHLGGDSITAMQIVSRARKHGLRISMQSLFSDSLASIAETTMRHQNTNDAIAPHDNAKAERDTTIKGDEGILSELGRLAQPIDSQDIQAIVPATHGQATMIEIGETGGRGYYMNFNLDFEPSLETSRLRKACNQVLRNHSILRTVFVRCKSTIQQIVLTNAFVDMVVEEINYTQTLSFDQGRALACFHLISDSQNCQRLVLEIHHALYDAISLGLILRDLGAAYAQETVTDGPDFHTWISHIKTLDNMASKKFWGETLQGSSMPYLVPEVAGGLRGYPLDEQVHVRTSLQNIKTSFGTPSSAVKAAWSILISLALKTQDVVFGEVSANRFLPFPDIEKVKGPCVNQVPVRARLSSEATLASLIEQIQDLSVNGMPFHHLETGTILADCSPWPNCARFSTAVVYQNHDSIPEAFRIGEVRVNMSDDGKLGDTTDIHVIAVPRSDTLEVELRYSSHVFPSEQIQWIAQTLGHILDAFPSSLSKTLDELETDIRSKVHPYTVPKNSATPASL

SEQ ID NO: 20502 - DNA, 289 bp, Muscodor strobelii
  misc_feature: SGI EST ID NO. CUFF.48013.0
  misc_feature: Variant of the nucleotide sequence at SEQ ID NO 20500
cgtctatgaacttggaaaccaaaagtttgggtgcttgtactgtaacacatggttgagaaagttaatccctacgtggctatttagatacactacggcaattcacatctacaaaacggactctgtattgcctactcgaaagtagaataccgcaaacttctccagtcgcgaagatgagcaaagccatcttgtcgaaacatgacatcgattcctcggacatattaaagatatcgaagcagtgcgatattgcagtggaccaaatagaagatgtatactcatgcacctctttgca

SEQ ID NO: 20503 - DNA, 7530 bp, Muscodor strobelii
  misc_feature: SGI cDNA ID NO. 566922
  misc_feature: Encodes the peptide sequence at SEQ ID NO 20504
atgctgaagcgtactactatgctgatcgagagaagggcggcaccatcgccgcgcaggatccaatcactcctgactacaaactttttctttttagaccgtatccttctcgaatgcgcccttgaagctgtagagagtgcaggtatcagtctacaagatcttgcaggttcaaacacgggtgttttttctgcaataggtagcccagaacatggccacatgcttggtgaagatcttccggcttcggtgagcgacctccatcagcaaagactgccaaatctaatcatcgtagtcaccatggacttgccccggtggtgctccgactgtgagtattgtcacatcagtatgcctaaacgacagatgttcgcaaatagactatcctacttcttcgatcttaccggaccaagtgtagccctcgatgccgcatgtgctagtagtacatatgcgattcatattgcatgccagagcctccgttcaggtgaatgtagtgccgcattcgcaggcggctctgccttactgctggggcctggccaatggagtttcttagataccagtgatggggtaagtgaattgtgcttggttgctaggcctcgtaccagtccgatttacgttgatcttagtgcgctctcacccgagggtaagtcattttcatatgacgtgaaagcttccggctttggccgaggtgaaggagcagcatgtctgttgttgaagcgtgttgatgacgctatcgctgctggtgatcctattcacgcaataatccgacattccgcctgcaatcatggcggacgctctgatgggatcacgatgccaagtagatcggcccaggagaaattacttttacgtgttcaccgcgagattaggttgaatccgaaccagacgccggttgttgaaggtcatgggactggaacaaatgtcggtgacccgattgaagccggagctttcgcatccgtactggcgagcgaacggacaccagataatccactctatatcggatcattaaaatcaaactttggacatctagaaggtgccagcggcgctctcgccgttgtaaaggccattatgatgcttcagcgcggaaaaattcttccaaatgctaacttcgagaaactcaacccaaaaattgaggggggtgaaaagctgaagactactgacactggctatcaggttgtgcctactgaaactccatggccagcagacgagccgaggcgggcaatcgtgacaaactttggttttggtggaagcaacgccgcgattattctcgaggaggcaccgaaattaccaatcacaaatggggccgctcgtacaggcagaaacggtcatgtgaatggaatcgagcagtcgagcactgtgaatactttgagcagtagtttcgcaagcgatttaaatgggttttccacgggaaatggcggcaatggccagaggcataaggtgccaaagcgtttgttcgtgctctcagccaagtctgagagtagtgtagctgcctattcgtcttctttcctagagtacttggacaaggctccgaacaatgatcaattcatgagggatctctgcttcacgttaggacaacgtcgaacgcatcatcctcaccgtatcgcaatctctgccgattcttttgagactctcaaattgcagctctcctcagccaaatccaaaaggatcaaagatcgcgtgctcacctgggtatttacgggacaaggtgctcaatacgcaaagatggtctttgggctacagcggttcgagccatttaataatgcgattgatcaggcagaaaagtgcttattttcgctcggggcgcgctggtcattaaaggaggaactgggcaagtcagacgacactacgcgagtgaatgaagctcagattagccaacctgcttgcaccgccgtacagcttgcgttggtccaccttttgaggtcatggggcgttgagccagctcaagtgactggtcattcttcaggagagatcgctgccgcatatgcagcaagtttgatctcattcgatgcagcaattgcaattgcttatttcagaggccaatctactctccggctaaagcaagacaactcttacaaaggaggaatgctagcacttggaatgggaaaagtcgacgcagaggtcctcatccgagagatcagcgacggttatgcaacaattgctgctattaacagcccccaaagcgtgactatttctggagacgagtcggctgttgacaagatccagctgttagcaaactctcgaggggtcttcgctcgaaagctcagagttgatattgcttatcattctcatcacatgaactcagtcgctgcatcttatctggaatcgatcgaaccgttctgcaaagcagactctcccgatacaatatctcaccgacctgcttttctatcatctgttacaggtttcgtcatagattctaatactctacccgcatcgtattggattgacaatcttacaaagccagtcaatttcgaggcctcgatcaagaatgtattcgtcgcccggaaaggcacatcggcttctagactgccaacagtcattctcgaaattggaccgcactcctcgctttctggcccaattaaacaaaccgtcgactttatgcgtcaacacaacagcaatgaacaaaagccagatcagttcacctatgtcgcttctctaattcgtgatactgagcctgacgaggccatcctcaacctgtctagaaatctattttgcctgggtattcccatagaactctcaggcgtgaacttgacaaatcagcacaatgcccaagttctttccgatttacccgcatacgcctgggacagatctgggccttacattctcaggtctcgtatcacgcaggcaaaattgcacccaggccaaccgtatcatcctcttttaggatggaagagccccgataatgaagctggagatatctcttacagacaagttttcacgcttgatgagataccttggatcagagaccactgcgtcggcggcactgtcattttcccctttacaggctttgtagcccttgccctcgaggctgcaaggcggacaactccagtaccaccaaaacatatactcattcaagagtttcatgcaaagcgtagtttggagattgaggaagatgagcgtgttgatattgtcacaaagctgaaaccagcagcgatgggaactgagatgttttcttcggatatttggacgttcgaaatttcgacgtggtccactgagtacgggtggacagcgcattgccatggcagaatcgaagcgcaggcaagtgagctcacagtaaacactccagttgtcaaggcatctgcagcactactgaatagtgacaatgtccgagagcgcgatccatccctcgagtatatcccggatattgcagatggcacccattatggacctgctttcaaaagaatgatgaaattctgggaaggtcccgacttcaccgtaatggaaaccgaattgcgggacttagatttatcacagaagtccccatatggctcccttatatctgttgatgccccgacgttggactcatttctacaaggcttgggtccattcctcgagtatcatgggtcgaagaaacccgcattaatgccgaactatgtcagtcgcctgcgcatctcaaacgatatcccaatggtagaaaagcttcgacttcatgtcgttactcgccttcttgattacgatgttgttgctggtacaatacgtgtcagtgtggcaaccttcgacaagagcaccaaattccccgtcgcggaatgggaatcaatcacattccgggcaatagcgggagagagccaagactcgatgtctaatcttccagcaagctattactgggatttgatcccaagtctggatcatctgggcgacaacgagaagttaagagatattcttgaggttagaccagctgacgaagatgaatataaccgtgtgaagcggttgaacaaagttgctgttcacttcatggatcaagccctacgaggaacagcagaagatgacctttcacaactcccttcgcatctcgcttgtttcaggaaatgggcggagatggtagttgagaaacacagcgacttactatccaatatcgatattcccgcattagtatcacaagtagccaaatcaggaggacaaggcgccatggtctgtgccgttggcgagcaactcatcagcattctccggggagaaatccagccattagaaataatgctcaaagacaaccggctcgacaaatactacgaggatgacatgacgaatgcgagacttagttggattctggcgagatgggtgcgccacttggccgatgtcaagttcgatctccgggtcttggagataggcgccggaacgggttcagctactctagccgtttttcaagaactttctcgaggcgaagagagattaccggataactttacctatacttatacggacatatctgctggcttctttgagaaagctcgtgaaaaactgtccaaatggcagaagaacatcacattcaagaggcttgatattagccaagaccctgttcagcaaggcttttctcctgaagactacgacctcgttattgcatcaaattgcttgcatgcgacgcctaacatgaccgccactattgatcactccttcctattacataaattcctaaaacacctactaacttcccgtaatcgcaatatcgaggaggggcctctgctttctgccgaaggctggagccgtttgctggtcgatcgaggcttctctgggctggacggggtcatttcagggtatcctaacgaccccgaaaatattctcaacgtgattacaacaactagagtcggtaaaatggaagaccgcgacaacacagcgccaatcaccatttgtgggccacttgttgatgacgaagaagcagagttcgcacagactgttgcagacatgcttagcgagcagcatggatgcgaagtatttgtgaagcctttcgcagaattgaatgtggaggatgatccgtattgtgtcttcatcgactctcctcggcacagcatcttcagagacttctcatccgaaacatttgaactgctgaaagatgttcttcttaggatagacggtctgctatgggtcatacctgaaaatcatcttcccgattgcgatacaatcaagggtttgctgcgaacagtccgtctcgagaatggatccagaaccatgttcatgttggaaaatgttccaatcagtgtagatggggcatcttctattgtacagcaaatagcacgactacgagatccggaactagctaaatctgctgacatggactttacatggaaagaaggtactttatatctacctcgttaccgagcgctaaccgcagctaaagaagtcttcgcatcggaagtgggtgctaccttcaaaaaggatcagagtttctggcaagaaaacacatccttcgagatgactgttgacaatgctgggagccctgacgcgatatatttcaagagaacggatatcctcgagcagccagtaaaggacgatgaagtcttgattaaagttgaggctgcgggaattaacttccgtgacgttctcctcgtgcttggctcaattccctggacccgtccgggatttgaaggcgctggcgtcgttcataagatcggttcgaaagtgctcgacttaaaagagggcgacagagtattctacggcgctctcgaagcaggagcaattgcgacgcatgtcaagctaccggcttatatggcttgcaaaatcccagcagaatttagtagtgcagaagctgcaggcatctcagtggcatattctacggcgatcatgtcactaattgatgttgggcggctgcaaaaaggcgagagcattctgatccacgcggcgtctggtgcggtcggccaggcgagtattgtcctcgcacaggatatcggggctgaagtctttgtgactgctggctctgataagaagagagacttcctccatgacacattcttcctgccagaagatcacattttttcatcaaggacccctgaattccgagacgggatccttgcagccactgatgggaagggagttgatgtgatcataaactcattgagtggcagtctcctgcaagagacatgggcagtgatcgcagacttcggccggtttgtcgaaatcggcaaaagagaccttctacagaatagctacctaggcatgaggccattcgatcgcaatgtgacatttagcggcgtagacttacgaacacggtttctgagtcgaccacaagatcacaaagcctgtcttaaaggacttatggagctgcttgaacggagagtggttcgtcctattcgaccagtgaatacctatcctatctctcaattagctacgggtatgcgtaagcttcagtctggtcagaacattgggaagatcattgtcactatggacgccgaagagaaggtcatgggcgaggggccaccgcttctcgccactgcttccgaaggtttcttgcgtcacgatgtgacttatatcattaccggaggtacaggtgggattggcctctcaatcgtaccatggatggttgagaacggggcacgcaacatagttctgcttggtcgtagcggagcaactcgtccagaggttcaaaagatgttggaaaaattcgagggcagcgatgtcattgttcgggccattgcttgcgatgttggccgccgagaagatgtaataaatgccctcagggtgatcgaagatcttccagttgttggtggtgtgatgcatagcgctctttttcttaaggataaattgtgggagaataccacttatgaagactggctgaatattgtgacacctcgcaatcaaggggcatggaatctgcacgaactgcttcctgacaatatggatttctttgttgcgctttcttcattcatttcaggtgttggaaacgtcggccagcctgtgtactctggcacagcctccttttacgacagttttgcagaataccgcaactctcttggtcagccgacagtatccattgcgttacccgtagtcttgggcgtcggctacgtagccgatcgcaacttagaggcgtccctatcgggctctctcggggctgttttgtcggaaacccatctccgaaccgtgattaaaggtgcaatgattggcgggtcatccggcatcaaccgtgatggaaaagctatatcatacacatacgcgcaaggcgatgagagtagtacgctaccttggcagtgttatcatccaagagcccttgtcgagtatattcgaaacgagtcgcgaatgaaaggggttatcgaggacgcacgaggtggtcccacgcgatccaagacccttcagatcagtaacgccagcgatccgcttcaatttttactagagatactcatggacaaggtatcctccatcaccatgatcgagagagacgagatcgaggcagaggcacctctttcgaattacagtctggattctttggtttccgtcgagcttcgcaattggattcgaagagaaacgacggtggatttgccgctgtctaaaatcgtaagctccgggaatttgaaggctctagcaacctacattctttcgcaaagagaagcggttgtgaagggcaaatga

SEQ ID NO: 20504 - protein, 2509 aa, Muscodor strobelii
  misc_feature: SGI Peptide ID NO. 566922
  misc_feature (557)..(904): Pfam Id: PF00698 Pfam Desc: Acyl transferase domain
  misc_feature (1820)..(1897): Pfam Id: PF08240 Pfam Desc: Alcohol dehydrogenase GroES-like domain
  misc_feature (2143)..(2308): Pfam Id: PF00106 Pfam Desc: short chain dehydrogenase
  misc_feature (1928)..(2076): Pfam Id: PF00107 Pfam Desc: Zinc-binding dehydrogenase
  misc_feature (10)..(240): Pfam Id: PF00109 Pfam Desc: Beta-ketoacyl synthase, N-terminal domain
  misc_feature (248)..(366): Pfam Id: PF02801 Pfam Desc: Beta-ketoacyl synthase, C-terminal domain
  misc_feature (2143)..(2321): Pfam Id: PF08659 Pfam Desc: KR domain
  misc_feature (1432)..(1546): Pfam Id: PF08242 Pfam Desc: Methyltransferase domain
  misc_feature (620)..(764): Pfam Id: PF00698 Pfam Desc: Acyl transferase domain
  misc_feature (788)..(904): Pfam Id: PF00698 Pfam Desc: Acyl transferase domain
  misc_feature (119)..(181): Pfam Id: PF00109 Pfam Desc: Beta-ketoacyl synthase, N-terminal domain
  misc_feature (206)..(240): Pfam Id: PF00109 Pfam Desc: Beta-ketoacyl synthase, N-terminal domain
  misc_feature (33)..(66): Pfam Id: PF00109 Pfam Desc: Beta-ketoacyl synthase, N-terminal domain
  misc_feature (2144)..(2321): Pfam Id: PF08659 Pfam Desc: KR domain
  misc_feature (1432)..(1528): Pfam Id: PF08242 Pfam Desc: Methyltransferase domain
  misc_feature (2432)..(2498): Pfam Id: PF00550 Pfam Desc: Phosphopantetheine attachment site
  misc_feature (33)..(2509): NCBI GI: 242815750 Blast Desc: polyketide synthase, [Talaromyces stipitatus ATCC 10500] gi|218714970|gb|EED14393.1| polyketide synthase, [Talaromyces stipitatus ATCC 10500]
  misc_feature (33)..(2504): NCBI GI: 169603718 Blast Desc: SNOG_04868 [Phaeosphaeria nodorum SN15] gi|160706442|gb|EAT87259.2| SNOG_04868 [Phaeosphaeria nodorum SN15]
  misc_feature (33)..(2507): NCBI GI: 171679946 Blast Desc: protein product [Podospora anserina] gi|170939599|emb|CAP64826.1| protein product [Podospora anserina]
  misc_feature (30)..(2505): NCBI GI: 238842426 Blast Desc: polyketide synthase [Microsporum canis CBS 113480]
  misc_feature (33)..(2505): NCBI GI: 225679591 Blast Desc: fatty acid synthase S-acetyltransferase [Paracoccidioides brasiliensis Pb03]
  misc_feature (33)..(2505): NCBI GI: 226291323 Blast Desc: 6-methylsalicylic acid synthase [Paracoccidioides brasiliensis Pb18]
  misc_feature (33)..(2498): NCBI GI: 121704114 Blast Desc: polyketide synthase, [Aspergillus clavatus NRRL 1] gi|119398465|gb|EAW08895.1| polyketide synthase, [Aspergillus clavatus NRRL 1]
  misc_feature (900)..(2501): NCBI GI: 115390494 Blast Desc: ATEG_03574 [Aspergillus terreus NIH2624] gi|114195148|gb|EAU36848.1| ATEG_03574 [Aspergillus terreus NIH2624]
  misc_feature (33)..(2502): NCBI GI: 145241724 Blast Desc: An09g01930 [Aspergillus niger] gi|134078048|emb|CAK40131.1| protein product [Aspergillus niger]
  misc_feature (33)..(2501): NCBI GI: 169780154 Blast Desc: [Aspergillus oryzae RIB40] gi|83773281|dbj|BAE63408.1| protein product [Aspergillus oryzae]
  misc_feature (33)..(1763): SWISSPROT Homolog: EC 2.3.1.161 Lovastatin nonaketide synthase
  misc_feature: Useful for fungicidal and/or biocontrol applications
MLKRTTMLIERRAAPSPRRIQSLLTTNFFFLDRILLECALEAVESAGISLQDLAGSNTGVFSAIGSPEHGHMLGEDLPASVSDLHQQRLPNLIIVVTMDLPRWCSDCEYCHISMPKRQMFANRLSYFFDLTGPSVALDAACASSTYAIHIACQSLRSGECSAAFAGGSALLLGPGQWSFLDTSDGVSELCLVARPRTSPIYVDLSALSPEGKSFSYDVKASGFGRGEGAACLLLKRVDDAIAAGDPIHAIIRHSACNHGGRSDGITMPSRSAQEKLLLRVHREIRLNPNQTPVVEGHGTGTNVGDPIEAGAFASVLASERTPDNPLYIGSLKSNFGHLEGASGALAVVKAIMMLQRGKILPNANFEKLNPKIEGGEKLKTTDTGYQVVPTETPWPADEPRRAIVTNFGFGGSNAAIILEEAPKLPITNGAARTGRNGHVNGIEQSSTVNTLSSSFASDLNGFSTGNGGNGQRHKVPKRLFVLSAKSESSVAAYSSSFLEYLDKAPNNDQFMRDLCFTLGQRRTHHPHRIAISADSFETLKLQLSSAKSKRIKDRVLTWVFTGQGAQYAKMVFGLQRFEPFNNAIDQAEKCLFSLGARWSLKEELGKSDDTTRVNEAQISQPACTAVQLALVHLLRSWGVEPAQVTGHSSGEIAAAYAASLISFDAAIAIAYFRGQSTLRLKQDNSYKGGMLALGMGKVDAEVLIREISDGYATIAAINSPQSVTISGDESAVDKIQLLANSRGVFARKLRVDIAYHSHHMNSVAASYLESIEPFCKADSPDTISHRPAFLSSVTGFVIDSNTLPASYWIDNLTKPVNFEASIKNVFVARKGTSASRLPTVILEIGPHSSLSGPIKQTVDFMRQHNSNEQKPDQFTYVASLIRDTEPDEAILNLSRNLFCLGIPIELSGVNLTNQHNAQVLSDLPAYAWDRSGPYILRSRITQAKLHPGQPYHPLLGWKSPDNEAGDISYRQVFTLDEIPWIRDHCVGGTVIFPFTGFVALALEAARRTTPVPPKHILIQEFHAKRSLEIEEDERVDIVTKLKPAAMGTEMFSSDIWTFEISTWSTEYGWTAHCHGRIEAQASELTVNTPVVKASAALLNSDNVRERDPSLEYIPDIADGTHYGPAFKRMMKFWEGPDFTVMETELRDLDLSQKSPYGSLISVDAPTLDSFLQGLGPFLEYHGSKKPALMPNYVSRLRISNDIPMVEKLRLHVVTRLLDYDVVAGTIRVSVATFDKSTKFPVAEWESITFRAIAGESQDSMSNLPASYYWDLIPSLDHLGDNEKLRDILEVRPADEDEYNRVKRLNKVAVHFMDQALRGTAEDDLSQLPSHLACFRKWAEMVVEKHSDLLSNIDIPALVSQVAKSGGQGAMVCAVGEQLISILRGEIQPLEIMLKDNRLDKYYEDDMTNARLSWILARWVRHLADVKFDLRVLEIGAGTGSATLAVFQELSRGEERLPDNFTYTYTDISAGFFEKAREKLSKWQKNITFKRLDISQDPVQQGFSPEDYDLVIASNCLHATPNMTATIDHSFLLHKFLKHLLTSRNRNIEEGPLLSAEGWSRLLVDRGFSGLDGVISGYPNDPENILNVITTTRVGKMEDRDNTAPITICGPLVDDEEAEFAQTVADMLSEQHGCEVFVKPFAELNVEDDPYCVFIDSPRHSIFRDFSSETFELLKDVLLRIDGLLWVIPENHLPDCDTIKGLLRTVRLENGSRTMFMLENVPISVDGASSIVQQIARLRDPELAKSADMDFTWKEGTLYLPRYRALTAAKEVFASEVGATFKKDQSFWQENTSFEMTVDNAGSPDAIYFKRTDILEQPVKDDEVLIKVEAAGINFRDVLLVLGSIPWTRPGFEGAGVVHKIGSKVLDLKEGDRVFYGALEAGAIATHVKLPAYMACKIPAEFSSAEAAGISVAYSTAIMSLIDVGRLQKGESILIHAASGAVGQASIVLAQDIGAEVFVTAGSDKKRDFLHDTFFLPEDHIFSSRTPEFRDGILAATDGKGVDVIINSLSGSLLQETWAVIADFGRFVEIGKRDLLQNSYLGMRPFDRNVTFSGVDLRTRFLSRPQDHKACLKGLMELLERRVVRPIRPVNTYPISQLATGMRKLQSGQNIGKIIVTMDAEEKVMGEGPPLLATASEGFLRHDVTYIITGGTGGIGLSIVPWMVENGARNIVLLGRSGATRPEVQKMLEKFEGSDVIVRAIACDVGRREDVINALRVIEDLPVVGGVMHSALFLKDKLWENTTYEDWLNIVTPRNQGAWNLHELLPDNMDFFVALSSFISGVGNVGQPVYSGTASFYDSFAEYRNSLGQPTVSIALPVVLGVGYVADRNLEASLSGSLGAVLSETHLRTVIKGAMIGGSSGINRDGKAISYTYAQGDESSTLPWQCYHPRALVEYIRNESRMKGVIEDARGGPTRSKTLQISNASDPLQFLLEILMDKVSSITMIERDEIEAEAPLSNYSLDSLVSVELRNWIRRETTVDLPLSKIVSSGNLKALATYILSQREAVVKGK

SEQ ID NO: 20505 - DNA, 1224 bp, Muscodor strobelii
  misc_feature: SGI cDNA ID NO. 566923
  misc_feature: Encodes the peptide sequence at SEQ ID NO 20506
atgaacaagcttcaacccagagttctgaatcagccagatgtcagcaagattccaactccgccgttgcaggccgttgcgctgttcctcaacttcttctttccggctctatctgtcttggtagtttctctcagagtctataccagaatatggatgcggcaagtggcaatagacgattatctgttgcttgttgcacttctctcggcgctgctaatggtcgccccgttctacttatacctcaagcttgaatatttcggttggcacgcggtcgatgtgccgatgtttgatcccgcacccggattctggtggttttatcttgcccaaatcttctataaccccgttttagctttatgcaaggcttctatcctggtttttctcctccggttaggaggtcataagcgaaacgtacgatatgccatttatggcttgttgactttcaatggactccaggctgtggctgttttcttcgttgcggtattccaatgtatacccatagccgcgaattgggatggagctgttgcagcacacgcgaaatgcgtggaccattcttttcacgtcatcacgtcatcacttacagtcctgaccgatattcttgtcttggtcatccctttctggattttcttgggcttgaaactacctcttgcagcacgacttgctgtgatcggcacgtttctcacaggtctgggagtaacggtcatctcaatcgtgcgaacgtacgatatttacgtacttttcttcgtgccccccgatcctcacgccgatccgtaccacaacatccaagttctactcaacgtagttgaaatcaatctcgcaattgtttcggcatctgtcccggctctgcggcctctaatgcgccgatggttcccacgtctgttcggaggaagcacaaacaaggataccaacggaaactatatctatggctcaaacaagaaatatggaaaaggcacattcggtcgtggaggagcacaccacggagggagcggattagcatatggccacggtggcattgcattgaagagcctaagtcgcagtgacagaatggcacatacggaggtgcgaagcacgagtccgtcgggcagcgaagaagagatcatgacttcgaatggcatcatgcgaaccacagatgttcgtgtacaatacgaccatgaccaacaatggcaaaagtcattgtctcgatcctcaagcgactacaagttggacaaggaaacagcgccccgagcattgtga

SEQ ID NO: 20506 - protein, 407 aa, Muscodor strobelii
  misc_feature: SGI Peptide ID NO. 566923
  misc_feature (6)..(384): NCBI GI: 116197242 Blast Desc: CHGG_05219 [Chaetomium globosum CBS 148.51] gi|88181132|gb|EAQ88600.1| CHGG_05219 [Chaetomium globosum CBS 148.51]
  misc_feature (4)..(397): NCBI GI: 171676642 Blast Desc: protein product [Podospora anserina] gi|170936388|emb|CAP61045.1| protein product [Podospora anserina]
  misc_feature (12)..(401): NCBI GI: 256728289 Blast Desc: NECHADRAFT_87571 [Nectria haematococca mpVI 77-13-4]
  misc_feature (13)..(406): NCBI GI: 256726624 Blast Desc: NECHADRAFT_33527 [Nectria haematococca mpVI 77-13-4]
  misc_feature (12)..(396): NCBI GI: 256727897 Blast Desc: NECHADRAFT_83482 [Nectria haematococca mpVI 77-13-4]
  misc_feature (14)..(375): NCBI GI: 256724573 Blast Desc: NECHADRAFT_15726 [Nectria haematococca mpVI 77-13-4]
  misc_feature (14)..(406): NCBI GI: 256731118 Blast Desc: NECHADRAFT_85038 [Nectria haematococca mpVI 77-13-4]
  misc_feature (76)..(381): NCBI GI: 256731403 Blast Desc: NECHADRAFT_84827 [Nectria haematococca mpVI 77-13-4]
  misc_feature (22)..(393): NCBI GI: 154302889 Blast Desc: BC1G_09188 [Botryotinia fuckeliana B05.10] gi|150855112|gb|EDN30304.1| BC1G_09188 [Botryotinia fuckeliana B05.10]
  misc_feature (8)..(381): NCBI GI: 171686420 Blast Desc: protein product [Podospora anserina] gi|170943171|emb|CAP68824.1| protein product [Podospora anserina]
MNKLQPRVLNQPDVSKIPTPPLQAVALFLNFFFPALSVLVVSLRVYTRIWMRQVAIDDYLLLVALLSALLMVAPFYLYLKLEYFGWHAVDVPMFDPAPGFWWFYLAQIFYNPVLALCKASILVFLLRLGGHKRNVRYAIYGLLTFNGLQAVAVFFVAVFQCIPIAANWDGAVAAHAKCVDHSFHVITSSLTVLTDILVLVIPFWIFLGLKLPLAARLAVIGTFLTGLGVTVISIVRTYDIYVLFFVPPDPHADPYHNIQVLLNVVEINLAIVSASVPALRPLMRRWFPRLFGGSTNKDTNGNYIYGSNKKYGKGTFGRGGAHHGGSGLAYGHGGIALKSLSRSDRMAHTEVRSTSPSGSEEEIMTSNGIMRTTDVRVQYDHDQQWQKSLSRSSSDYKLDKETAPRAL

SEQ ID NO: 20507 - DNA, 1938 bp, Muscodor strobelii
  misc_feature: SGI cDNA ID NO. 566924
  misc_feature: Encodes the peptide sequence at SEQ ID NO 20508
atggctgtattacgcaaggcgctgctcgctgctggcgcgctcacgagcctagctgcggcccaaactctctatcaagatgggcaggttgtctcggccaacgaagacacagtcgctcctgcggcggagaatgtcgatggccagcttattctcaccgatggtgtccttgaaaacttgggaagcatggaattgagtaacatctctctcttcagctttcctgacaataactcgaccacgaatgagaagagagcggtagcaactaagtgcaagacttttcccggcgatctattatggccttcaaagattgtctggaaagtattcgatcttctcactggtggtggcttgatcaagactgtccccattggagctgcatgctacccagacagtgagcattatgatgcagagcgatgctcatatattctcgataattggcacgagtccttaactcatgcttctgatccaacctcggccatgtcgcctcttttccagggaaagacttgtatgcccgagaacggcaacacaagcacctgcgagctaggtggcttccccagctacgccgtaaacatatccactcctgctcaggtccagctggccatcaactttgcacgaaatacggggattcgcttggtagtcaagaatactggtcacgattttctcggcaagagtgtcggggccggagctctttcgatctggacacacaatttaaaggatatcgaatttattgagcattacacaggctctggctatgttggcaaagccatgaagattggtgccggtgttgaggtcggcgagttatacgctgccgctgacaagtatggtgtttctgctgttggtggtgagtgtaagggtgtcggtgttgcgggtggctatacagcaggtggtggccactcgcctctgtccggtctttacggcatgggtgccgatcaagtgctcagcatcgatatcgtgctgcccgacggtcgcttcgtcactgctgataagacacattattctgacgtgttctgggctgcccgaggaggtggtggtggtacatttggtgttgtgataagcatgactgtcagagtacacccaaagatgacattctccggcctgactttctatgtcactaccggaaacgattctatcgctaacacaactactgagtcgttcatagacgcaattgacctttactggcgcaagtttcccgaatatgctgcgttgggtcattacggttattcaagtgtatatccccgctttgatggcggatctggatatacttgggaattccacccctggcttgcacccggctcgagtttgactgaattcaagaagcaagtcgcacctctcttggatgagtggaaggctgtcggtttcaatgtcgagccggacttctgggagtatgataacttatttgaaccttggagtcaacatttccccaccgaatttgttgcaaatgcagatcttcgaacgggctctcgtcttgtaccggccacgcaattcgagaataacaccattgatgagacgattgcaatcttcaagaccgctatgacacggtcggctctcatcatgtacaatatgaatcccaagaagccggaaggcgttgacaatgccgtcaaccctgcatggcgtgatagtctgttctacgtcatcctcggatctggttggaccgatgattccactcccgctgagatccaagcggccaacgaagcgatcaccaacccaagtctctcggacctcgactccgtctccaccggcagctatctcaacgaagccgatgttgctgagccaaaatggcagcagatgttctggggcgacaattacaatcgcctactcaagattaagaagcagcttgatccctgggacacgttctgggcacccaccgctgttggtagtgagggttggtatgtgactggccaggagtcttggctgccgacgcagaatggtcgcttgtgcaggaaatag

SEQ ID NO: 20508 - protein, 645 aa, Muscodor strobelii
  misc_feature: SGI Peptide ID NO. 566924
  misc_feature (578)..(622): Pfam Id: PF08031 Pfam Desc: Berberine and berberine like
  misc_feature (182)..(325): Pfam Id: PF01565 Pfam Desc: FAD binding domain
  misc_feature (1)..(645): NCBI GI: 238484567 Blast Desc: restculine oxidase precursor, [Aspergillus flavus NRRL3357] gi|220701572|gb|EED57910.1| restculine oxidase precursor, [Aspergillus flavus NRRL3357]
  misc_feature (1)..(645): NCBI GI: 169767658 Blast Desc: [Aspergillus oryzae RIB40] gi|83766155|dbj|BAE56298.1| protein product [Aspergillus oryzae]
  misc_feature (4)..(644): NCBI GI: 171676640 Blast Desc: protein product [Podospora anserina] gi|170936387|emb|CAP61044.1| protein product [Podospora anserina]
  misc_feature (4)..(644): NCBI GI: 116197240 Blast Desc: CHGG_05218 [Chaetomium globosum CBS 148.51] gi|88181131|gb|EAQ88599.1| CHGG_05218 [Chaetomium globosum CBS 148.51]
  misc_feature (14)..(645): NCBI GI: 256727201 Blast Desc: NECHADRAFT_33775 [Nectria haematococca mpVI 77-13-4]
  misc_feature (14)..(645): NCBI GI: 85109306 Blast Desc: NCU07619 [Neurospora crassa OR74A] gi|28924492|gb|EAA33617.1| conserved [Neurospora crassa OR74A]
  misc_feature (21)..(645): NCBI GI: 256728108 Blast Desc: [Nectria haematococca mpVI 77-13-4]
  misc_feature (12)..(645): NCBI GI: 46114930 Blast Desc: FG03307.1 [Gibberella zeae PH-1]
  misc_feature (20)..(645): NCBI GI: 256728058 Blast Desc: NECHADRAFT_46056 [Nectria haematococca mpVI 77-13-4]
  misc_feature (52)..(645): NCBI GI: 171682826 Blast Desc: protein product [Podospora anserina] gi|170941372|emb|CAP67022.1| protein product [Podospora anserina]
MAVLRKALLAAGALTSLAAAQTLYQDGQVVSANEDTVAPAAENVDGQLILTDGVLENLGSMELSNISLFSFPDNNSTTNEKRAVATKCKTFPGDLLWPSKIVWKVFDLLTGGGLIKTVPIGAACYPDSEHYDAERCSYILDNWHESLTHASDPTSAMSPLFQGKTCMPENGNTSTCELGGFPSYAVNISTPAQVQLAINFARNTGIRLVVKNTGHDFLGKSVGAGALSIWTHNLKDIEFIEHYTGSGYVGKAMKIGAGVEVGELYAAADKYGVSAVGGECKGVGVAGGYTAGGGHSPLSGLYGMGADQVLSIDIVLPDGRFVTADKTHYSDVFWAARGGGGGTFGVVISMTVRVHPKMTFSGLTFYVTTGNDSIANTTTESFIDAIDLYWRKFPEYAALGHYGYSSVYPRFDGGSGYTWEFHPWLAPGSSLTEFKKQVAPLLDEWKAVGFNVEPDFWEYDNLFEPWSQHFPTEFVANADLRTGSRLVPATQFENNTIDETIAIFKTAMTRSALIMYNMNPKKPEGVDNAVNPAWRDSLFYVILGSGWTDDSTPAEIQAANEAITNPSLSDLDSVSTGSYLNEADVAEPKWQQMFWGDNYNRLLKIKKQLDPWDTFWAPTAVGSEGWYVTGQESWLPTQNGRLCRK

SEQ ID NO: 20509 - DNA, 3425 bp, Muscodor strobelii
  misc_feature: SGI EST ID NO. CUFF.48058.0
  misc_feature: Variant of the nucleotide sequence at SEQ ID NO 20507
cgtcgttccggaggatgagctaagaacgaggctatccgaattcgcaccaatactagcggcggaactcatacttagatcgagaagtgccaagatagaccagtctatcattgctgtggctcgctcaaagctgcatgcaaataccatgttcagtgtgaaccatcgatctgactcaatgcttccagcgccgtggtagtatgcactgaacacaaacgcagtgtctgcgaattgctctgatactgtacacaagtgcttctgtgcctgagttacgtgtgagcctcggatatcagcgaacgtgcgagtattggtgaagttttgccggcatatcgagcaaatgcaggttctgcatccaactgcatccgcctgcagagccgacagctagctgcattgcctaacacgtatgtagtaatgtgcgcgagtctcgaaacagaatttgccagactatctgtcagcgtgccaaggctcctttccgagtctgttgttgatgttgtcgagacgcctgaaaggagtattaaagcaccgggtgtctatcattttagaaattcctagcagcccgaagttgatgtattcaccatgattcaaaacagcttgttataccgacctatgtgttgaggcattgcagcaggccgcaacaggagccggatgtgtcaggaagtgttgttggacatgcgctagttcgatctaagttgtagagtaaatcaatgggttggaggaagagagcagataaggcaatcgcctcattgccccctcatgttatgggacatttctcagaaatgcatctgccgttggcttttgccatcgccataagtctcgcgaggtgctcgtacttagcgaggtgggtggaggtgaggtggatgatcagaggggatatgggtggatgtggcaattaattaccggtgaattgggcggccagtatcttggcgaggtaacatggttcgcatgggccaccgttccctcattgcaacttatttcatgcgtttcttggggtccttcctctgcccctctttaggaaataacacagaataacgatccataatgcgcgatatgcatcgggacattgcaatttaccgtggggagcgtgggcatttgcagagtctagccttgatgatggattgcccgcatattccccacgtgggaacacgcctcgccacgttgcttggctatatctggtttcttttccctacgcttcatgttgctttcacgtctctcgctactccagattattctctcttcatactcgtgactggtcgacaagcccttcctttaccttgttgaactccacgattgctgccgtattagtgggatggctgtattacgcaaggcgctgctcgctgctggcgcgctcacgagcctagctgcggcccaaactctctatcaagatgggcaggttgtctcggccaacgaagacacagtcgctcctgcggcggagaatgtcgatggccagcttattctcaccgatggtgtccttgaaaacttgggaagcatggaattgagtaacatctctctcttcagctttcctgacaataactcgaccacgaatgagaagagagcggtagcaactaagtgcaagacttttcccggcgatctattatggccttcaaagattgtctggaaagtattcgatcttctcactggtggtggcttgatcaagactgtccccattggagctgcatgctacccagacagtgagcattatgatgcagagcgatgctcatatattctcgataattggcacgagtccttaactcatgcttctgatccaacctcggccatgtcgcctcttttccagggaaagacttgtatgcccgagaacggcaacacaagcacctgcgagctaggtggcttccccagctacgccgtaaacatatccactcctgctcaggtccagctggccatcaactttgcacgaaatacggggattcgcttggtagtcaagaatactggtcacgattttctcggcaagagtgtcggggccggagctctttcgatctggacacacaatttaaaggatatcgaatttattgagcattacacaggctctggctatgttggcaaagccatgaagattggtgccggtgttgaggtcggcgagttatacgctgccgctgacaagtatggtgtttctgctgttggtggtgagtgtaagggtgtcggtgttgcgggtggctatacagcaggtggtggccactcgcctctgtccggtctttacggcatgggtgccgatcaagtgctcagcatcgatatcgtgctgcccgacggtcgcttcgtcactgctgataagacacattattctgacgtgttctgggctgcccgaggaggtggtggtggtacatttggtgttgtgataagcatgactgtcagagtacacccaaagatgacattctccggcctgactttctatgtcactaccggaaacgattctatcgctaacacaactactgagtcgttcatagacgcaattgacctttactggcgcaagtttcccgaatatgctgcgttgggtcattacggttattcaagtgtatatccccgctttgatggcggatctggatatacttgggaattccacccctggcttgcacccggctcgagtttgactgaattcaagaagcaagtcgcacctctcttggatgagtggaaggctgtcggtttcaatgtcgagccggacttctgggagtatgataacttatttgaaccttggagtcaacatttccccaccgaatttgttgcaaatgcagatcttcgaacgggctctcgtcttgtaccggccacgcaattcgagaataacaccattgatgagacgattgcaatcttcaagaccgctatgacacggtcggctctcatcatgtacaatatgaatcccaagaagccggaaggcgttgacaatgccgtcaaccctgcatggcgtgatagtctgttctacgtcatcctcggatctggttggaccgatgattccactcccgctgagatccaagcggccaacgaagcgatcaccaacccaagtctctcggacctcgactccgtctccaccggcagctatctcaacgaagccgatgttgctgagccaaaatggcagcagatgttctggggcgacaattacaatcgcctactcaagattaagaagcagcttgatccctgggacacgttctgggcacccaccgctgttggtagtgagggttggtatgtgactggccaggagtcttggctgccgacgcagaatggtcgcttgtgcaggaaatagagagaccatcaaaatattacagatgtgacttgttcttgagtacatgatctttttcagtgaaagactgagtacacatacactctatataggagctatcctgtttctttacataacacttaggaataatcataataaagacggtctgtcgttcaacatatgagcctgtgtagaactatgaacaattccg

SEQ ID NO: 20510 - DNA, 1029 bp, Muscodor strobelii
  misc_feature: SGI cDNA ID NO. 566925
  misc_feature: Reduced expression when VOC is produced
  misc_feature: Encodes the peptide sequence at SEQ ID NO 20511
atgcctccgcaactgttaccggcttccgccgccgcgttcgcaccccgagcttcatcagtcaatgtcgtccttggctccaaggtagaaccatggctcacccagaccctgaagcgcatcaacagggtaaagcgaccgctcaacagcgtgcctcaacatcagagatgtctcacggaaaccctatcttctcagaacgccatatggacactcgcttctttgatgctcgccaaagcccctgagtctgagctgcgcaaggacccaaacccactagtcgaagccttcaactacaagatgattcacctcgaggcatatatcgtccacgtcgacatggtcctgcgcaatgaagtcgcctacaagctcaatcccgatacgatagaggcactcatagaatggcataaagatgtcttcatggtggatgccaaggccgactcatacgactggcccgaaaaagaccagcatgccaagaagctccacgaagacttcgtccaagcgatcaacaaatatgttttccggacccacgtctctgctctggaagggttagaagaagagggtgcgggggagttgctctgtggtaagagcgaggaggtcaagaatagtgtcgtgggactcttgagcaagccactgcttccaccgccgcccaagattgtcgatgtcgtccgtcagccaccattgctacccagctctcctgctggcgccgtcatgtggtcgcaagcgtcgccttcgcctgtgatcactgctccagttgattcatggcgtgtgcttccgtcgagtccggccgttacatcatcgtctgttgactcgggctcgacaatctgggccaacatggctcaacatgagttccagctgccgtcgccaacaccgtcgttcacccaaccatactcttctgggggcatgttctatagctcaccaatggtaacatctcccattcccgccttacccctacccagtatgcttgccgcccattgcggtgtgaacatggggtacggaggtttcggctgggatcgttatcaagagtatgcgacaattatgtga

SEQ ID NO: 20511 - protein, 342 aa, Muscodor strobelii
  misc_feature: SGI Peptide ID NO. 566925
  misc_feature (1)..(342): NCBI GI: 116207330 Blast Desc: CHGG_02958 [Chaetomium globosum CBS 148.51] gi|88183555|gb|EAQ91023.1| CHGG_02958 [Chaetomium globosum CBS 148.51]
  misc_feature (1)..(342): NCBI GI: 171685878 Blast Desc: protein product [Podospora anserina] gi|170942900|emb|CAP68553.1| protein product [Podospora anserina]
  misc_feature (1)..(342): NCBI GI: 154301982 Blast Desc: BC1G_10228 [Botryotinia fuckeliana B05.10] gi|150855620|gb|EDN30812.1| BC1G_10228 [Botryotinia fuckeliana B05.10]
  misc_feature (1)..(342): NCBI GI: 156051502 Blast Desc: SS1G_07158 [Sclerotinia sclerotiorum 1980] gi|154704936|gb|EDO04675.1| SS1G_07158 [Sclerotinia sclerotiorum 1980]
  misc_feature (1)..(342): NCBI GI: 39954050 Blast Desc: MGG_08888 [Magnaporthe grisea 70-15] gi|145021170|gb|EDK05299.1| MGG_08888 [Magnaporthe grisea 70-15]
  misc_feature (1)..(342): NCBI GI: 85084177 Blast Desc: NCU00373 [Neurospora crassa OR74A] gi|28918348|gb|EAA28023.1| conserved [Neurospora crassa OR74A]
  misc_feature (1)..(342): NCBI GI: 46125079 Blast Desc: FG06917.1 [Gibberella zeae PH-1]
  misc_feature (1)..(342): NCBI GI: 256732697 Blast Desc: [Nectria haematococca mpVI 77-13-4]
  misc_feature (1)..(333): NCBI GI: 189188454 Blast Desc: conserved [Pyrenophora tritici-repentis Pt-1C-BFP] gi|187972172|gb|EDU39671.1| conserved [Pyrenophora tritici-repentis Pt-1C-BFP]
  misc_feature (1)..(339): NCBI GI: 121702655 Blast Desc: conserved [Aspergillus clavatus NRRL 1] gi|119397735|gb|EAW08166.1| conserved [Aspergillus clavatus NRRL 1]
  misc_feature: Useful for introducing or modulating the production of volatile compounds
MPPQLLPASAAAFAPRASSVNVVLGSKVEPWLTQTLKRINRVKRPLNSVPQHQRCLTETLSSQNAIWTLASLMLAKAPESELRKDPNPLVEAFNYKMIHLEAYIVHVDMVLRNEVAYKLNPDTIEALIEWHKDVFMVDAKADSYDWPEKDQHAKKLHEDFVQAINKYVFRTHVSALEGLEEEGAGELLCGKSEEVKNSVVGLLSKPLLPPPPKIVDVVRQPPLLPSSPAGAVMWSQASPSPVITAPVDSWRVLPSSPAVTSSSVDSGSTIWANMAQHEFQLPSPTPSFTQPYSSGGMFYSSPMVTSPIPALPLPSMLAAHCGVNMGYGGFGWDRYQEYATIM

SEQ ID NO: 20512 - DNA, 2301 bp, Muscodor strobelii
  misc_feature: SGI cDNA ID NO. 566926
  misc_feature: Encodes the peptide sequence at SEQ ID NO 20513
atggcggaacctctacctctcacctctcccattgcagtcaatcttccaattccaaaagagatcggtgaatggggggatacccaatggcaaacgctatttgcactgctcgatgctgtgaccccatcaattgctgttgaggatgaagcaacggatgacaggaatcaattgagaattacagaggcgcaatgccaggaggcttacgagcaaaccaaaaaagaagtgaagaatgcgccgagctatatcaaattcaaagagtatctacgggagcggccggtgacgagccctcagtacgaggaacatatcaaacgggtcattggttcgctacccaagaaagcacaacaggagttaggtggcgtgctgaagttattaaatactcaactgggtagcctcgcgatgacaggctatcgtctcacaatcaaagaccagccaatccatattcgtcaagccatactccaatcatgggacaacgcttggatcaaagtattccctactttggcaagcacgttttaccaaataagcaggatggctttcacgcagcttgacccattgttccgcgagctcatcgaatatcaagatcacaatgcggactacaaaccgggcccgtcttttgatttcaacttcatgcagtttccatctggtgatgatcccgcagtagttgatgtggacgttgttattgttggctcaggatgtggtggcggtgtctgcgctaaggtactggctgaagctggacatgatgttttagtagtagataaagggtattactttcccccttctcagttgccgatgaaaccagaagctgcgtctcaatttctctttgagagtaacgggcttatatcaagcgatgaccgcagcatgaatatcgttgcaggcagtaattggggtggaggcggcacagtcaactggtctgtctccctccaccctcaaggctttgtgcgtcaggagtgggcggatagaggtctgccatttttcacaacacaggagtttcagcattgcctagaccgtgtctgcaagtttatgggggttggagacaagcaaattcgccacaatcatgcaggcagtaccgtacttgaaggagcacggaaacttgggtggcatgcgaagccagtcccgcaaaacactgccggagcagaacattattgtggccgatgttattttggctgtggtgccggcgaaaagcagggccctgcagtcagctggctacccgctgctgcccaagctggcgcgcgatttattgaaggactagatgtcgaaagggtcatcttcgatgatacaagagggtcaaagcaagctgtcggcattttgggaaagtggacttcaagggataatgatggggggcttcagaaatcagcgcacgaaagaacggaaagaattgtgaacattcgtgccaagaaagttatcatcgcaggcggcactctacagagcccattgattctattgagaagcggtcttaaaagccatcacattggcaggaacttgtatcttcaccctgcctcagcggtccgcgcaacttacgatcaagatgtgaaaggctgggaaggtggcatcataacctcagtctgcacgtcatttgagaatctagatgggaaaggacacggcgctaagatcgagcctagcgtcatgattccgcatctagcgttctacgatcatccctggaagaatgcactgcaattcaagaccgactgtttgcgcgcgagacagatgcatagcatcatatcgattacgcgcgatcgtgacactggccgtgtgtatccggatcctaacgacgggcgaccgtgtattgcctactctccgtcgagtttcgaccgtgcaagctcgcttgcgggtgtcgtcgccatcgccaaaataatgtacgtccaaggtgcaacagagatatggaccgccgtacctggagtaccatcatttaagcgcacacggcccatagctcctgttatcgacacgacaagcgctatggaggcagccattattgacgatgagggcaattttgatgtggggatcaatgacccagacttcgctgcttggatcaggttgcttaatgcaacaggtctaaactccactagggccgcatgggcgtgcgcacatcagatgggttcctgtcgaatgagttctaaagctcgtgatggcgtcgtagatccgaaggggaaagtatgggaagcagacggcctttacgtggcagattcaagcgtgttcccatctgctagtggggtgaatcctatgattacgaatatggctatcgcggatttcatctctagaggtatctcaagagacctgaaaagtgcttctgggcctagggctgcgttataa

SEQ ID NO: 20513 - protein, 766 aa, Muscodor strobelii
  misc_feature: SGI Peptide ID NO. 566926
  misc_feature (600)..(748): Pfam Id: PF05199 Pfam Desc: GMC oxidoreductase
  misc_feature (268)..(510): Pfam Id: PF00732 Pfam Desc: GMC oxidoreductase
  misc_feature (222)..(255): Pfam Id: PF00890 Pfam Desc: FAD binding domain
  misc_feature (693)..(748): Pfam Id: PF05199 Pfam Desc: GMC oxidoreductase
  misc_feature (26)..(756): NCBI GI: 85091650 Blast Desc: NCU08977 [Neurospora crassa OR74A] gi|28920401|gb|EAA29769.1| [Neurospora crassa OR74A]
  misc_feature (7)..(757): NCBI GI: 154309784 Blast Desc: BC1G_07362 [Botryotinia fuckeliana B05.10] gi|150851823|gb|EDN27016.1| BC1G_07362 [Botryotinia fuckeliana B05.10]
  misc_feature (7)..(761): NCBI GI: 156052058 Blast Desc: SS1G_07437 [Sclerotinia sclerotiorum 1980] gi|154705214|gb|EDO04953.1| SS1G_07437 [Sclerotinia sclerotiorum 1980]
  misc_feature (1)..(758): NCBI GI: 256732696 Blast Desc: NECHADRAFT_37686 [Nectria haematococca mpVI 77-13-4]
  misc_feature (5)..(759): NCBI GI: 46125081 Blast Desc: FG06918.1 [Gibberella zeae PH-1]
  misc_feature (1)..(757): NCBI GI: 189208306 Blast Desc: long chain fatty alcohol oxidase [Pyrenophora tritici-repentis Pt-1C-BFP] gi|187976579|gb|EDU43205.1| long chain fatty alcohol oxidase [Pyrenophora tritici-repentis
  misc_feature (9)..(760): NCBI GI: 145614222 Blast Desc: MGG_11317 [Magnaporthe grisea 70-15] gi|145021167|gb|EDK05296.1| MGG_11317 [Magnaporthe grisea 70-15]
  misc_feature (9)..(761): NCBI GI: 255957169 Blast Desc: Pc21g23700 [Penicillium chrysogenum Wisconsin 54-1255] gi|211591048|emb|CAP97267.1| Pc21g23700 [Penicillium chrysogenum Wisconsin 54-1255]
  misc_feature (6)..(760): NCBI GI: 67516683 Blast Desc: AN0623.2 [Aspergillus nidulans FGSC A4] gi|40746010|gb|EAA65166.1| AN0623.2 [Aspergillus nidulans FGSC A4] gi|259489111|tpe|CBF89112.1| TPA: long chain fatty alcohol
  misc_feature (1)..(741): NCBI GI: 169599110 Blast Desc: SNOG_02371 [Phaeosphaeria nodorum SN15] gi|160704537|gb|EAT90583.2| SNOG_02371 [Phaeosphaeria nodorum SN15]
MAEPLPLTSPIAVNLPIPKEIGEWGDTQWQTLFALLDAVTPSIAVEDEATDDRNQLRITEAQCQEAYEQTKKEVKNAPSYIKFKEYLRERPVTSPQYEEHIKRVIGSLPKKAQQELGGVLKLLNTQLGSLAMTGYRLTIKDQPIHIRQAILQSWDNAWIKVFPTLASTFYQISRMAFTQLDPLFRELIEYQDHNADYKPGPSFDFNFMQFPSGDDPAVVDVDVVIVGSGCGGGVCAKVLAEAGHDVLVVDKGYYFPPSQLPMKPEAASQFLFESNGLISSDDRSMNIVAGSNWGGGGTVNWSVSLHPQGFVRQEWADRGLPFFTTQEFQHCLDRVCKFMGVGDKQIRHNHAGSTVLEGARKLGWHAKPVPQNTAGAEHYCGRCYFGCGAGEKQGPAVSWLPAAAQAGARFIEGLDVERVIFDDTRGSKQAVGILGKWTSRDNDGGLQKSAHERTERIVNIRAKKVIIAGGTLQSPLILLRSGLKSHHIGRNLYLHPASAVRATYDQDVKGWEGGIITSVCTSFENLDGKGHGAKIEPSVMIPHLAFYDHPWKNALQFKTDCLRARQMHSIISITRDRDTGRVYPDPNDGRPCIAYSPSSFDRASSLAGVVAIAKIMYVQGATEIWTAVPGVPSFKRTRPIAPVIDTTSAMEAAIIDDEGNFDVGINDPDFAAWIRLLNATGLNSTRAAWACAHQMGSCRMSSKARDGVVDPKGKVWEADGLYVADSSVFPSASGVNPMITNMAIADFISRGISRDLKSASGPRAAL

SEQ ID NO: 20514 - DNA, 889 bp, Muscodor strobelii
  misc_feature: SGI EST ID NO. CUFF.48080.0
  misc_feature: Variant of the nucleotide sequence at SEQ ID NO 20512
cgcaacttacgatcaagatgtgaaaggctgggaaggtggcatcataacctcagtctgcacgtcatttgagaatctagatgggaaaggacacggcgctaagatcgagcctagcgtcatgattccgcatctagcgttctacgatcatccctggaagaatgcactgcaattcaagaccgactgtttgcgcgcgagacagatgcatagcatcatatcgattacgcgcgatcgtgacactggccgtgtgtatccggatcctaacgacgggcgaccgtgtattgcctactctccgtcgagtttcgaccgtgcaagctcgcttgcgggtgtcgtcgccatcgccaaaataatgtacgtccaaggtgcaacagagatatggaccgccgtacctggagtaccatcatttaagcgcacacggcccatagctcctgttatcgacacgacaagcgctatggaggcagccattattgacgatgagggcaattttgatgtggggatcaatgacccagacttcgctgcttggatcaggttgcttaatgcaacaggtctaaactccactagggccgcatgggcgtgcgcacatcagatgggttcctgtcgaatgagttctaaagctcgtgatggcgtcgtagatccgaaggggaaagtatgggaagcagacggcctttacgtggcagattcaagcgtgttcccatctgctagtggggtgaatcctatgattacgaatatggctatcgcggatttcatctctagaggtatctcaagagacctgaaaagtgcttctgggcctagggctgcgttataaagcaagacgaataattgactattggtcgataatgctctttcacttgtatttacttccagactttgccaacttgtatattttagttttgca

SEQ ID NO: 20515 - DNA, 1428 bp, Muscodor strobelii
  misc_feature: SGI cDNA ID NO. 566927
  misc_feature: Encodes the peptide sequence at SEQ ID NO 20516
atggcaaccccaattgtatatgcgtcgtacccagcggccacccttttcaaattcccaccgcacacggatccttcacctatcccaccgccacatttcgaccatctcttcacaattcccgacgactggtacactgctgcattagatccgaaagtgcccataacgattgcggccgtctatgctgtaacagctaaggcactcaatgcttacaacaagtctactggaaagaagccatgggctatcagtaagacgaaggcgtttaacgcctttgtcgttcttcacaacatatttctagccgtatattcagcatggacgtggtacggcatgctgaaagccctccagaacacggtcgcaagccctaccgggcctgatggctgggctgccactattgacagcttctgcaagtttcatggtcccgctggccttcgaaactcgcagtcatacaacccgacaagtggaacgtggagcgccatctcgggaacacatttgttgacggccgaaggttccccaagccgtgccgagcacgggcggctttggaatgaagggcttgcattctacgggtggctgttctacattagcaaattttacgaagtgttcgatacactcattatccttgcaaagggcaaattcagctcaactctccagacttaccaccacgctggcgccatgatggcgatgtgggctggcatgcgatacatgtctgcgcctatctggattttcgtgttcttcaactctgccatccacgcgcttatgtatacttattacactgtgacggcattcaatatccgtgtgccgactatgatcaagcgcacattgacaacaatgcaaatctcgcaattcattattggggcttcagccgcgatggtccattccttcatctcctacattgttccagttcaaaccaaggttccagttgctgaagcagcggcatctgcctccagcgctgcatctgctgcacatgccgccgccacggcagcaggcttggttgatggccttaagtccgccttgttcggtgtggcagaggccgccggggctggcgccgtcgtgtctggctcgccctctgaggcagcaagcacctatgtgaccacatggcaaaaggttgactgcatcgataccaccggccagacatttgctatctggctgaatgttttctacctcgctcctctcacctacctttttgtatcgttctttatcgcaagttatcttcgccgcagcaaggccgagagcgtgcgtgggaagacagcagacaagcggcgcctcagcaacgtcgtgctggccgaaaaagcgagctgggatgcggcacgtcgtgttgagcgcgagatgtacggcgaaagtaaagatggagccattgttgaagatagcgatgaatcgagtggagctgagaacactcaccttcgtgttcctcgcgcaaatggcgtcaggaccaagtga

SEQ ID NO: 20516 - protein, 475 aa, Muscodor strobelii
  misc_feature: SGI Peptide ID NO. 566927
  misc_feature (83)..(320): Pfam Id: PF01151 Pfam Desc: GNS1/SUR4 family
  misc_feature (182)..(282): Pfam Id: PF01151 Pfam Desc: GNS1/SUR4 family
  misc_feature (1)..(458): NCBI GI: 116207728 Blast Desc: CHGG_03157 [Chaetomium globosum CBS 148.51] gi|88183754|gb|EAQ91222.1| CHGG_03157 [Chaetomium globosum CBS 148.51]
  misc_feature (6)..(468): NCBI GI: 85091648 Blast Desc: NCU08976 [Neurospora crassa OR74A] gi|28920400|gb|EAA29768.1| conserved [Neurospora crassa OR74A]
  misc_feature (8)..(459): NCBI GI: 256732686 Blast Desc: NECHADRAFT_100111 [Nectria haematococca mpVI 77-13-4]
  misc_feature (11)..(448): NCBI GI: 171686216 Blast Desc: protein product [Podospora anserina] gi|170943069|emb|CAP68722.1| protein product [Podospora anserina]
  misc_feature (36)..(471): NCBI GI: 46125037 Blast Desc: FG06896.1 [Gibberella zeae PH-1]
  misc_feature (1)..(440): NCBI GI: 156037562 Blast Desc: SS1G_12495 [Sclerotinia sclerotiorum 1980] gi|154697903|gb|EDN97641.1| SS1G_12495 [Sclerotinia sclerotiorum 1980]
  misc_feature (11)..(435): NCBI GI: 145614208 Blast Desc: MGG_08904 [Magnaporthe grisea 70-15] gi|145021152|gb|EDK05281.1| MGG_08904 [Magnaporthe grisea 70-15]
  misc_feature (1)..(461): NCBI GI: 261358180 Blast Desc: conserved [Verticillium albo-atrum VaMs.102]
  misc_feature (5)..(475): NCBI GI: 169767074 Blast Desc: [Aspergillus oryzae RIB40] gi|83765863|dbj|BAE56006.1| protein product [Aspergillus oryzae]
  misc_feature (5)..(475): NCBI GI: 145230287 Blast Desc: An01g10340 [Aspergillus niger] gi|134055569|emb|CAK37215.1| protein product [Aspergillus niger]
MATPIVYASYPAATLFKFPPHTDPSPIPPPHFDHLFTIPDDWYTAALDPKVPITIAAVYAVTAKALNAYNKSTGKKPWAISKTKAFNAFVVLHNIFLAVYSAWTWYGMLKALQNTVASPTGPDGWAATIDSFCKFHGPAGLRNSQSYNPTSGTWSAISGTHLLTAEGSPSRAEHGRLWNEGLAFYGWLFYISKFYEVFDTLIILAKGKFSSTLQTYHHAGAMMAMWAGMRYMSAPIWIFVFFNSAIHALMYTYYTVTAFNIRVPTMIKRTLTTMQISQFIIGASAAMVHSFISYIVPVQTKVPVAEAAASASSAASAAHAAATAAGLVDGLKSALFGVAEAAGAGAVVSGSPSEAASTYVTTWQKVDCIDTTGQTFAIWLNVFYLAPLTYLFVSFFIASYLRRSKAESVRGKTADKRRLSNVVLAEKASWDAARRVEREMYGESKDGAIVEDSDESSGAENTHLRVPRANGVRTK

SEQ ID NO: 20517 - DNA, 2204 bp, Muscodor strobelii
  misc_feature: SGI EST ID NO. CUFF.48121.0
  misc_feature: Variant of the nucleotide sequence at SEQ ID NO 20515
gtctgaaggagcaaaccgatgcgatgacccttactaggagccagattttggcaccgatggcatattcacaagcaagttgtaactgacttgatggggtcaagggtaactagccgcggcttcctcacattggaaagtggttcagaaggcgatatgaaattttaatatttgctcacttcatccttatctgccgattgccgtacttcttaacacttgaaatattacttcttccattccaacgccatcctatcaccgctgctcaagtccggctcacccctcgaagctttgcttgccgagactcatctcgtctgctcttccttgttgtcaccaaataagccctccaacgtcggtaggcgtgtgacttgaatggtttcgatatcttacatcatcaagttgcagatagtctccaggtagccattgagagtacaacacgcatccacgggatctctctttatacctttctaaaaggctatcgaattttctctcgacttttgcaactatcatctacgaagggcattggcataagagtcagaagatggcaaccccaattgtatatgcgtcgtacccagcggccacccttttcaaattcccaccgcacacggatccttcacctatcccaccgccacatttcgaccatctcttcacaattcccgacgactggtacactgctgcattagatccgaaagtgcccataacgattgcggccgtctatgctgtaacagctaaggcactcaatgcttacaacaagtctactggaaagaagccatgggctatcagtaagacgaaggcgtttaacgcctttgtcgttcttcacaacatatttctagccgtatattcagcatggacgtggtacggcatgctgaaagccctccagaacacggtcgcaagccctaccgggcctgatggctgggctgccactattgacagcttctgcaagtttcatggtcccgctggccttcgaaactcgcagtcatacaacccgacaagtggaacgtggagcgccatctcgggaacacatttgttgacggccgaaggttccccaagccgtgccgagcacgggcggctttggaatgaagggcttgcattctacgggtggctgttctacattagcaaattttacgaagtgttcgatacactcattatccttgcaaagggcaaattcagctcaactctccagacttaccaccacgctggcgccatgatggcgatgtgggctggcatgcgatacatgtctgcgcctatctggattttcgtgttcttcaactctgccatccacgcgcttatgtatacttattacactgtgacggcattcaatatccgtgtgccgactatgatcaagcgcacattgacaacaatgcaaatctcgcaattcattattggggcttcagccgcgatggtccattccttcatctcctacattgttccagttcaaaccaaggttccagttgctgaagcagcggcatctgcctccagcgctgcatctgctgcacatgccgccgccacggcagcaggcttggttgatggccttaagtccgccttgttcggtgtggcagaggccgccggggctggcgccgtcgtgtctggctcgccctctgaggcagcaagcacctatgtgaccacatggcaaaaggttgactgcatcgataccaccggccagacatttgctatctggctgaatgttttctacctcgctcctctcacctacctttttgtatcgttctttatcgcaagttatcttcgccgcagcaaggccgagagcgtgcgtgggaagacagcagacaagcggcgcctcagcaacgtcgtgctggccgaaaaagcgagctgggatgcggcacgtcgtgttgagcgcgagatgtacggcgaaagtaaagatggagccattgttgaagatagcgatgaatcgagtggagctgagaacactcaccttcgtgttcctcgcgcaaatggcgtcaggaccaagtgagctatctctttttcgttttcgttctgatataggcactgaataagtgcccggcgagcttcaagtgttggcattaacagggagttcatggttcaaggtgttttggtgtgtaaaacatgattacagggagatgtgttatgaaatagaaaacgaaaccataatcggtttcgaatatcagtgcaataatgataaaatactagtaccaaataactcgcccttggaataagaagacttggttgacattcag

SEQ ID NO: 20518 - DNA, 678 bp, Muscodor strobelii
  misc_feature: SGI cDNA ID NO. 566928
  misc_feature: Encodes the peptide sequence at SEQ ID NO 20519
atgcccgtctatcgccctgtttcagtctccagtgacctctggttggccgaagcctttgcggctggtcaagctgtccgcgagtctcccacgatgccgtcgtccaaggcttgcgaggatctcctctgcatggacaacaatgatctcctcccagagatcccggccctcgagccaaccagcagcacgattgcccctgcccttgccgctgcctctccccccgttacgcctcccaccaccgccgccgccgccactatccgatccggcattcggatcaccaatccgaagggcgaggtcgttgacctcaaaggcctcgtagaggcatccaagaagaagaacttggaagagcgcatgctctcttcggccgtgtttgtccccgctgccgccgccaccaccacatcttctgaggctatcaacagcctcaccgccgtggcgagctttcaacaagccgccaagaagcttgagaatgcgcttcttgcgcaccaaggggagtgggaggccacctggagccctggcagcacgatgaagcaattcatcgtggcactgaacgagaagttcccaggcaatgacgaggagatgaagaagtgggtcaaagagaccgtcattgctgtcgacaaagcacgcggcttcccctaccagcgcaagcaagccgagctgctcatcaagtcagccaagaagaactag

SEQ ID NO: 20519 - protein, 225 aa, Muscodor strobelii
  misc_feature: SGI Peptide ID NO. 566928
MPVYRPVSVSSDLWLAEAFAAGQAVRESPTMPSSKACEDLLCMDNNDLLPEIPALEPTSSTIAPALAAASPPVTPPTTAAAATIRSGIRITNPKGEVVDLKGLVEASKKKNLEERMLSSAVFVPAAAATTTSSEAINSLTAVASFQQAAKKLENALLAHQGEWEATWSPGSTMKQFIVALNEKFPGNDEEMKKWVKETVIAVDKARGFPYQRKQAELLIKSAKKN

SEQ ID NO: 20520 - DNA, 870 bp, Muscodor strobelii
  misc_feature: SGI cDNA ID NO. 566929
  misc_feature: Reduced expression when VOC is produced
  misc_feature: Encodes the peptide sequence at SEQ ID NO 20521
atggcgacggattttatcatgcccaggttggcagacgcccatccagcaaactacttccaacaccagccgcagccgcacgcccacgctcatgcccacgcacagtctcccaactatgcgctccctcatactgcgcagggctaccagtcccagcaggtgtcgcccctgagcacctccaacaactctcccacctctccacaatcatatcaccgccaacgagtacggcccatgtacatgcccgctgttttgcgcccgaacgagaatccttacaggcggtgccagaccgacaagcacgagggcgaggcaccagacgacgaccggcctgtgtcatccgccaatagcttcatcagcctgcctggactgagtgcgtttggtcgtctgagtcggcgagcgaatgacgagagcggcaaatgcatggagggtgaatgggattgggatatgtttccgaaaccaacggctcaacccacgcgacaacactggaagcccgatcccgaagccacaatctgcgaggagccttcctgcctacgccactttaactactggacaaggcggcatcattgtagaagatgtggtcacattttctgcgatgtgcactccacgttcagcataccgctagaccaagacgcaaattacaacccgcgcggcctcatcagtcgagcgtgcgggcattgctactcagagttccaggcctggcggagccgaactaatagccaagcctccagtgacgactcgtctgatcggcaggcgcgtggtgctcaaaccgcaccggccagccctatcaccacaacccccatcggccagaaagccgcacctccccatcctgcagaaatcgccatgagtgtgcctcgagattggcactggagtactttctaa

SEQ ID NO: 20521 - protein, 289 aa, Muscodor strobelii
  misc_feature: SGI Peptide ID NO. 566929
  misc_feature (157)..(229): Pfam Id: PF01363 Pfam Desc: FYVE zinc finger
  misc_feature (1)..(289): NCBI GI: 164423109 Blast Desc: NCU08974 [Neurospora crassa OR74A] gi|157069952|gb|EAA29766.2| [Neurospora crassa OR74A]
  misc_feature (1)..(289): NCBI GI: 256733131 Blast Desc: NECHADRAFT_100112 [Nectria haematococca mpVI 77-13-4]
  misc_feature (78)..(289): NCBI GI: 261358179 Blast Desc: zinc finger protein [Verticillium albo-atrum VaMs.102]
  misc_feature (1)..(289): NCBI GI: 46125039 Blast Desc: FG06897.1 [Gibberella zeae PH-1]
  misc_feature (27)..(289): NCBI GI: 171686214 Blast Desc: protein product [Podospora anserina] gi|170943068|emb|CAP68721.1| protein product [Podospora anserina]
  misc_feature (6)..(289): NCBI GI: 39954232 Blast Desc: MGG_08903 [Magnaporthe grisea 70-15] gi|145021153|gb|EDK05282.1| MGG_08903 [Magnaporthe grisea 70-15]
  misc_feature (47)..(289): NCBI GI: 156052050 Blast Desc: SS1G_07433 [Sclerotinia sclerotiorum 1980] gi|154705210|gb|EDO04949.1| SS1G_07433 [Sclerotinia sclerotiorum 1980]
  misc_feature (53)..(289): NCBI GI: 238491246 Blast Desc: FYVE domain protein, [Aspergillus flavus NRRL3357] gi|220697273|gb|EED53614.1| FYVE domain protein, [Aspergillus flavus NRRL3357]
  misc_feature (58)..(289): NCBI GI: 115397349 Blast Desc: conserved [Aspergillus terreus NIH2624] gi|114192457|gb|EAU34157.1| conserved [Aspergillus terreus NIH2624]
  misc_feature (58)..(289): NCBI GI: 212533787 Blast Desc: FYVE domain protein, [Penicillium marneffei ATCC 18224] gi|210072414|gb|EEA26503.1| FYVE domain protein, [Penicillium marneffei ATCC 18224]
  misc_feature: Useful for introducing or modulating the production of volatile compounds
MATDFIMPRLADAHPANYFQHQPQPHAHAHAHAQSPNYALPHTAQGYQSQQVSPLSTSNNSPTSPQSYHRQRVRPMYMPAVLRPNENPYRRCQTDKHEGEAPDDDRPVSSANSFISLPGLSAFGRLSRRANDESGKCMEGEWDWDMFPKPTAQPTRQHWKPDPEATICEEPSCLRHFNYWTRRHHCRRCGHIFCDVHSTFSIPLDQDANYNPRGLISRACGHCYSEFQAWRSRTNSQASSDDSSDRQARGAQTAPASPITTTPIGQKAAPPHPAEIAMSVPRDWHWSTF

SEQ ID NO: 20522 - DNA, 2381 bp, Muscodor strobelii
  misc_feature: SGI EST ID NO. CUFF.48113.0
  misc_feature: Variant of the nucleotide sequence at SEQ ID NO 20520
gagagagtctggagggtgtccgggacgctctgaaggtttccgttatctaccttaagaggtgtctcctccctccgtatcgtgaagcacatgcactcatgcctttttgtcgtatcgagcacaccctaccttacctattaccaatacctaaataaccttggtccttggatatacccaacctgcctgtattgggggaggaggacaactgtcgtttcatccgcggaaatctcgccaagctaagtgaggtgtaggaagaaggaaagatatacatatctcacaatatcacttgcgccttgaatctccagacattgttgttctctcttggcaacactcattccggaatatctcactcgaccccaactacaactactaccaccaccaccacacgtgccccccggcacggcgtggctgaaggaccccgaacttgtgaaccggcctcactaacaacgcattctcattcgcgcgcaagcctgaccgactcggctgacacgacttgaacgctctcgaaagtcagacgaactcgcacccgttccgataatagccacaagctgtgcgacgctcgtagagtttgcccgcgtcgtgcttgttgcaccgctctgcgccgctctccaaggggtttccctgtccctcaccactgctggcctgtcggcttatcttgtctgacattgcctttctgctgtcggccgaccgcctcgcctgcttatcttttgaattcaatcgggctgcgcgcgtgacactcgacgcccgacggccgcaacttggctattaatcaccaaactgtctcctctctcatcgacagcctaggattgctttaccgcttggaacagaggtggacaataaccgcagaaggtccggatcagggggatggcgacggattttatcatgcccaggttggcagacgcccatccagcaaactacttccaacaccagccgcagccgcacgcccacgctcatgcccacgcacagtctcccaactatgcgctccctcatactgcgcagggctaccagtcccagcaggtgtcgcccctgagcacctccaacaactctcccacctctccacaatcatatcaccgccaacgagtacggcccatgtacatgcccgctgttttgcgcccgaacgagaatccttacaggcggtgccagaccgacaagcacgagggcgaggcaccagacgacgaccggcctgtgtcatccgccaatagcttcatcagcctgcctggactgagtgcgtttggtcgtctgagtcggcgagcgaatgacgagagcggcaaatgcatggagggtgaatgggattgggatatgtttccgaaaccaacggctcaacccacgcgacaacactggaagcccgatcccgaagccacaatctgcgaggagccttcctgcctacgccactttaactactggacaaggcggcatcattgtagaagatgtggtcacattttctgcgatgtgcactccacgttcagcataccgctagaccaagacgcaaattacaacccgcgcggcctcatcagtcgagcgtgcgggcattgctactcagagttccaggcctggcggagccgaactaatagccaagcctccagtgacgactcgtctgatcggcaggcgcgtggtgctcaaaccgcaccggccagccctatcaccacaacccccatcggccagaaagccgcacctccccatcctgcagaaatcgccatgagtgtgcctcgagattggcactggagtactttctaagtgcggcgctacgaattatgtgcctattcggcgaaagataggatacccggccgtgttaacatagcgccccgggtccttgggacgatcaacaaaacttgcgatagaccttgcccaagtcgaaatgattttggtgcaccgatattcggtcacacatttgacgagggaggcgaatgacttgccttacatgagatcaatgaacatcaggaatagaaggaaacggctggttttgactgcttccggcgaggtggtctacacggcgtggaagactgagcttatttggatttctttgccctgatgatacccagtcgagtagaatttgtttggtacggatgcatagatacagtctagcatcctctattcaatgcgggtgtttgatttctggcctactgatagacggatcaggcgttttggattgagttggtcgtattcgacatgtctacaggttttggcgttaagcgttggtttgactgggaggaaggctttgcgtttggcttgccacatatgccaagtgacgtgatgtcaccagtggatatcaatgctccgtgtcgtgagcatgactcaaacgtttacctatagaatcactcataatagagtattaattacgttgaacccaatgctctaaaagtcctgtgtagattgccaagttatag

SEQ ID NO: 20523 - DNA, 579 bp, Muscodor strobelii
  misc_feature: SGI cDNA ID NO. 566930
  misc_feature: Encodes the peptide sequence at SEQ ID NO 20524
atgctctcgagcacaacatcacgtttggaacgcaagaaggaggcgatcaagctgacccatgttaccgaatctggttcagctcatatggtatcaatatcggacaaaacaccgactaaaagggtagccaaggcgacctgcacagtccgctttgcagagccccaggcatgcaaactcattaaggagagtcaaatgaagaagggcgatgttctgggtgtagcccgcgtcgctggcatcatggccgcaaaaaggacatcagatttgattcctctttgccaccccatcgctttgtcaaaagtgaccgtggaccttgaggtcgtacaaaatgacggcgatgtcggtcgcatcgatatccaagcaacggtggcttgcgagggcaagactggcgtcgaaatggaagcgttgaccgctgcttcgacggcggcgctaaccatctacgatatgtgtaaagccgtggataagaaaatgtcgattgatgggctcagagtaatcttgaaggaaggcggtaagagtggacgctggatagacggtgtacaggatcaaacacatcgctcaccggaatccgacccggaagaacgttga

SEQ ID NO: 20524 - protein, 192 aa, Muscodor strobelii
  misc_feature: SGI Peptide ID NO. 566930
  misc_feature (29)..(168): Pfam Id: PF01967 Pfam Desc: MoaC family
  misc_feature (2)..(173): NCBI GI: 171686210 Blast Desc: protein product [Podospora anserina] gi|170943066|emb|CAP68719.1| protein product [Podospora anserina]
  misc_feature (14)..(179): NCBI GI: 154295261 Blast Desc: BC1G_13444 [Botryotinia fuckeliana B05.10] gi|150844171|gb|EDN19364.1| BC1G_13444 [Botryotinia fuckeliana B05.10]
  misc_feature (17)..(173): NCBI GI: 256733132 Blast Desc: [Nectria haematococca mpVI 77-13-4]
  misc_feature (17)..(173): NCBI GI: 46125045 Blast Desc: FG06900.1 [Gibberella zeae PH-1]
  misc_feature (10)..(179): NCBI GI: 85075576 Blast Desc: molybdenum cofactor biosynthesis protein 1 B [Neurospora crassa OR74A] gi|28916800|gb|EAA26553.1| molybdenum cofactor biosynthesis protein 1 B [Neurospora crassa OR74A]
  misc_feature (17)..(176): NCBI GI: 116207734 Blast Desc: CHGG_03160 [Chaetomium globosum CBS 148.51] gi|88183757|gb|EAQ91225.1| CHGG_03160 [Chaetomium globosum CBS 148.51]
  misc_feature (17)..(173): NCBI GI: 110680395 Blast Desc: molybdenum cofactor biosynthesis protein C [Roseobacter denitrificans OCh 114] gi|109456511|gb|ABG32716.1| molybdenum cofactor biosynthesis protein C [Roseobacter OCh 114]
  misc_feature (16)..(173): NCBI GI: 163746567 Blast Desc: molybdenum cofactor biosynthesis protein C [Oceanibulbus indolifex HEL-45] gi|161380452|gb|EDQ04863.1| molybdenum cofactor biosynthesis protein C [Oceanibulbus HEL-45]
  misc_feature (18)..(173): NCBI GI: 126731366 Blast Desc: molybdenum cofactor biosynthesis protein C [Sagittula stellata E-37] gi|126708277|gb|EBA07336.1| molybdenum cofactor biosynthesis protein C [Sagittula stellata E-37]
  misc_feature (18)..(173): NCBI GI: 149203710 Blast Desc: molybdenum cofactor biosynthesis protein C [Roseovarius sp. TM1035] gi|149142827|gb|EDM30869.1| molybdenum cofactor biosynthesis protein C [Roseovarius sp. TM1035]
MLSSTTSRLERKKEAIKLTHVTESGSAHMVSISDKTPTKRVAKATCTVRFAEPQACKLIKESQMKKGDVLGVARVAGIMAAKRTSDLIPLCHPIALSKVTVDLEVVQNDGDVGRIDIQATVACEGKTGVEMEALTAASTAALTIYDMCKAVDKKMSIDGLRVILKEGGKSGRWIDGVQDQTHRSPESDPEER

SEQ ID NO: 20525 - DNA, 2722 bp, Muscodor strobelii
  misc_feature: SGI EST ID NO. CUFF.48238.1
  misc_feature: Variant of the nucleotide sequence at SEQ ID NO 20523
tcggagcagtggcaagaatgatgcacctcgtctcgaactcagacatgagcagctcaagcgactcatggaaaacgatgattagtcttgcatgatctcattcaaagacataatccatatgtgtcatattagacggtccttccccattccaccattgcctgtgcgatgatgaggccgctgacctctcccatacaccggggattggcacggggtccggggccggtacagagcgtgataatccggagactcacgcaggatgccacgacaacacactcgatcagccgtaaggacgcagagcccgcatcaagcagcgtttcatctactcagacatctttgcggcgtcaacggctcaaaaatgtcgggcctttctctgactttctcactgatactttccaccggcagcatgactacctacgtatctcgctcacggagagatgcaacctcagatgtgtttactgcatgcccgaagaaggtgttccgttgtcacctccgaaggagcttttgaccacccccgagatcataatgctctcatctctcttcgtatcccagggtgtaacaaagatccgtctcactggaggcgagccaacagttaggcgagatatcctaccattgatgcgacagattggagctttgagaacacatggactgagagaattatgtctgacgacaaacgggttgacactcagccggaaacttgaggggatggttgaggcaggtttgactggggttaatctcagcctcgacactcttgatccttggcaattccagatcatgacccgacgtaaaggctttgacgccgtcatgcgaagcatcgaaaaggttttagagatgaacaagcatggtgcaggaatcaaattaaaaatcaattcggtcgttatgaggggcgtcaacgaccgggagatcctgccatttgttgagatgacgcgggaaaaagatatcgaggtcagattcatcgagtacatgccatttgacggaaacaagtggaacaaaggtaagatgttcagctactctgagatgctggacgtgatcaaacaaaagcaccctagcctcgagcagctacaaggtcacaagaacgacacgagcaagacttataagatacctggatttgtgggtagtctcggcttcatcacgagcatgacacacaatttctgtggcacttgcaatcgcctacgtatcacaaacgatgggaatctcaaagtgtgcctgttcggcaacgctgaggtttcactacgagacattctgaggaaatctaatagcggagagccgattgatgaggaggctttcgaagccatgaagcagatcgaaatggacagacgtcagggtctaatctcaccatcaacaccactcgggatggtaccgaatgagcaggagctgctggacgtgatcggtatcgcagtgaaaggcaagaaagaaaagcacgccggcattggcgaacttgaacacttgaagaaccgaccgatgatcctgataggtgggtgaaatgtctgcccccagcttggtacgaatattcgacgacggaagcggctatgtcataagtcccattgtaaccttaagctgaacagaccctctggtagatccgcagagttgcaggtctaacggtaattatcacatttcgctttggaggccggactatagagcaaccgcacggggcaatcatccacttatccatatgtcgtcactctcagcattgtcacgcagccaagtgcatttgcagcaagttaggatgctctcgagcacaacatcacgtttggaacgcaagaaggaggcgatcaagctgacccatgttaccgaatctggttcagctcatatggtatcaatatcggacaaaacaccgactaaaagggtagccaaggcgacctgcacagtccgctttgcagagccccaggcatgcaaactcattaaggagagtcaaatgaagaagggcgatgttctgggtgtagcccgcgtcgctggcatcatggccgcaaaaaggacatcagatttgattcctctttgccaccccatcgctttgtcaaaagtgaccgtggaccttgaggtcgtacaaaatgacggcgatgtcggtcgcatcgatatccaagcaacggtggcttgcgagggcaagactggcgtcgaaatggaagcgttgaccgctgcttcgacggcggcgctaaccatctacgatatgtgtaaagccgtggataagaaaatgtcgattgatgggctcagagtaatcttgaaggaaggcggtaagagtggacgctggatagacggtgtacaggatcaaacacatcgctcaccggaatccgacccggaagaacgttgacactcatgttcctacaatcgcccctatttgtttgttagtctctgtacgtcatcgcgatgccgtcaatcttatctcttatcacggccggcaggcccttgcgtcttacaggcttcaatatcagaccattccggcattttggacatgcatccatagtgtatgcatgcttacaagtcagcgtagagtggtaatgcgtaggcactgggacaaacgtatgatactctcaataaaacgatcgatcactcatcgtcgatctgagcgggccactggctttcgtaacttgcacctcaagacgatctacaatctactttgtaatatatcacatttatgcttggatcttattactgtcagttatagcggatatgtctaagaatcgtcggcatagtcacgactgcatagtgaaatgaaggcttgcttagatggaat

SEQ ID NO: 20526 - DNA, 1677 bp, Muscodor strobelii
  misc_feature: SGI cDNA ID NO. 566931
  misc_feature: Reduced expression when VOC is produced
  misc_feature: Encodes the peptide sequence at SEQ ID NO 20527
atgctctcatctctcttcgtatcccagggtgtaacaaagatccgtctcactggaggcgagccaacagttaggcgagatatcctaccattgatgcgacagattggagctttgagaacacatggactgagagaattatgtctgacgacaaacgggttgacactcagccggaaacttgaggggatggttgaggcaggtttgactggggttaatctcagcctcgacactcttgatccttggcaattccagatcatgacccgacgtaaaggctttgacgccgtcatgcgaagcatcgaaaaggttttagagatgaacaagcatggtgcaggaatcaaattaaaaatcaattcggtcgttatgaggggcgtcaacgaccgggagatcctgccatttgttgagatgacgcgggaaaaagatatcgaggtcagattcatcgagtacatgccatttgacggaaacaagtggaacaaaggtaagatgttcagctactctgagatgctggacgtgatcaaacaaaagcaccctagcctcgagcagctacaaggtcacaagaacgacacgagcaagacttataagatacctggatttgtgggtagtctcggcttcatcacgagcatgacacacaatttctgtggcacttgcaatcgcctacgtatcacaaacgatgggaatctcaaagtgtgcctgttcggcaacgctgaggtttcactacgagacattctgaggaaatctaatagcggagagccgattgatgaggaggctttcgaagccatgaagcagatcgaaatggacagacgtcagggtctaatctcaccatcaacaccactcgggatggtaccgaatgagcaggagctgctggacgtgatcggtatcgcagtgaaaggcaagaaagaaaagcacgccggcattggcgaacttgaacacttgaagaaccgaccgatgatcctgatagatccgcagagttgcaggtctaacggtaattatcacatttcgctttggaggccggactatagagcaaccgcacggggcaatcatccacttatccatatgtcgtcactctcagcattgtcacgcagccaagtgcatttgcagcaagttaggatgctctcgagcacaacatcacgtttggaacgcaagaaggaggcgatcaagctgacccatgttaccgaatctggttcagctcatatggtatcaatatcggacaaaacaccgactaaaagggtagccaaggcgacctgcacagtccgctttgcagagccccaggcatgcaaactcattaaggagagtcaaatgaagaagggcgatgttctgggtgtagcccgcgtcgctggcatcatggccgcaaaaaggacatcagatttgattcctctttgccaccccatcgctttgtcaaaagtgaccgtggaccttgaggtcgtacaaaatgacggcgatgtcggtcgcatcgatatccaagcaacggtggcttgcgagggcaagactggcgtcgaaatggaagcgttgaccgctgcttcgacggcggcgctaaccatctacgatatgtgtaaagccgtggataagaaaatgtcgattgatgggctcagagtaatcttgaaggaaggcggtaagagtggacgctggatagacggtgtacaggatcaaacacatcgctcaccggaatccgacccggaagaacgttga

SEQ ID NO: 20527 - protein, 558 aa, Muscodor strobelii
  misc_feature: SGI Peptide ID NO. 566931
  misc_feature (395)..(534): Pfam Id: PF01967 Pfam Desc: MoaC family
  misc_feature (139)..(301): Pfam Id: PF06463 Pfam Desc: Molybdenum Cofactor Synthesis C
  misc_feature (139)..(247): Pfam Id: PF06463 Pfam Desc: Molybdenum Cofactor Synthesis C
  misc_feature (7)..(134): Pfam Id: PF04055 Pfam Desc: Radical SAM superfamily
  misc_feature (1)..(539): NCBI GI: 46125045 Blast Desc: FG06900.1 [Gibberella zeae PH-1]
  misc_feature (1)..(539): NCBI GI: 256733132 Blast Desc: [Nectria haematococca mpVI 77-13-4]
  misc_feature (1)..(539): NCBI GI: 171686210 Blast Desc: protein product [Podospora anserina] gi|170943066|emb|CAP68719.1| protein product [Podospora anserina]
  misc_feature (1)..(545): NCBI GI: 154295261 Blast Desc: BC1G_13444 [Botryotinia fuckeliana B05.10] gi|150844171|gb|EDN19364.1| BC1G_13444 [Botryotinia fuckeliana B05.10]
  misc_feature (1)..(545): NCBI GI: 156051072 Blast Desc: SS1G_06943 [Sclerotinia sclerotiorum 1980] gi|154704721|gb|EDO04460.1| SS1G_06943 [Sclerotinia sclerotiorum 1980]
  misc_feature (1)..(545): NCBI GI: 85075576 Blast Desc: molybdenum cofactor biosynthesis protein 1 B [Neurospora crassa OR74A] gi|28916800|gb|EAA26553.1| molybdenum cofactor biosynthesis protein 1 B [Neurospora crassa OR74A]
  misc_feature (1)..(542): NCBI GI: 116207734 Blast Desc: CHGG_03160 [Chaetomium globosum CBS 148.51] gi|88183757|gb|EAQ91225.1| CHGG_03160 [Chaetomium globosum CBS 148.51]
  misc_feature (2)..(540): NCBI GI: 238483985 Blast Desc: molybdopterin cofactor biosynthetic protein [Aspergillus flavus NRRL3357] gi|220701281|gb|EED57619.1| molybdopterin cofactor biosynthetic protein [Aspergillus flavus
  misc_feature (2)..(546): NCBI GI: 67517349 Blast Desc: AN0947.2 [Aspergillus nidulans FGSC A4] gi|2598964|gb|AAB84030.1| molybdopterin cofactor biosynthetic protein [Emericella nidulans] gi|40746820|gb|EAA65976.1| AN0947.2
  misc_feature (2)..(546): NCBI GI: 121700753 Blast Desc: molybdopterin cofactor biosynthetic protein [Aspergillus clavatus NRRL 1] gi|119396784|gb|EAW07215.1| molybdopterin cofactor biosynthetic protein [Aspergillus clavatus
  misc_feature: Useful for introducing or modulating the production of volatile compounds
MLSSLFVSQGVTKIRLTGGEPTVRRDILPLMRQIGALRTHGLRELCLTTNGLTLSRKLEGMVEAGLTGVNLSLDTLDPWQFQIMTRRKGFDAVMRSIEKVLEMNKHGAGIKLKINSVVMRGVNDREILPFVEMTREKDIEVRFIEYMPFDGNKWNKGKMFSYSEMLDVIKQKHPSLEQLQGHKNDTSKTYKIPGFVGSLGFITSMTHNFCGTCNRLRITNDGNLKVCLFGNAEVSLRDILRKSNSGEPIDEEAFEAMKQIEMDRRQGLISPSTPLGMVPNEQELLDVIGIAVKGKKEKHAGIGELEHLKNRPMILIDPQSCRSNGNYHISLWRPDYRATARGNHPLIHMSSLSALSRSQVHLQQVRMLSSTTSRLERKKEAIKLTHVTESGSAHMVSISDKTPTKRVAKATCTVRFAEPQACKLIKESQMKKGDVLGVARVAGIMAAKRTSDLIPLCHPIALSKVTVDLEVVQNDGDVGRIDIQATVACEGKTGVEMEALTAASTAALTIYDMCKAVDKKMSIDGLRVILKEGGKSGRWIDGVQDQTHRSPESDPEER

SEQ ID NO: 20528 - DNA, 2619 bp, Muscodor strobelii
  misc_feature: SGI EST ID NO. CUFF.48239.0
  misc_feature: Variant of the nucleotide sequence at SEQ ID NO 20526
tcggagcagtggcaagaatgatgcacctcgtctcgaactcagacatgagcagctcaagcgactcatggaaaacgatgattagtcttgcatgatctcattcaaagacataatccatatgtgtcatattagacggtccttccccattccaccattgcctgtgcgatgatgaggccgctgacctctcccatacaccggggattggcacggggtccggggccggtacagagcgtgataatccggagactcacgcaggatgccacgacaacacactcgatcagccgtaaggacgcagagcccgcatcaagcagcgtttcatctactcagacatctttgcggcgtcaacggctcaaaaatgtcgggcctttctctgactttctcactgatactttccaccggcagcatgactacctacgtatctcgctcacggagagatgcaacctcagatgtgtttactgcatgcccgaagaaggtgttccgttgtcacctccgaaggagcttttgaccacccccgagatcataatgctctcatctctcttcgtatcccagggtgtaacaaagatccgtctcactggaggcgagccaacagttaggcgagatatcctaccattgatgcgacagattggagctttgagaacacatggactgagagaattatgtctgacgacaaacgggttgacactcagccggaaacttgaggggatggttgaggcaggtttgactggggttaatctcagcctcgacactcttgatccttggcaattccagatcatgacccgacgtaaaggctttgacgccgtcatgcgaagcatcgaaaaggttttagagatgaacaagcatggtgcaggaatcaaattaaaaatcaattcggtcgttatgaggggcgtcaacgaccgggagatcctgccatttgttgagatgacgcgggaaaaagatatcgaggtcagattcatcgagtacatgccatttgacggaaacaagtggaacaaaggtaagatgttcagctactctgagatgctggacgtgatcaaacaaaagcaccctagcctcgagcagctacaaggtcacaagaacgacacgagcaagacttataagatacctggatttgtgggtagtctcggcttcatcacgagcatgacacacaatttctgtggcacttgcaatcgcctacgtatcacaaacgatgggaatctcaaagtgtgcctgttcggcaacgctgaggtttcactacgagacattctgaggaaatctaatagcggagagccgattgatgaggaggctttcgaagccatgaagcagatcgaaatggacagacgtcagggtctaatctcaccatcaacaccactcgggatggtaccgaatgagcaggagctgctggacgtgatcggtatcgcagtgaaaggcaagaaagaaaagcacgccggcattggcgaacttgaacacttgaagaaccgaccgatgatcctgatagatccgcagagttgcaggtctaacggtaattatcacatttcgctttggaggccggactatagagcaaccgcacggggcaatcatccacttatccatatgtcgtcactctcagcattgtcacgcagccaagtgcatttgcagcaagttaggatgctctcgagcacaacatcacgtttggaacgcaagaaggaggcgatcaagctgacccatgttaccgaatctggttcagctcatatggtatcaatatcggacaaaacaccgactaaaagggtagccaaggcgacctgcacagtccgctttgcagagccccaggcatgcaaactcattaaggagagtcaaatgaagaagggcgatgttctgggtgtagcccgcgtcgctggcatcatggccgcaaaaaggacatcagatttgattcctctttgccaccccatcgctttgtcaaaagtgaccgtggaccttgaggtcgtacaaaatgacggcgatgtcggtcgcatcgatatccaagcaacggtggcttgcgagggcaagactggcgtcgaaatggaagcgttgaccgctgcttcgacggcggcgctaaccatctacgatatgtgtaaagccgtggataagaaaatgtcgattgatgggctcagagtaatcttgaaggaaggcggtaagagtggacgctggatagacggtgtacaggatcaaacacatcgctcaccggaatccgacccggaagaacgttgacactcatgttcctacaatcgcccctatttgtttgttagtctctgtacgtcatcgcgatgccgtcaatcttatctcttatcacggccggcaggcccttgcgtcttacaggcttcaatatcagaccattccggcattttggacatgcatccatagtgtatgcatgcttacaagtcagcgtagagtggtaatgcgtaggcactgggacaaacgtatgatactctcaataaaacgatcgatcactcatcgtcgatctgagcgggccactggctttcgtaacttgcacctcaagacgatctacaatctactttgtaatatatcacatttatgcttggatcttattactgtcagttatagcggatatgtctaagaatcgtcggcatagtcacgactgcatagtgaaatgaaggcttgcttagatggaat

SEQ ID NO: 20529 - DNA, 1560 bp, Muscodor strobelii
  misc_feature: SGI cDNA ID NO. 566932
  misc_feature: Encodes the peptide sequence at SEQ ID NO 20530
atgcattttacaaaaccattcaaatcatcgcctcacagtctaccaagtcccgacgggaaatatgtggctacaatattgcagtctagcagcgttattgtacgatctatccagtctctggccatcattcgaaccataaaactacctccggatctctcgggtggtgtaacatacttcttatggtcgccttcttctacatccgttctccttgcagctgctgaacaggttcacgtgttttctgcaatagatgggaattttcacggcagtctacagattcctcagcctttagccgctaaatcaacatgtatctcttttgggagtagggacgatgaaatctttgtttggtctgcctttggcatcaagctgaccgttgccaatctcacctcgtccagagccgtggagattagcaaccccaaattctacaatgccgtgtctgcaccgaggggttgttctttacggcacaaaaccaaccatcttgcattacttatccgggtctcaggcaaggacattattagcatccatccagccgatacacgggagacccaacgatcttggtctccagatactatcgatgcacaaggcatagcgtggacgccagatgggaagtggttggtcgtgtgggaatcctccgctcatggcaacagggtccttttctataaccccgacggccacatgttcaaagattggcgtggcggtcattccgaccctgcaaaaggtgacatggatcagtttgatactggtgtcaaaacgattggtttcaccccaaatgggcgatacacagtagtctctaacggctccaatactatttgtgtactcaatgatcggcttgcagaacgcatgcggctcaatcacatctaccctattcaacctaaggagacactcaagatctggcaagaacatatcaatttgaagactggccggccagttgagccaaccttcgctcaagccatgcatgctgttaccccaccaggtctgacgcctagcaccggcccagagccacggccaggctgcaatcttctcacattcgattcttcgtcatgtctacttgcttctaggctagatgacgcgccaagcacgatctggatctgggatgttccctcatgtgagctgcgagcggttctgatgtatcactccaatgttatcaaagcagaatggcatcctttaatcccggaacttttactcataagatgcgaaggtgaagattacaatagccttgcatttgtctgggatcccctctgcgacggcccctgttcgatcgattttttgcggcacttacccaatggaaaagtcaatggcagagctgaagtgtcttggctaaagatagccaatgaggctccagcactcttcttcacggaccatgcgactggagttctcgcagcaattgcagatgcagatgcagaagatttagtctggggcgaaccatcagcgcttctgacaatcgaatcaccaacagacgcgaacactccaagcgatcattctgatgatagaagcggcagcgatatggatgatggaatgagccaaatggatgacacgttccacttcaaaaaaagtcccgtgtcttga

SEQ ID NO: 20530 - protein, 519 aa, Muscodor strobelii
  misc_feature: SGI Peptide ID NO. 566932
  misc_feature (1)..(514): NCBI GI: 256732688 Blast Desc: NECHADRAFT_79129 [Nectria haematococca mpVI 77-13-4]
  misc_feature (1)..(515): NCBI GI: 171686208 Blast Desc: protein product [Podospora anserina] gi|170943065|emb|CAP68718.1| protein product [Podospora anserina]
  misc_feature (23)..(514): NCBI GI: 46125047 Blast Desc: FG06901.1 [Gibberella zeae PH-1]
  misc_feature (34)..(515): NCBI GI: 85075572 Blast Desc: NCU00497 [Neurospora crassa OR74A] gi|28916799|gb|EAA26552.1| [Neurospora crassa OR74A]
  misc_feature (1)..(458): NCBI GI: 261358177 Blast Desc: WD40 domain-containing protein [Verticillium albo-atrum VaMs.102]
  misc_feature (95)..(515): NCBI GI: 116207736 Blast Desc: CHGG_03161 [Chaetomium globosum CBS 148.51] gi|88183758|gb|EAQ91226.1| CHGG_03161 [Chaetomium globosum CBS 148.51]
  misc_feature (29)..(460): NCBI GI: 145614214 Blast Desc: MGG_08900 [Magnaporthe grisea 70-15] gi|145021156|gb|EDK05285.1| MGG_08900 [Magnaporthe grisea 70-15]
  misc_feature (75)..(516): NCBI GI: 156051074 Blast Desc: SS1G_06944 [Sclerotinia sclerotiorum 1980] gi|154704722|gb|EDO04461.1| SS1G_06944 [Sclerotinia sclerotiorum 1980]
  misc_feature (252)..(516): NCBI GI: 154295257 Blast Desc: BC1G_13442 [Botryotinia fuckeliana B05.10] gi|150844169|gb|EDN19362.1| BC1G_13442 [Botryotinia fuckeliana B05.10]
  misc_feature (16)..(449): NCBI GI: 212531919 Blast Desc: WD40 domain protein [Penicillium marneffei ATCC 18224] gi|210071480|gb|EEA25569.1| WD40 domain protein [Penicillium marneffei ATCC 18224]
MHFTKPFKSSPHSLPSPDGKYVATILQSSSVIVRSIQSLAIIRTIKLPPDLSGGVTYFLWSPSSTSVLLAAAEQVHVFSAIDGNFHGSLQIPQPLAAKSTCISFGSRDDEIFVWSAFGIKLTVANLTSSRAVEISNPKFYNAVSAPRGCSLRHKTNHLALLIRVSGKDIISIHPADTRETQRSWSPDTIDAQGIAWTPDGKWLVVWESSAHGNRVLFYNPDGHMFKDWRGGHSDPAKGDMDQFDTGVKTIGFTPNGRYTVVSNGSNTICVLNDRLAERMRLNHIYPIQPKETLKIWQEHINLKTGRPVEPTFAQAMHAVTPPGLTPSTGPEPRPGCNLLTFDSSSCLLASRLDDAPSTIWIWDVPSCELRAVLMYHSNVIKAEWHPLIPELLLIRCEGEDYNSLAFVWDPLCDGPCSIDFLRHLPNGKVNGRAEVSWLKIANEAPALFFTDHATGVLAAIADADAEDLVWGEPSALLTIESPTDANTPSDHSDDRSGSDMDDGMSQMDDTFHFKKSPVS

SEQ ID NO: 20531 - DNA, 4711 bp, Muscodor strobelii
  misc_feature: SGI EST ID NO. CUFF.48136.0
  misc_feature: Variant of the nucleotide sequence at SEQ ID NO 20529
gtcaggggaccgaaagaatcgtatcgtgagcatcgcagcaggccgaggtcctgttgaaagcaccttggacaccagcgccatgcattttacaaaaccattcaaatcatcgcctcacagtctaccaagtcccgacgggaaatatgtggctacaatattgcagtctagcagcgttattgtacgatctatccagtctctggccatcattcgaaccataaaactacctccggatctctcgggtggtgtaacatacttcttatggtcgccttcttctacatccgttctccttgcagctgctgaacaggttcacgtgttttctgcaatagatgggaattttcacggcagtctacagattcctcagcctttagccgctaaatcaacatgtatctcttttgggagtagggacgatgaaatctttgtttggtctgcctttggcatcaagctgaccgttgccaatctcacctcgtccagagccgtggagattagcaaccccaaattctacaatgccgtgtctgcaccgaggggttgttctttacggcacaaaaccaaccatcttgcattacttatccgggtctcaggcaaggacattattagcatccatccagccgatacacgggagacccaacgatcttggtctccagatactatcgatgcacaaggcatagcgtggacgccagatgggaagtggttggtcgtgtgggaatcctccgctcatggcaacagggtccttttctataaccccgacggccacatgttcaaagattggcgtggcggtcattccgaccctgcaaaaggtgacatggatcagtttgatactggtgtcaaaacgattggtttcaccccaaatgggcgatacacagtagtctctaacggctccaatactatttgtgtactcaatgatcggcttgcagaacgcatgcggctcaatcacatctaccctattcaacctaaggagacactcaagatctggcaagaacatatcaatttgaagactggccggccagttgagccaaccttcgctcaagccatgcatgctgttaccccaccaggtctgacgcctagcaccggcccagagccacggccaggctgcaatcttctcacattcgattcttcgtcatgtctacttgcttctaggctagatgacgcgccaagcacgatctggatctgggatgttccctcatgtgagctgcgagcggttctgatgtatcactccaatgttatcaaagcagaatggcatcctttaatcccggaacttttactcataagatgcgaaggtgaagattacaatagccttgcatttgtctgggatcccctctgcgacggcccctgttcgatcgattttttgcggcacttacccaatggaaaagtcaatggcagagctgaagtgtcttggctaaagatagccaatgaggctccagcactcttcttcacggaccatgcgactggagttctcgcagcaattgcagatgcagatgcagaagatttagtctggggcgaaccatcagcgcttctgacaatcgaatcaccaacagacgcgaacactccaagcgatcattctgatgatagaagcggcagcgatatggatgatggaatgagccaaatggatgacacgttccacttcaaaaaaagtcccgtgtcttgatatcctagctacctgaaaaaagatgactttgtcacattgtccgacaaatgaaaatcagaatcatgttccagtattctggtatatcgtcttaggaccccagcccggaagcagctcgtcacaatccggtccttggcgaaatgacccaacggtactcagcaattgctcaggcaatgatccatcctcgtggaaacctgatgtagaattccttgcacgaacatgtcagacgctcattcgagccatcgattacattggaaatttgaaggtgcaatgaaacggtgttggatctgccgatgaccgtcctcaacgccatcggtcaacatgcgggtaaatcactgatcctagttctttgcgagcataatagctgccaacacctgcaggaaaaagtaatagatgcacgacgatgttcttgggcagcattctatccaaagctcgtgttttctgcattctgcatatgttttctaccaaccagaatatcctgtggcttgccggcgtaattgttgatcctttgagcctacctgaacattccatgacgactgtttgttgacaaagggcaagagactatgcagtaattccgttgcgtatcatccttagccttagctgctaaatgcaggcgatctcgaaccccatggatggcatcttacccccacaagtgaccttgctcgcatcagacgcgttcattttagcaaagaggtatggtttgcaaccgggtacctggaatcagacactttcctaggtatcttgccccacacaaacctagaccttgtcaagttgtttccgaataccacatgtctaattcgctgctcaatgctactgttactgtatgcaaccttttccgttctggtccttggtcatctcggatatgtgatgctgtttcccaacaagttagcattgcatccttgcgatggctcacccgtgctcgcagctcgcggtctattgcatttgcacgtctggaagtacgaacagccaccgtacatcaagccggcgtgggtgggtactatcggtcactaacaagtatgatacggtacctcctcgcatatactagaggaacatcaaataaacatttggatcccgggaggtacatcgttgtaaatagtcttctgcaggctcgctacagatatcaccaagtcctacatcatgacgccaatttgctcaaggttgtattgcgtggctgctcagatccagcgaacgctgaagtgatatacaacttgttttgtgtaataaaactaccatttcccgtatcgaattcacaccaattcactcatcgttcgcctcgtacaacatatatagacatagtgatcggatcacttcctcgactaaaccgtctcgccggacttcccggccttatctttctcaagcacacgaaaagccgacttcattttatgcggtatcccattctacgatgggatcagagatcatctaccaagagcagagaccaatcaaggggacgattacggccatggcaccgcctggtgacgacacgggctactactatattccagtggcaggtgtaagtcgatctgaatatgctttgcgttcctctgctcaacaagcttgtattccagctcccctggcagacgtcgtggcagcaactcaaagaccatgtgcgaaccgtctgtccggtagaacgagccgaagttcacgatattaccaatggccatgtggttctgaagggccgggacaattttgatgcagctttccggctactaaatggaggaatctttaaaggccgagcactaatcgcttatgggacgaatacagaccagtgggttacaattaaacagcgtctagatagccagggagcttcgccaaggctgtctagagtcccagaactcgccagtcaactcacgcagtacacgacgtcgcctctgttacctgttgcgtctagcagtagctctgtacgttagattgactcgggcgaaacgttttctcttttatgaaatgagccacaagtcactgattgtcacagtgggtagctaatagcccaggctcgtcttccatgctgagccaggtgaatgactctttgccctgctatccgaccactgcaccttacggaaatggaacaacggctgctctgtactcaactgcaaatggatcaattggagcttctgtgcacccaacatcttcgggagcgacctactcaacgacctcagccaatacttattatgatgtcgagcaccagacaagcgctcattggtctccatatgacgaacggcaaacgtgctatcatgacaattcttacggcagtaatgggacacctttcgaggcttcgagtcgtggtaaagacactggcggggtctctacaaagaagaaaaagatcatcgtgaggcacctcccgtctcgggcaacatttgagcaaatatgggacatggtccaccgcgaagttccgagcgcagaggttaagaaactaagcgtacccccggcagacgatgctgagaaaaatcgcggaattgcgttcatcacttttgctaccgagtcgatggctaacgaagtgatcaataagctgaatggctttcagtacaatgaccgcatcttggaggcccaccatacaaaagaaggtgtttctgactacgagaatgcccatggtctccgcaagggcagtgtgagccatcatcattctcagcattcgcgtcgtgagcgtcgcgacgagaaagacagaaagggcaaggagaaagaaaaaactcataaacatccaagttcgagtgaaaagaagagcaaatcttcttcctctaagtcggaagtggtcattgcacatggctcatcttcaaaatactaaaacgacaaagcccctctattttcgtcgcactatagcgaggttcctaccaagcgaagcaaaacgaggctaacgtctttcgatcgattctctagcattttctcatatgcgagcggcgggaggcaagtacagtgttctcttctcttttacttttcgctttctgaagatgtatttccacgggtggcaatacaccctcacttgtttgcgtctcacagcatttcacagcatgttcatcaaagtgtacctaaaagccactccttcgtcagtcttcgacatagcatagtaatatcacaccgataatg

SEQ ID NO: 20532 - DNA, 1248 bp, Muscodor strobelii
  misc_feature: SGI cDNA ID NO. 566933
  misc_feature: Encodes the peptide sequence at SEQ ID NO 20533
atgggatcagagatcatctaccaagagcagagaccaatcaaggggacgattacggccatggcaccgcctggtgacgacacgggctactactatattccagtggcaggtctcccctggcagacgtcgtggcagcaactcaaagaccatgtgcgaaccgtctgtccggtagaacgagccgaagttcacgatattaccaatggccatgtggttctgaagggccgggacaattttgatgcagctttccggctactaaatggaggaatctttaaaggccgagcactaatcgcttatgggacgaatacagaccagtgggttacaattaaacagcgtctagatagccagggagcttcgccaaggctgtctagagtcccagaactcgccagtcaactcacgcagtacacgacgtcgcctctgttacctgttgcgtctagcagtagctcttgggtagctaatagcccaggctcgtcttccatgctgagccaggtgaatgactctttgccctgctatccgaccactgcaccttacggaaatggaacaacggctgctctgtactcaactgcaaatggatcaattggagcttctgtgcacccaacatcttcgggagcgacctactcaacgacctcagccaatacttattatgatgtcgagcaccagacaagcgctcattggtctccatatgacgaacggcaaacgtgctatcatgacaattcttacggcagtaatgggacacctttcgaggcttcgagtcgtggtaaagacactggcggggtctctacaaagaagaaaaagatcatcgtgaggcacctcccgtctcgggcaacatttgagcaaatatgggacatggtccaccgcgaagttccgagcgcagaggttaagaaactaagcgtacccccggcagacgatgctgagaaaaatcgcggaattgcgttcatcacttttgctaccgagtcgatggctaacgaagtgatcaataagctgaatggctttcagtacaatgaccgcatcttggaggcccaccatacaaaagaaggtgtttctgactacgagaatgcccatggtctccgcaagggcagtgtgagccatcatcattctcagcattcgcgtcgtgagcgtcgcgacgagaaagacagaaagggcaaggagaaagaaaaaactcataaacatccaagttcgagtgaaaagaagagcaaatcttcttcctctaagtcggaagtggtcattgcacatggctcatcttcaaaatactaa

SEQ ID NO: 20533 - protein, 415 aa, Muscodor strobelii
  misc_feature: SGI Peptide ID NO. 566933
  misc_feature (304)..(338): Pfam Id: PF00076 Pfam Desc: RNA recognition motif. (a.k.a. RRM, RBD, or RNP domain)
  misc_feature (13)..(111): NCBI GI: 85075568 Blast Desc: NCU00496 [Neurospora crassa OR74A] gi|28916798|gb|EAA26551.1| [Neurospora crassa OR74A]
  misc_feature (23)..(344): NCBI GI: 156051066 Blast Desc: [Sclerotinia sclerotiorum 1980] gi|154704718|gb|EDO04457.1| [Sclerotinia sclerotiorum 1980]
  misc_feature (17)..(345): NCBI GI: 171686206 Blast Desc: protein product [Podospora anserina] gi|170943064|emb|CAP68717.1| protein product [Podospora anserina]
  misc_feature (23)..(108): NCBI GI: 154295267 Blast Desc: [Botryotinia fuckeliana B05.10] gi|150844174|gb|EDN19367.1| [Botryotinia fuckeliana B05.10]
  misc_feature (77)..(344): NCBI GI: 46125049 Blast Desc: FG06902.1 [Gibberella zeae PH-1]
  misc_feature (23)..(112): NCBI GI: 256732689 Blast Desc: [Nectria haematococca mpVI 77-13-4]
  misc_feature (23)..(108): NCBI GI: 116207738 Blast Desc: [Chaetomium globosum CBS 148.51] gi|88183759|gb|EAQ91227.1| [Chaetomium globosum CBS 148.51]
  misc_feature (2)..(68): NCBI GI: 262110354 Blast Desc: RNA binding protein, [Phytophthora infestans T30-4]
MGSEIIYQEQRPIKGTITAMAPPGDDTGYYYIPVAGLPWQTSWQQLKDHVRTVCPVERAEVHDITNGHVVLKGRDNFDAAFRLLNGGIFKGRALIAYGTNTDQWVTIKQRLDSQGASPRLSRVPELASQLTQYTTSPLLPVASSSSSWVANSPGSSSMLSQVNDSLPCYPTTAPYGNGTTAALYSTANGSIGASVHPTSSGATYSTTSANTYYDVEHQTSAHWSPYDERQTCYHDNSYGSNGTPFEASSRGKDTGGVSTKKKKIIVRHLPSRATFEQIWDMVHREVPSAEVKKLSVPPADDAEKNRGIAFITFATESMANEVINKLNGFQYNDRILEAHHTKEGVSDYENAHGLRKGSVSHHHSQHSRRERRDEKDRKGKEKEKTHKHPSSSEKKSKSSSSKSEVVIAHGSSSKY

SEQ ID NO: 20534 - DNA, 4711 bp, Muscodor strobelii; identical to SEQ ID NO: 20531
  misc_feature: SGI EST ID NO. CUFF.48136.0
  misc_feature: Variant of the nucleotide sequence at SEQ ID NO 20532

SEQ ID NO: 20535 - DNA, 3039 bp, Muscodor strobelii
  misc_feature: SGI cDNA ID NO. 566934
  misc_feature: Encodes the peptide sequence at SEQ ID NO 20536
atggcggaaatcaaggatgaaactcaagatcgcgctgtggtagtcccatctgaggaagcacctgcaacatccaccgatgtcactcgtagtgaggacacagattccctgacgagaacacaaactacatgtaaatttccgcatcttgagagagctattaccttggagtccataggttctgttcagcctcttttcaaagtcagtgtcgaaattctcaaagaacttgcagatgtccttgacgcttccaaaactgcaacaaacgtcactcgctgggtggaacaaatccaacaacttattcaacaagccaagactccccatacagtcattggtgttatcggcggcacggggcaaggaaaaagctctgtcattaatgctttactaggagaggagaaaatcttgcccacgaactgtatgagagcctgtacggcggtaatcaccgagctagcctggaatcaatccgaagaccccaaccgcgtctattcggcagaaattgaattcatttcggcgcaagaatggcatcaagaactcatgtatctatatcaggacttcgccgagaccagtgacgagctcgagattagcaacgcaaacaccgatccaggtgttgcctgggccaaaatccaagcagtatatcctcacatgacgaaagaggccttagctttgactgatttagcatcacttgccaaaagttctacggtcaaagatattctcggaactacaaagacagtacacggatcaaatgcaaagcagttttacaaaagcatacgagtgtacgtcgacagcagagaaaagctcaaattttccgactctggtgagacagacagtgatgcggcgcagtttggaggagttagagaactctggccactgataaaagtggtccgaatctataccaaagctgacgtcctgtcgactggcgctgtgctggtagacctgcctggtgttgaggattctaacgccgcaagagcagcggtcgccgcaaagtacattgagaaatgcaacgcgctgtgggttgtcgccaacattacgcgagctaccgatgatggcgtagctcaaaagctccttggtcagtccttcaagcaacagcttcgatacgatggaaattattccaacgtcacattcatctgttccaagaccgacgagatcaatattgagtcagctgtcgagtcattgggactggctcgcgaatgggacgagtttgagaaagccgaacaagccaaaaagaaatgggaattgtcaggtaaccaaaagctacagaacgacaagaatcgcgcgcagtcgttgcacatgctgctgcaagagattgaccaacaactttaccattgggcaatttatagcgatcgtcaagcgggaggcttgacttgcaagccaccttcgcctatgagacgaaaagcggctcgatcattcgtcacatcgacttcgcaaaaacggcgtaaactgcggtctcaagatgagtccgaagacattgcggagtatgcatcagccggggatcattggaaggatatcgacgcaaatatgcctcaagttgcggaaaatgaagcagtctcagaggagcaaatccaagatgtcatcaatcatcttcgatcaaagaaggaatcagtcgacaaagataagtcgcagcttgatcaggccatcatggataacgaggagcaggcagaaacgattgaagatgaatattaccagttgaaggataggttgagatgcctatgtatctctcgacgaaatgagtattctcggagggctattcaggaccagttcgcattaggcatcaaagagcttgacgaagagaatgctgagtctgaaatccttggtactactgacgcagaaaagatctcccgagactacaacaaaattgcacgctccgttgctgtattctgtgtcagtagtcaggcttaccagtcctttcggaaggacgatgagcctgacggctttgagcatccagcggccaccgaaatgcctcaacttattgagcacacgaagaatctgactgagggcagacgccttgcaaagaccaagtcttttctgaacgatctacttcaggtcctcaactctctctacatttggtcgtcagaacctgacttcgatattccgctgaccgttgatgaaaaacgagatgaaatggctctggttaaatctggaatattgaagctcgacgaggaatttaagatagctgtcaaaaagcttacagagcgatctaggctaatcgtagctaaacgcctgtttgatcgtctctacaaatcagccgatgacgctgctgcacgcgcatcagatatcgctagcaaatggccaagacgcaaaccaggtgatggtggtctaccagccctgtcatacaaggcaacttgtcgtcgcagcggagtattctcaggaagaatgggtcccagagatttcaatgaagatcttaccttgcctttgaagcgacgtctagcccttcaatgggaaaccacgttctcaagaaaaattccggaagctctgaccgaattcagtgaaagctctgagaagcttctacagacttttcatgaaccattctatcgccgcttaaaggtcaaggccacgttgaagagtctcaacattcttcaaactcaactgaaagctcgtgcttctggagttaacagtatggttgactcttttcgtgaggaaatcacggctctgcaaagggatgcaagtcgtagcctaaagccagccatccagtcccagatgaaggagacctacgaatcttgtgccgctgaatctggcaacgggatgttcaaacgtatgcagggagtcatgatcgacgatctgactatgttaggtcaaaacatctttcgcggcgccattggcccactgcaagccaaactcatcgccatgtgcgataaaataaatactgaccttgacacgaacattgccaagatgttagatcagatgacactggattactctaattacattatgggtacagacagtactggagactcgaaaaggttcagagagcatatttgcaagttcttgagcgaagttgactgccgctttcaatctccatcatcatcggattttatccagttggaagattga

SEQ ID NO: 20536 - protein, 1012 aa, Muscodor strobelii
  misc_feature: SGI Peptide ID NO. 566934
  misc_feature (66)..(981): NCBI GI: 116194674 Blast Desc: CHGG_03935 [Chaetomium globosum CBS 148.51] gi|88179848|gb|EAQ87316.1| CHGG_03935 [Chaetomium globosum CBS 148.51]
  misc_feature (67)..(1000): NCBI GI: 169597729 Blast Desc: SNOG_01652 [Phaeosphaeria nodorum SN15] gi|160707579|gb|EAT91301.2| SNOG_01652 [Phaeosphaeria nodorum SN15]
  misc_feature (68)..(975): NCBI GI: 119473545 Blast Desc: NFIA_000950 [Neosartorya fischeri NRRL 181] gi|119406801|gb|EAW16751.1| NFIA_000950 [Neosartorya fischeri NRRL 181]
  misc_feature (56)..(999): NCBI GI: 85108678 Blast Desc: NCU06980 [Neurospora crassa OR74A] gi|28924230|gb|EAA33384.1| [Neurospora crassa OR74A]
  misc_feature (22)..(988): NCBI GI: 39951585 Blast Desc: MGG_01435 [Magnaporthe grisea 70-15] gi|145020731|gb|EDK04860.1| MGG_01435 [Magnaporthe grisea 70-15]
  misc_feature (68)..(871): NCBI GI: 212535532 Blast Desc: conserved [Penicillium marneffei ATCC 18224] gi|210070321|gb|EEA24411.1| conserved [Penicillium marneffei ATCC 18224]
  misc_feature (56)..(1001): NCBI GI: 164423142 Blast Desc: NCU09015 [Neurospora crassa OR74A] gi|157069965|gb|EAA28913.2| [Neurospora crassa OR74A]
  misc_feature (65)..(716): NCBI GI: 242793394 Blast Desc: conserved [Talaromyces stipitatus ATCC 10500] gi|218718740|gb|EED18160.1| conserved [Talaromyces stipitatus ATCC 10500]
  misc_feature (86)..(979): NCBI GI: 154309023 Blast Desc: BC1G_07406 [Botryotinia fuckeliana B05.10] gi|150852449|gb|EDN27641.1| BC1G_07406 [Botryotinia fuckeliana B05.10]
  misc_feature (88)..(970): NCBI GI: 225556681 Blast Desc: conserved [Ajellomyces capsulatus G186AR]
MAEIKDETQDRAVVVPSEEAPATSTDVTRSEDTDSLTRTQTTCKFPHLERAITLESIGSVQPLFKVSVEILKELADVLDASKTATNVTRWVEQIQQLIQQAKTPHTVIGVIGGTGQGKSSVINALLGEEKILPTNCMRACTAVITELAWNQSEDPNRVYSAEIEFISAQEWHQELMYLYQDFAETSDELEISNANTDPGVAWAKIQAVYPHMTKEALALTDLASLAKSSTVKDILGTTKTVHGSNAKQFYKSIRVYVDSREKLKFSDSGETDSDAAQFGGVRELWPLIKVVRIYTKADVLSTGAVLVDLPGVEDSNAARAAVAAKYIEKCNALWVVANITRATDDGVAQKLLGQSFKQQLRYDGNYSNVTFICSKTDEINIESAVESLGLAREWDEFEKAEQAKKKWELSGNQKLQNDKNRAQSLHMLLQEIDQQLYHWAIYSDRQAGGLTCKPPSPMRRKAARSFVTSTSQKRRKLRSQDESEDIAEYASAGDHWKDIDANMPQVAENEAVSEEQIQDVINHLRSKKESVDKDKSQLDQAIMDNEEQAETIEDEYYQLKDRLRCLCISRRNEYSRRAIQDQFALGIKELDEENAESEILGTTDAEKISRDYNKIARSVAVFCVSSQAYQSFRKDDEPDGFEHPAATEMPQLIEHTKNLTEGRRLAKTKSFLNDLLQVLNSLYIWSSEPDFDIPLTVDEKRDEMALVKSGILKLDEEFKIAVKKLTERSRLIVAKRLFDRLYKSADDAAARASDIASKWPRRKPGDGGLPALSYKATCRRSGVFSGRMGPRDFNEDLTLPLKRRLALQWETTFSRKIPEALTEFSESSEKLLQTFHEPFYRRLKVKATLKSLNILQTQLKARASGVNSMVDSFREEITALQRDASRSLKPAIQSQMKETYESCAAESGNGMFKRMQGVMIDDLTMLGQNIFRGAIGPLQAKLIAMCDKINTDLDTNIAKMLDQMTLDYSNYIMGTDSTGDSKRFREHICKFLSEVDCRFQSPSSSDFIQLED

SEQ ID NO: 20537 - DNA, 553 bp, Muscodor strobelii
  misc_feature: SGI EST ID NO. CUFF.48149.0
  misc_feature: Variant of the nucleotide sequence at SEQ ID NO 20535
tctctctacatttggtcgtcagaacctgacttcgatattccgctgaccgttgatgaaaaacgagatgaaatggctctggttaaatctggaatattgaagctcgacgaggtatctatgtccaccatcctgatagttcttttcgctgacagaagaaacaggaatttaagatagctgtcaaaaagcttacagagcgatctaggctaatcgtagctaaacgcctgtttgatcgtctctacaaatcagccgatgacgctgctgcacgcgcatcagatatcgctagcaaatggccaagacgcaaaccaggtgatggtggtctaccagccctgtcatacaaggcaacttgtcgtcgcagcggagtattctcaggaagaatgggtcccagagatttcaatgaagatcttaccttgcctttgaagcgacgtctagcccttcaatgggaaaccacgttctcaagaaaaattccggaagctctgaccgaattcagtgaaagctctgagaagcttctacagacttttcatgaaccattctatcgccgcttaaaggtcaaggccac

SEQ ID NO: 20538 - DNA, 795 bp, Muscodor strobelii
  misc_feature: SGI cDNA ID NO. 566935
  misc_feature: Encodes the peptide sequence at SEQ ID NO 20539
atgtcgaccatcacctcaacggcgctccagagcgcatatccacccatcataccgctgcccttcaactcgaaccagcctcagacaatccgcctttacccgctctccaactacacattcggcgttaaagagacgcagccagaggaagacccgtcggtcattgcgcgactcaagcgtctagaggagcactacacagcccacggcatgcgccgcacgtgcgagggcatcctcgtctgccacgaacacaaccacccgcacatcctcatgctccagatcgccaatgccttcttcaagctacctggtgattacttgcgccccgaagacgacgagatagagggctttaaatcacggctagacgaacgcttggcacccgtcggcagactgggagagggcgaggaggcgggaaactggcaggttggtgattgtctcgctcagtggtggagaccgaacttcgagacgttcatgtaccccttcatacccgcccatgtcacgcgaccgaaggagtgcaagaagctctatttcattcagcttccagagagcaagatcctcagcgttccaaagaacatgaaactactagccgtccctctgttcgagctttacgacaacacagcacgatacggcccccagctctccgccataccgcatctactcagccgatacaacttcgagttcgtgaacgaggacggtcaggtggtggccgcaacgcccggctccggagatgggtacgtgccgcggaccaaggtcctgtcagggggcgatgaggatatgaaagatgtcaaacctgagaacggtgcatag

SEQ ID NO: 20539 - protein, 264 aa, Muscodor strobelii
  misc_feature: SGI Peptide ID NO. 566935
  misc_feature (1)..(263): NCBI GI: 85089870 Blast Desc: NCU09014 [Neurospora crassa OR74A] gi|28919478|gb|EAA28912.1| NCU09014 [Neurospora crassa OR74A]
  misc_feature (1)..(264): NCBI GI: 39952067 Blast Desc: conserved [Magnaporthe grisea 70-15] gi|145020484|gb|EDK04613.1| conserved [Magnaporthe grisea 70-15]
  misc_feature (1)..(264): NCBI GI: 116207818 Blast Desc: conserved [Chaetomium globosum CBS 148.51] gi|88183799|gb|EAQ91267.1| conserved [Chaetomium globosum CBS 148.51]
  misc_feature (1)..(264): NCBI GI: 46125059 Blast Desc: FG06907.1 [Gibberella zeae PH-1]
  misc_feature (1)..(264): NCBI GI: 261358168 Blast Desc: cleavage and polyadenylation specificity factor subunit 5 [Verticillium albo-atrum VaMs.102]
  misc_feature (1)..(264): NCBI GI: 256732691 Blast Desc: [Nectria haematococca mpVI 77-13-4]
  misc_feature (1)..(264): NCBI GI: 156048430 Blast Desc: conserved [Sclerotinia sclerotiorum 1980] gi|154693343|gb|EDN93081.1| conserved [Sclerotinia sclerotiorum 1980]
  misc_feature (1)..(264): NCBI GI: 171686284 Blast Desc: protein product [Podospora anserina] gi|170943103|emb|CAP68756.1| protein product [Podospora anserina]
  misc_feature (1)..(253): NCBI GI: 169771819 Blast Desc: [Aspergillus oryzae RIB40] gi|238485582|ref|XP_002374029.1| cleavage and polyadenylation specific factor 5 [Aspergillus flavus NRRL3357] protein product 5
  misc_feature (1)..(257): NCBI GI: 145251974 Blast Desc: An16g01870 [Aspergillus niger] gi|134083042|emb|CAK42804.1| protein product [Aspergillus niger]
MSTITSTALQSAYPPIIPLPFNSNQPQTIRLYPLSNYTFGVKETQPEEDPSVIARLKRLEEHYTAHGMRRTCEGILVCHEHNHPHILMLQIANAFFKLPGDYLRPEDDEIEGFKSRLDERLAPVGRLGEGEEAGNWQVGDCLAQWWRPNFETFMYPFIPAHVTRPKECKKLYFIQLPESKILSVPKNMKLLAVPLFELYDNTARYGPQLSAIPHLLSRYNFEFVNEDGQVVAATPGSGDGYVPRTKVLSGGDEDMKDVKPENGA

SEQ ID NO: 20540 - DNA, 1976 bp, Muscodor strobelii
  misc_feature: SGI EST ID NO. CUFF.48242.0
  misc_feature: Variant of the nucleotide sequence at SEQ ID NO 20538
tgcaccgagcttcaggttagcaggagcgacctgaggcctagggacttaaaagacatttacgtctaagcctcaacaatgacatcgcatgaccatcaagtattgtaaaatctctgggctcaagcatcacgcattctttacaccccagacggtttgcacgcaaccatgtcgaccatcacctcaacggcgctccagagcgcatatccacccatcataccgctgcccttcaactcgaaccagcctcagacaatccgcctttacccgctctccaactacacattcggcgttaaagagacgcagccagaggaagacccgtcggtcattgcgcgactcaagcgtctagaggagcactacacagcccacggcatgcgccgcacgtgcgagggcatcctcgtctgccacgaacacaaccacccgcacatcctcatgctccagatcgccaatgccttcttcaagctacctggtgattacttgcgccccgaagacgacgagatagagggctttaaatcacggctagacgaacgcttggcacccgtcggcagactgggagagggcgaggaggcgggaaactggcaggttggtgattgtctcgctcagtggtggagaccgaacttcgagacgttcatgtaccccttcatacccgcccatgtcacgcgaccgaaggagtgcaagaagctctatttcattcagcttccagagagcaagatcctcagcgttccaaagaacatgaaactactagccgtccctctgttcgagctttacgacaacacagcacgatacggcccccagctctccgccataccgcatctactcagccgatacaacttcgagttcgtgaacgaggacggtcaggtggtggccgcaacgcccggctccggagatgggtacgtgccgcggaccaaggtcctgtcagggggcgatgaggatatgaaagatgtcaaacctgagaacggtgcatagtactgcgatatctggggtcacccggcctctttctagctctggggtattctggcatgttcaaaaagaataaggcgtttggagtataaagtggcctgcggtgcagagagccgttgtaatttcatggttaatgaggatatcataacaagcattcccgattcgccttttgccactctatctcaaccgtgggataactctaggccttctcgccttggatcgtagccatgacccgtcgcgtgtgcttcatatccctaaactccaagtaccagataccctgccacgttcccgttgcctgctctagtcagtaacttcttgtcttaacggcgggagaatatcgacttacaagtttgccatccttgatcggaatagtgacactcgcgccgataagcgcactcttgatatgcgcctgtgacgaacccattaatttcattcttcgcctttccattaactcaagaaaaccataccggcatatcatcccgtccctcagcactatgtctgtacagctcctggcccttagcgccaacctcaggcgcaatgcgatccagcgcatcactcatatccgccctaacatcctcatcccagttctcattcagactgagcgcacaactcgtatgctgcacgaacaaattgagaatcccgactttataccccctaatctcgggcagattctgcatcacctcgtcggtaatcaggtacgagcctctcgagcgaggggtcaagctgaagttcttctggaaccacatggtcggtggtggggggcccaagtttactggatcgcttccgggtttggaggggaatatgtggctgaaggggttgaggtagagaagagttgaagaccacagggagtggaagataccagggaatagagagattaggagtaaggtgaagagcaggattgtgatgaggttgtgtgaagatgcagatgctgtggatgacggcatcgcgacgatagcataggtaggtaggtgcgataggcaggttagaggtgggtagagtacactggttcgcgggttttggtgggg

SEQ ID NO: 20541 - DNA, 636 bp, Muscodor strobelii
  misc_feature: SGI cDNA ID NO. 566936
  misc_feature: Encodes the peptide sequence at SEQ ID NO 20542
atgccgtcatccacagcatctgcatcttcacacaacctcatcacaatcctgctcttcaccttactcctaatctctctattccctggtatcttccactccctgtggtcttcaactcttctctacctcaaccccttcagccacatattcccctccaaacccggaagcgatccagtaaacttgggccccccaccaccgaccatgtggttccagaagaacttcagcttgacccctcgctcgagaggctcgtacctgattaccgacgaggtgatgcagaatctgcccgagattagggggtataaagtcgggattctcaatttgttcgtgcagcatacgagttgtgcgctcagtctgaatgagaactgggatgaggatgttagggcggatatgagtgatgcgctggatcgcattgcgcctgaggttggcgctaagggccaggagctgtacagacatagtgctgagggacgggatgatatgccggcgcatatcaagagtgcgcttatcggcgcgagtgtcactattccgatcaaggatggcaaacttgcaacgggaacgtggcagggtatctggtacttggagtttagggatatgaagcacacgcgacgggtcatggctacgatccaaggcgagaaggcctag

SEQ ID NO: 20542 - protein, 211 aa, Muscodor strobelii
  misc_feature: SGI Peptide ID NO. 566936
  misc_feature (83)..(207): Pfam Id: PF01894 Pfam Desc: Uncharacterised protein family UPF0047
  misc_feature (27)..(211): NCBI GI: 46125061 Blast Desc: FG06908.1 [Gibberella zeae PH-1]
  misc_feature (67)..(211): NCBI GI: 171686298 Blast Desc: protein product [Podospora anserina] gi|170943110|emb|CAP68763.1| protein product [Podospora anserina]
  misc_feature (68)..(211): NCBI GI: 256733135 Blast Desc: [Nectria haematococca mpVI 77-13-4]
  misc_feature (15)..(210): NCBI GI: 145613405 Blast Desc: MGG_01675 [Magnaporthe grisea 70-15] gi|145020485|gb|EDK04614.1| MGG_01675 [Magnaporthe grisea 70-15]
  misc_feature (1)..(210): NCBI GI: 189209742 Blast Desc: PTRG_10872 [Pyrenophora tritici-repentis Pt-1C-BFP] gi|187977296|gb|EDU43922.1| PTRG_10872 [Pyrenophora tritici-repentis Pt-1C-BFP]
  misc_feature (66)..(211): NCBI GI: 261358167 Blast Desc: yjbQ [Verticillium albo-atrum VaMs.102]
  misc_feature (68)..(211): NCBI GI: 119499133 Blast Desc: UPF0047 domain protein [Neosartorya fischeri NRRL 181] gi|119414488|gb|EAW24427.1| UPF0047 domain protein [Neosartorya fischeri NRRL 181]
  misc_feature (68)..(211): NCBI GI: 70985254 Blast Desc: UPF0047 domain protein [Aspergillus fumigatus Af293] gi|66845761|gb|EAL86095.1| UPF0047 domain protein [Aspergillus fumigatus Af293] gi|159125944|gb|EDP51060.1| UPF0047 domain
  misc_feature (68)..(211): NCBI GI: 121719247 Blast Desc: UPF0047 domain protein [Aspergillus clavatus NRRL 1] gi|119404530|gb|EAW14906.1| UPF0047 domain protein [Aspergillus clavatus NRRL 1]
  misc_feature (68)..(211): NCBI GI: 145233751 Blast Desc: An02g11190 [Aspergillus niger] gi|134057182|emb|CAK44449.1| protein product [Aspergillus niger]
MPSSTASASSHNLITILLFTLLLISLFPGIFHSLWSSTLLYLNPFSHIFPSKPGSDPVNLGPPPPTMWFQKNFSLTPRSRGSYLITDEVMQNLPEIRGYKVGILNLFVQHTSCALSLNENWDEDVRADMSDALDRIAPEVGAKGQELYRHSAEGRDDMPAHIKSALIGASVTIPIKDGKLATGTWQGIWYLEFRDMKHTRRVMATIQGEKA

SEQ ID NO: 20543 - DNA, 1941 bp, Muscodor strobelii
  misc_feature: SGI EST ID NO. CUFF.48243.1
  misc_feature: Variant of the nucleotide sequence at SEQ ID NO 20541
ccccaccaaaacccgcgaaccagtgtactctacccacctctaacctgcctatcgcacctacctacctatgctatcgtcgcgatgccgtcatccacagcatctgcatcttcacacaacctcatcacaatcctgctcttcaccttactcctaatctctctattccctggtatcttccactccctgtggtcttcaactcttctctacctcaaccccttcagccacatattcccctccaaacccggaagcgatccagtaaacttgggccccccaccaccgaccatgtggttccagaagaacttcagcttgacccctcgctcgagaggctcgtacctgattaccgacgaggtgatgcagaatctgcccgagattagggggtataaagtcgggattctcaatttgttcgtgcagcatacgagttgtgcgctcagtctgaatgagaactgggatgaggatgttagggcggatatgagtgatgcgctggatcgcattgcgcctgaggttggcgctaagggccaggagctgtacagacatagtgctgagggacgggatgatatgccggcgcatatcaagagtgcgcttatcggcgcgagtgtcactattccgatcaaggatggcaaacttgcaacgggaacgtggcagggtatctggtacttggagtttagggatatgaagcacacgcgacgggtcatggctacgatccaaggcgagaaggcctagagttatcccacggttgagatagagtggcaaaaggcgaatcgggaatgcttgttatgatatcctcattaaccatgaaattacaacggctctctgcaccgcaggccactttatactccaaacgccttattctttttgaacatgccagaataccccagagctagaaagaggccgggtgaccccagatatcgcagtactatgcaccgttctcaggtttgacatctttcatatcctcatcgccccctgacaggaccttggtccgcggcacgtacccatctccggagccgggcgttgcggccaccacctgaccgtcctcgttcacgaactcgaagttgtatcggctgagtagatgcggtatggcggagagctgggggccgtatcgtgctgtgttgtcgtaaagctcgaacagagggacggctagtagtttcatgttctttggaacgctgaggatctctgggtgtttgtagattagcttctgttgcccacctaaacacccagtcagagaggatttgtgttaggtgactcactgctctctggaagctgaatgaaatagagcttcttgcactccttcggtcgcgtgacatgggcgggtatgaaggggtacatgaacgtctcgaagttcggtctccaccactgagcgagacaatcaccaacctgccagtttcccgcctcctcgccctctcccagtctgccgacgggtgccaagcgttcgtctagccgtgatttaaagccctctatctcgtcgtcttcggggcgcaagtaatcaccaggtagcttgaagaaggcattggcgatctggagcatgaggatgtgcgggtggttgtgttcgtggcagacgaggatgccctcgcacgtgcggcgcatgccgtgggctgtgtagtgctcctctagacgcttgagtcgcgcaatgaccgacgggtcttcctctggctgcgtctctttaacgccgaatgtgtagttggagagcgggtaaaggcggattgtctgaggctggttcgagttgaagggcagcggtatgatgggtggatatgcgctctggagcgccgttgaggtgatggtcgacatggttgcgtgcaaaccgtctggggtgtaaagaatgcgtgatgcttgagcccagagattttacaatacttgatggtcatgcgatgtcattgttgaggcttagacgtaaatgtcttttaagtccctaggcctcaggtcgctcctgctaacctgaagctcggtgca

SEQ ID NO: 20544 - DNA, 519 bp, Muscodor strobelii
  misc_feature: SGI cDNA ID NO. 566937
  misc_feature: Reduced expression when VOC is produced
  misc_feature: Encodes the peptide sequence at SEQ ID NO 20545
atgatctctcgcgtgtccatccgaagcgcatcgcggcttcagcagcccgccgctgccattcgacgatctttcgccgtctccgcccgacgctgcgacgctgctcccgccgccaaagccgagacgaccccagagaccaagagcgaggaggacagcctaggcctgaccgagaacctcgagcgcggcctcaagcaggcgcccaaccgcacagagatctggtccaggagccagaagccccgcgctgccgccatgaccggcccccgattcgagcagaccgacttcgacctccaacccgcatccaaagcagccatcgagctcattcataagcagcccgtccgatggacgcatgaccgtgttgtcgcctgtgacggtggcggtggccccgctggacaccctagaatttatatcaacaccgacaaacccgagatagcgtgctgcaactactgcggactgccctacgccaacgaacacaaccgaaagcacctggaatccctaccagaaacatcgtaccccctggcatag

SEQ ID NO: 20545 - protein, 172 aa, Muscodor strobelii
  misc_feature: SGI Peptide ID NO. 566937
  misc_feature (14)..(171): NCBI GI: 85078453 Blast Desc: NADH:ubiquinone oxidoreductase 18.4kD subunit [Neurospora crassa OR74A] gi|28917220|gb|EAA26933.1| NADH:ubiquinone oxidoreductase 18.4kD subunit [Neurospora crassa
  misc_feature (7)..(172): NCBI GI: 46125063 Blast Desc: FG06909.1 [Gibberella zeae PH-1]
  misc_feature (1)..(172): NCBI GI: 261358166 Blast Desc: VDBG_06704 [Verticillium albo-atrum VaMs.102]
  misc_feature (1)..(172): NCBI GI: 39941514 Blast Desc: MGG_05668 [Magnaporthe grisea 70-15] gi|145022360|gb|EDK06380.1| MGG_05668 [Magnaporthe grisea 70-15]
  misc_feature (21)..(172): NCBI GI: 171686162 Blast Desc: protein product [Podospora anserina] gi|170943042|emb|CAP68695.1| protein product [Podospora anserina]
  misc_feature (13)..(171): NCBI GI: 225679489 Blast Desc: NADH-ubiquinone oxidoreductase [Paracoccidioides brasiliensis Pb03] gi|226291219|gb|EEH46647.1| PADG_02745 [Paracoccidioides brasiliensis Pb18]
  misc_feature (13)..(171): NCBI GI: 27372069 Blast Desc: NADH-ubiquinone oxidoreductase [Paracoccidioides brasiliensis] gi|226281669|gb|EEH37235.1| NADH-ubiquinone oxidoreductase [Paracoccidioides brasiliensis Pb01]
  misc_feature (32)..(171): NCBI GI: 258571343 Blast Desc: UREG_03992 [Uncinocarpus reesii 1704] gi|237904745|gb|EEP79146.1| UREG_03992 [Uncinocarpus reesii 1704]
  misc_feature (54)..(171): NCBI GI: 154300628 Blast Desc: NADH-ubiquinone oxidoreductase [Botryotinia fuckeliana B05.10] gi|150856509|gb|EDN31701.1| NADH-ubiquinone oxidoreductase [Botryotinia fuckeliana B05.10]
  misc_feature (49)..(171): NCBI GI: 156048428 Blast Desc: SS1G_08945 [Sclerotinia sclerotiorum 1980] gi|154693342|gb|EDN93080.1| SS1G_08945 [Sclerotinia sclerotiorum 1980]
  misc_feature: Useful for introducing or modulating the production of volatile compounds
MISRVSIRSASRLQQPAAAIRRSFAVSARRCDAAPAAKAETTPETKSEEDSLGLTENLERGLKQAPNRTEIWSRSQKPRAAAMTGPRFEQTDFDLQPASKAAIELIHKQPVRWTHDRVVACDGGGGPAGHPRIYINTDKPEIACCNYCGLPYANEHNRKHLESLPETSYPLA

SEQ ID NO: 20546 - DNA, 893 bp, Muscodor strobelii
  misc_feature: SGI EST ID NO. CUFF.48164.0
  misc_feature: Variant of the nucleotide sequence at SEQ ID NO 20544
cgttcctacagtacagctgcaacctcgagcttcaaccactccgatcctatcaaagggtcaattccctcaattgacagcatcaacacagccaaaatgatctctcgcgtgtccatccgaagcgcatcgcggcttcagcagcccgccgctgccattcgacgatctttcgccgtctccgcccgacgctgcgacgctgctcccgccgccaaagccgagacgaccccagagaccaagagcgaggaggacagcctaggcctgaccgagaacctcgagcgcggcctcaagcaggcgcccaaccgcacagagatctggtccaggagccagaagccccgcgctgccgccatgaccggcccccgattcgagcagaccgacttcgacctccaacccgcatccaaagcagccatcgagctcattcataagcagcccgtccgatggacgcatgaccgtgttgtcgcctgtgacggtggcggtggccccgctggacaccctagaatttatatcaacaccgacaaacccgagatagcgtgctgcaactactgcggactgccctacgccaacgaacacaaccgaaagcacctggaatccctaccagaaacatcgtaccccctggcatagacaatggcatagataatgcggtgtaggaattggggttcagccgaataagctcgaccgtttggggctggtcgaaagtgctggagcatggccagcagtgtacatactattctacagtgatatcacctagacaggcaaagttgggcttgaaaagagataaagattttcccattttctgtgtacaaatactgataatttacaatgtaccatgacgtatagagactttcttactaaaatatacattgcctcactgtatcagacattctgcccggaactgtataatc

SEQ ID NO: 20547 - DNA, 786 bp, Muscodor strobelii
  misc_feature: SGI cDNA ID NO. 566938
  misc_feature: Encodes the peptide sequence at SEQ ID NO 20548
atgtcgtcccccgcgggcacccccaagactatgtcttctagactgttgactatgaagttcatgcaaagagccgctgcatctaccccttcatcttccgccccaagcactcccacctccaacgaccagtccaacaagcgtcgcaaggtctcccatcagtccgctccagcagaagaagtggacacaaacaccattgtgaaccaagccgccattcgtgccgctatcgaggaggaagagaagaagtcacatgaggcgctggtgaaacgcgccgacgagctaggcgatgcccattgggttctcagcctacccgagccagctgtgaagcgtcccacccaaacccctctaaacatcattcaagttggctacgcacagattgattcttctgatctgagtaataataacgactttgaagaatcacaaaacagtataccggccatccgtcgcttcaatatggacaagaagaaggcaacaaagaaagtcaaggaggagagcgataactccagctcggattcagagtctgactccggatcagactccgattcggattcgtcttcgggacctagtggacgccagtcatttggctcctccaactctcagaactcatcagccaagaatgcaatggccggcaagaagagcatggaaaagctcaaggccatgaagctcgcaggtgcgcggaggaagaaagaagtgaacctcaacacgcccaggccatctcccttgtcatctgcgaagatgaaatcaggtatctcgtctggaggagggacacctagctctctcggccgccggtga

SEQ ID NO: 20548 - protein, 261 aa, Muscodor strobelii
  misc_feature: SGI Peptide ID NO. 566938
  misc_feature (7)..(232): NCBI GI: 116207698 Blast Desc: CHGG_03142 [Chaetomium globosum CBS 148.51] gi|88183739|gb|EAQ91207.1| CHGG_03142 [Chaetomium globosum CBS 148.51]
  misc_feature (9)..(232): NCBI GI: 171686160 Blast Desc: protein product [Podospora anserina] gi|170943041|emb|CAP68694.1| protein product [Podospora anserina]
  misc_feature (1)..(261): NCBI GI: 164429144 Blast Desc: NCU00483 [Neurospora crassa OR74A] gi|157072426|gb|EAA26932.2| [Neurospora crassa OR74A]
  misc_feature (11)..(234): NCBI GI: 39941512 Blast Desc: [Magnaporthe grisea 70-15] gi|145022359|gb|EDK06379.1| [Magnaporthe grisea 70-15]
  misc_feature (1)..(148): NCBI GI: 154300630 Blast Desc: BC1G_10903 [Botryotinia fuckeliana B05.10] gi|150856510|gb|EDN31702.1| BC1G_10903 [Botryotinia fuckeliana B05.10]
  misc_feature (7)..(258): NCBI GI: 46125065 Blast Desc: FG06910.1 [Gibberella zeae PH-1]
  misc_feature (1)..(125): NCBI GI: 156048426 Blast Desc: [Sclerotinia sclerotiorum 1980] gi|154693341|gb|EDN93079.1| [Sclerotinia sclerotiorum 1980]
  misc_feature (7)..(124): NCBI GI: 169615709 Blast Desc: SNOG_11018 [Phaeosphaeria nodorum SN15] gi|111060397|gb|EAT81517.1| SNOG_11018 [Phaeosphaeria nodorum SN15]
  misc_feature (2)..(151): NCBI GI: 212534982 Blast Desc: conserved [Penicillium marneffei ATCC 18224] gi|210070046|gb|EEA24136.1| conserved [Penicillium marneffei ATCC 18224]
  misc_feature (5)..(122): NCBI GI: 189209752 Blast Desc: conserved [Pyrenophora tritici-repentis Pt-1C-BFP] gi|187977301|gb|EDU43927.1| conserved [Pyrenophora tritici-repentis Pt-1C-BFP]
MSSPAGTPKTMSSRLLTMKFMQRAAASTPSSSAPSTPTSNDQSNKRRKVSHQSAPAEEVDTNTIVNQAAIRAAIEEEEKKSHEALVKRADELGDAHWVLSLPEPAVKRPTQTPLNIIQVGYAQIDSSDLSNNNDFEESQNSIPAIRRFNMDKKKATKKVKEESDNSSSDSESDSGSDSDSDSSSGPSGRQSFGSSNSQNSSAKNAMAGKKSMEKLKAMKLAGARRKKEVNLNTPRPSPLSSAKMKSGISSGGGTPSSLGRR

SEQ ID NO: 20549 - DNA, 1507 bp, Muscodor strobelii
  misc_feature: SGI EST ID NO. CUFF.48166.0
  misc_feature: Variant of the nucleotide sequence at SEQ ID NO 20547
ttggcatcgcatctacaaacttgaatgaccactagcattcattcaacactcattcgccagtttgcaagtcgcgaaacctttctgaataagacccaggtctatatcagagacaaggactagtctggaaatatttatcaggaaaaggtccagctgcgctgcgtattgaccagaaccgtgtcttgctctagtgtgctttccttccgcgcgctcgcgccccttcctgcatttgagagaccgcatcggtgatctgtgttttgatagtgctttgacagtgctcagaaactggcaagaagccaccgcgacaacatgtcgtcccccgcgggcacccccaagactatgtcttctagactgttgactatgaagttcatgcaaagagccgctgcatctaccccttcatcttccgccccaagcactcccacctccaacgaccagtccaacaagcgtcgcaaggtctcccatcagtccgctccagcagaagaagtggacacaaacaccattgtgaaccaagccgccattcgtgccgctatcgaggaggaagagaagaagtcacatgaggcgctggtgaaacgcgccgacgagctaggcgatgcccattgggttctcagcctacccgagccagctgtgaagcgtcccacccaaacccctctaaacatcattcaagttggctacgcacagattgattcttctgatctgagtaataataacgactttgaagaatcacaaaacagtataccggccatccgtcgcttcaatatggacaagaagaaggcaacaaagaaagtcaaggaggagagcgataactccagctcggattcagagtctgactccggatcagactccgattcggattcgtcttcgggacctagtggacgccagtcatttggctcctccaactctcagaactcatcagccaagaatgcaatggccggcaagaagagcatggaaaagctcaaggccatgaagctcgcaggtgcgcggaggaagaaagaagtgaacctcaacacgcccaggccatctcccttgtcatctgcgaagatgaaatcaggtatctcgtctggaggagggacacctagctctctcggccgccggtgagtttgatctgcttttgaccgtggacaacctgggtccaaattagccggctataatgaggccgtatcgcggcaactacgttagaacacgccgtccgctctgactcgtccatgttctacgctgtatatcgagacatctccatcaggcgcaccgcacattgtgtccctggcatcgcggagagaccccggtcctagtaacatagctataaagctgcaaggtggctccttgcggaagcgattgttgaacttcaggtcttgttgagaattgcatgatactatgagtaacgaaatgctttcgcctccatgctatagggttgcatagtcatcgcaattagcatgataattacttcagcgcccagctgcagctaccttaagtagccaacacaaatacaaattagcataagagattttccgtccct

SEQ ID NO: 20550 - DNA, 3078 bp, Muscodor strobelii
  misc_feature: SGI cDNA ID NO. 566939
  misc_feature: Reduced expression when VOC is produced
  misc_feature: Encodes the peptide sequence at SEQ ID NO 20551
atgagccctgcgcactctcttgaccaggacgcagctgtgtcccacagaacacagcgggagtcctattcgaaatcgaaaccgatagagcgcatcacagaccaactcgagatcccctccttggatgatcggcaataccgtgtgattcgccttgctaataggcttgaagtgttgttggtacatgattctgacacggacaaagccagcgctgctttggatgtgaacgtaggatgtttcagcgacgaggacaaaatgcctggtatggcacatgccgtagagcatctattgttcatgggcaccaaaaaataccccaaagaaaatgactacaatgtttatctttcgtcacattcaggctattccaacgcctacactggctctacatcgaccaactactacttcgagattgctgccaagccaagcaacggcgaagcggcttctgaaactaatatatcgcccctacacggcggtctggatagatttgcacagttcttcattgagccactctttcttgcttcgactctggaccgtgaactgcgcgccgtagattccgaaaacaagaagaatctacaaagtgatcaatggcgcatgaaccagctcgaaaaatctcaggccaacccaaagcatccgtaccatcatttctctacgggcaacttcgaagtgctgaagaccgagccggaagcagagggtattgatgtgcgacagaagttcattgatttccacacggatcattattcggcaaatcgcatgaagctttgcgtactgggaagagaatcattggacgtgttagaatcttgggtgactgagcttttctctccgataccgaataaggacttgcctcagctccgctgggaagaagaggtacccttcacaaaggatcgccttggcttccagtgctttgcaaggccggtcatggactcacgagagcttaatctattctttccttttctcgacgaggagtatctctttgaaactcacccaagtcgatacattagccacctcataggtcacgaggggccagggagtctcatggcatatgttaagtcgaaaggttggggaaactcgctcagcgctggcgcatatcctgtgtgccctggcactccaggtattttcgatgtccaaatccgattgactaaggaggggctgaaaaactacaaagaagtagtcaaagcttttttccaatacgtttcacttcttcttcagacacctcctcagcagtggatattcgatgaacaaaaagagatggccgatgttgagttcaaatataagcagaaaacgccagcaagtcgatttacgagccgaattgcttcagtcatgcaaaagccactcccacgagaatggttgctcagtggacagagccgcttacgcaagttcgacccagctacaatccagtcaggcattgagctcttgcggcccgagaacatgcgaatgacactcatctcccaggactttcccgggggctgggatcaaaaagagaaatggtacggaacagaattcaaagtcgagaagataccggaagagcttctggctgaactatcagaggcattgaagacctctcctggtaaacagccgtcgggcttacatcttcctcacaagaatcagtttatccccaccaagctagaggttgagaagaaagaagttgagaaacctgcaccagcacctcgagtcattcgaaacgatgagatttcacggacttggtggaaaaaggacgacactttctgggttcccaaagccaatctcatcgttagcatgaagaacccccttatctttgcatctgctgcaaacacagtcaaggccaggctttttacagatctagtacgagacgccctagaagaatattcatatgacgcggaaatcgctggcttgtcgtacaacgtacaccttgattctcgcgggttgtacgtggaggtggcaggttataacgacaagctgtctgttctcttagaacaggtgctgattaccatgcgcgacctggtgattaaagatgaaagattcgacattgtcaaagacaggatttcaagaggatacaagaattctgagctagcacagccgtttacacagattggcgactatgtctcatggctcctgactgagcatgatcacgtcgttgagcagctgatacccgaattgcctggtatgactgctgacgatgttcggagtttccagaagtctgtcatgtctcagttgcacatcgagacatatatacatggaaatgtctacaaagaggatgctctaagattctcagacatgatagaatctgtgctgaagccacgccttctcccaaaagaagagtggcccatcccgcgctcattggttctgcctgcaggatcaaacttcttgtacaagaagactttaaaagatcctgccaacgtaaatcactgtgtcgaatactacctccacttaggcggtaagggtgaccgcatgatccgagctaaaacacagctgctggatcaaatcattcacgagcctgcctttgatcagctgagaaccaaggagcagctaggctacattgtttttagcggtctgcgcggctcagcaaccacttacggcttccggtttatcattcagagcgagaagacttcagagtatctggaatcgcgcattgactcctttcttctagcccaggccacagctgtacgggacatgacggacgaagtctttgagagccataagagaagtgtcgtcaataaaagactagagaaacccaagaatctcgaacaggaaactgggcgacattgggcgcagatatccaacgagtattacgactttgaaaccgcccagaaagatgccgctcaagtcgaaaaacttaccaaatcagagacggttgacttctatgacacattcatcatcccaacctcgcctgcccgttcgaagttggtggttcagatgattgcacagggcaagagctccgactccaaggaagttaacggcatctcgacaaatggcgaagtttcaacatcaaacggaacgacaccagtactcatcagctgtgtgcgtgactacaaggccggattgtccgctactgctggggccagaccaatccatcagttgaccgagttcgaagagctggattcaaaactctga

SEQ ID NO: 20551 - protein, 1025 aa, Muscodor strobelii
  misc_feature: SGI Peptide ID NO. 566939
  misc_feature (230)..(414): Pfam Id: PF05193 Pfam Desc: Peptidase M16 inactive domain
  misc_feature (710)..(892): Pfam Id: PF05193 Pfam Desc: Peptidase M16 inactive domain
  misc_feature (55)..(206): Pfam Id: PF00675 Pfam Desc: Insulinase (Peptidase family M16)
  misc_feature (27)..(1025): NCBI GI: 46125067 Blast Desc: FG06911.1 [Gibberella zeae PH-1]
  misc_feature (23)..(967): NCBI GI: 85078440 Blast Desc: NCU00481 [Neurospora crassa OR74A] gi|28917217|gb|EAA26930.1| NCU00481 [Neurospora crassa OR74A]
  misc_feature (19)..(1025): NCBI GI: 156048290 Blast Desc: SS1G_08876 [Sclerotinia sclerotiorum 1980] gi|154693273|gb|EDN93011.1| SS1G_08876 [Sclerotinia sclerotiorum 1980]
  misc_feature (27)..(988): NCBI GI: 145615549 Blast Desc: MGG_13149 [Magnaporthe grisea 70-15] gi|145022358|gb|EDK06378.1| MGG_13149 [Magnaporthe grisea 70-15]
  misc_feature (28)..(967): NCBI GI: 171686158 Blast Desc: protein product [Podospora anserina] gi|170943040|emb|CAP68693.1| protein product [Podospora anserina]
  misc_feature (28)..(965): NCBI GI: 70985270 Blast Desc: a-pheromone processing metallopeptidase Ste23 [Aspergillus fumigatus Af293] gi|66845769|gb|EAL86103.1| a-pheromone processing metallopeptidase Ste23 [Aspergillus Af293]
  misc_feature (28)..(965): NCBI GI: 159125935 Blast Desc: a-pheromone processing metallopeptidase Ste23 [Aspergillus fumigatus A1163]
  misc_feature (28)..(1025): NCBI GI: 212541903 Blast Desc: a-pheromone processing metallopeptidase Ste23 [Penicillium marneffei ATCC 18224] gi|210066013|gb|EEA20106.1| a-pheromone processing metallopeptidase Ste23 [Penicillium ATCC
  misc_feature (28)..(1025): NCBI GI: 111380663 Blast Desc: STE23-like protein [Penicillium marneffei]
  misc_feature (28)..(965): NCBI GI: 119499149 Blast Desc: a-pheromone processing metallopeptidase Ste23 [Neosartorya fischeri NRRL 181] gi|119414496|gb|EAW24435.1| a-pheromone processing metallopeptidase Ste23 [Neosartorya NRRL
  misc_feature (18)..(1011): SWISSPROT Homolog: EC 3.4.24.56 Insulysin
  misc_feature: Useful for introducing or modulating the production of volatile compounds
MSPAHSLDQDAAVSHRTQRESYSKSKPIERITDQLEIPSLDDRQYRVIRLANRLEVLLVHDSDTDKASAALDVNVGCFSDEDKMPGMAHAVEHLLFMGTKKYPKENDYNVYLSSHSGYSNAYTGSTSTNYYFEIAAKPSNGEAASETNISPLHGGLDRFAQFFIEPLFLASTLDRELRAVDSENKKNLQSDQWRMNQLEKSQANPKHPYHHFSTGNFEVLKTEPEAEGIDVRQKFIDFHTDHYSANRMKLCVLGRESLDVLESWVTELFSPIPNKDLPQLRWEEEVPFTKDRLGFQCFARPVMDSRELNLFFPFLDEEYLFETHPSRYISHLIGHEGPGSLMAYVKSKGWGNSLSAGAYPVCPGTPGIFDVQIRLTKEGLKNYKEVVKAFFQYVSLLLQTPPQQWIFDEQKEMADVEFKYKQKTPASRFTSRIASVMQKPLPREWLLSGQSRLRKFDPATIQSGIELLRPENMRMTLISQDFPGGWDQKEKWYGTEFKVEKIPEELLAELSEALKTSPGKQPSGLHLPHKNQFIPTKLEVEKKEVEKPAPAPRVIRNDEISRTWWKKDDTFWVPKANLIVSMKNPLIFASAANTVKARLFTDLVRDALEEYSYDAEIAGLSYNVHLDSRGLYVEVAGYNDKLSVLLEQVLITMRDLVIKDERFDIVKDRISRGYKNSELAQPFTQIGDYVSWLLTEHDHVVEQLIPELPGMTADDVRSFQKSVMSQLHIETYIHGNVYKEDALRFSDMIESVLKPRLLPKEEWPIPRSLVLPAGSNFLYKKTLKDPANVNHCVEYYLHLGGKGDRMIRAKTQLLDQIIHEPAFDQLRTKEQLGYIVFSGLRGSATTYGFRFIIQSEKTSEYLESRIDSFLLAQATAVRDMTDEVFESHKRSVVNKRLEKPKNLEQETGRHWAQISNEYYDFETAQKDAAQVEKLTKSETVDFYDTFIIPTSPARSKLVVQMIAQGKSSDSKEVNGISTNGEVSTSNGTTPVLISCVRDYKAGLSATAGARPIHQLTEFEELDSKL

SEQ ID NO: 20552 - DNA, 3730 bp, Muscodor strobelii
  misc_feature: SGI EST ID NO. CUFF.48181.0
  misc_feature: Variant of the nucleotide sequence at SEQ ID NO 20550
tttttttcgtctgttctttattgacacccagctactagcgatttcgtaatgctcattcgtagactaagcttattcgattgattattagtgtgcactgtctccaactttcaaaactgccattttcgtcgccacttcagctgtggttttatgtccacttgccccacgtccgtcttgcgactacgcactacgctgttctcaccgttctcttccatccatctcaccctgccagctctctcttgctttctagcagtatacgaaccttcgctatgagccctgcgcactctcttgaccaggacgcagctgtgtcccacagaacacagcgggagtcctattcgaaatcgaaaccgatagagcgcatcacagaccaactcgagatcccctccttggatgatcggcaataccgtgtgattcgccttgctaataggcttgaagtgttgttggtacatgattctgacacggacaaagccagcgctgctttggatgtgaacgtaggatgtttcagcgacgaggacaaaatgcctggtatggcacatgccgtagagcatctattgttcatgggcaccaaaaaataccccaaagaaaatgactacaatgtttatctttcgtcacattcaggctattccaacgcctacactggctctacatcgaccaactactacttcgagattgctgccaagccaagcaacggcgaagcggcttctgaaactaatatatcgcccctacacggcggtctggatagatttgcacagttcttcattgagccactctttcttgcttcgactctggaccgtgaactgcgcgccgtagattccgaaaacaagaagaatctacaaagtgatcaatggcgcatgaaccagctcgaaaaatctcaggccaacccaaagcatccgtaccatcatttctctacgggcaacttcgaagtgctgaagaccgagccggaagcagagggtattgatgtgcgacagaagttcattgatttccacacggatcattattcggcaaatcgcatgaagctttgcgtactgggaagagaatcattggacgtgttagaatcttgggtgactgagcttttctctccgataccgaataaggacttgcctcagctccgctgggaagaagaggtacccttcacaaaggatcgccttggcttccagtgctttgcaaggccggtcatggactcacgagagcttaatctattctttccttttctcgacgaggagtatctctttgaaactcacccaagtcgatacattagccacctcataggtcacgaggggccagggagtctcatggcatatgttaagtcgaaaggttggggaaactcgctcagcgctggcgcatatcctgtgtgccctggcactccaggtattttcgatgtccaaatccgattgactaaggaggggctgaaaaactacaaagaagtagtcaaagcttttttccaatacgtttcacttcttcttcagacacctcctcagcagtggatattcgatgaacaaaaagagatggccgatgttgagttcaaatataagcagaaaacgccagcaagtcgatttacgagccgaattgcttcagtcatgcaaaagccactcccacgagaatggttgctcagtggacagagccgcttacgcaagttcgacccagctacaatccagtcaggcattgagctcttgcggcccgagaacatgcgaatgacactcatctcccaggactttcccgggggctgggatcaaaaagagaaatggtacggaacagaattcaaagtcgagaagataccggaagagcttctggctgaactatcagaggcattgaagacctctcctggtaaacagccgtcgggcttacatcttcctcacaagaatcagtttatccccaccaagctagaggttgagaagaaagaagttgagaaacctgcaccagcacctcgagtcattcgaaacgatgagatttcacggacttggtggaaaaaggacgacactttctgggttcccaaagccaatctcatcgttagcatgaagaacccccttatctttgcatctgctgcaaacacagtcaaggccaggctttttacagatctagtacgagacgccctagaagaatattcatatgacgcggaaatcgctggcttgtcgtacaacgtacaccttgattctcgcgggttgtacgtggaggtggcaggttataacgacaagctgtctgttctcttagaacaggtgctgattaccatgcgcgacctggtgattaaagatgaaagattcgacattgtcaaagacaggatttcaagaggatacaagaattctgagctagcacagccgtttacacagattggcgactatgtctcatggctcctgactgagcatgatcacgtcgttgagcagctgatacccgaattgcctggtatgactgctgacgatgttcggagtttccagaagtctgtcatgtctcagttgcacatcgagacatatatacatggaaatgtctacaaagaggatgctctaagattctcagacatgatagaatctgtgctgaagccacgccttctcccaaaagaagagtggcccatcccgcgctcattggttctgcctgcaggatcaaacttcttgtacaagaagactttaaaagatcctgccaacgtaaatcactgtgtcgaatactacctccacttaggcggtaagggtgaccgcatgatccgagctaaaacacagctgctggatcaaatcattcacgagcctgcctttgatcagctgagaaccaaggagcagctaggctacattgtttttagcggtctgcgcggctcagcaaccacttacggcttccggtttatcattcagagcgagaagacttcagagtatctggaatcgcgcattgactcctttcttctagcccaggccacagctgtacgggacatgacggacgaagtctttgagagccataagagaagtgtcgtcaataaaagactagagaaacccaagaatctcgaacaggaaactgggcgacattgggcgcagatatccaacgagtattacgactttgaaaccgcccagaaagatgccgctcaagtcgaaaaacttaccaaatcagagacggttgacttctatgacacattcatcatcccaacctcgcctgcccgttcgaagttggtggttcagatgattgcacagggcaagagctccgactccaaggaagttaacggcatctcgacaaatggcgaagtttcaacatcaaacggaacgacaccagtactcatcagctgtgtgcgtgactacaaggccggattgtccgctactgctggggccagaccaatccatcagttgaccgagttcgaagagctggattcaaaactctgaggctctgagatgctaaatgaatgtgatgcttattgcatgcatccttgtctggggagctccgaaccatatcaaagttttcgagtctcaaagtggctacaattgaaaaggaagatcgtgcagctagaaacaaggtgccagtagtgatgcaggataaacataggcacgctttgcaataatggcagcggagagaaagagaaacgaagagaactgtttgagctagaatagtagaccactcccgcatcaagatgatattcgtcttgtggggtttgtagagaagtgccaaagaggcattgctctaagtgagctagatttgctgtaatgcgtttacaagagtaaataataaagacagaaagaaacaaatgacagtcaatgagattagttcagac

SEQ ID NO: 20553 - DNA, 4917 bp, Muscodor strobelii
  misc_feature: SGI cDNA ID NO. 566940
  misc_feature: Encodes the peptide sequence at SEQ ID NO 20554
atggatgccactgggctgcatcctcgcctgcgctctcctaggttgcgaataatgcgcatcaacgactggaaaacctatcaccttaccgactcgcagacccatgcctggcaactagcaacgctactcatatggctactacttcaatcaccggagctgctaaggcagctcgccgccaagacgtcttccacaaagaaaaggaagatcactaccaacacgcccgccgccggggatgaagacatagacctcggctctcccgacgtgcccctccagtcctgcgagcacgagcaggactccgatctcaccttctccttcacctctgccgccgtcgacgccccgccctcgcccgcctacctgcgcgccgactcgctgcccgcctcgagcctcccgcctcgcctgcagaccttccacgccggcacgcaccccatcgccgaggacgggtcgtcggtcgcgagctcaccctcgggcgcctacgccgacctctccatcaacagcgaccgtggcgcagacacacccgccccggagttcaccacctgcccgcggggcgcctctcccttcgccaagaccacccaccaccgagctctcatggggggcgcttccgatttcccggaacgggcctcctcgcccttgaagcgtcgtgcatccagcatggaaccggacgagaacgcccggcatggagctggcggcacggatctagacatgacctcccctccctccgatgccgcagcaccggccccgacctctgctcccgcccacaacacaaatggctcccctactcagagcctcgacgacacggtcatggacgcttcagatgcagctacctcacagccgcctcggtcgattgaggcccatataagcagcatacggacgcttgtacaagagatgagcgtcaatcgcttggaagccgatcaagaatgctatattgtctccaaaagctggcttgataaatatgtacccgattcttctaagaaacagactgactccgatctctccaccattccgccggttgataactcggatttgatttgggaagtcatcaccgatccttgtgtcggaagtggtattaccgacgtcatgaagaagaaattcgtgcggatgaagcctggccttaacttggacaacttcgtaccgttccctgctgaagcctggaagctgctaatgcagtggccaggcttggtgaaagatcagatgccgattcgccgttacgcctcggataccagtgacaggcaagacggatccaatatcatgtttgagtttcacccacccgtgcttagcatacatcgactctggtctgcccacagtcgtgtacctgtcgaggcatccttaaaacggagtaacccagaacctgccaggcttgtccgccgtggctccagcaagtttgaagtcttcctcaagcaagcgaagaatgtcgccaagatcgacctgaatcagcgagtcagaggctggcaaatccacccacaaggtaaagaccaggatcccgcagtctggaatcatctccttgtagatgtggaggcctttgccaaactcgaaaggggtgcggaaaaggagttagtcgagtttggggactttactaccggttctgtcaagacgttgcattctctggagatcagtcaagacatgcccattgttctcgacccacacgaggagggtatggagtggacttcgacgtatgtgccgagcgcagaaatgacccttcctacgcgctccagtgcgacgaatctggctgtccagaatcactcttcccgaggtggacgtacaagtcctgctccaatcggccccatgacccggggcagatcaactaaatcgggccgtactattggatgcgttggtctcacaaacctaggaaatacatgttatatgaacgctgcactccagtgtgtgagaagtgtcgaggaactgaccaagtacttcctggttggtgagtgggagaaagagctgaataaagacaacatcctggcccataatggtgaggttgccgctacgtacgcagctctcctcagggatatctacaaagattcggctccgagtgcgacgacaccgcgccagttcaagcatacgattggccgtcatgccgctcaattctctggctacgggcaacaagattcgcaggaatttctcggattcttgttagatggccttcaggaagatctcagccgcgtcaagaagaagccttatatcgaaaagcctgattccacggatgagatgattcatgaccccgaagctattcgcaagatggccgatgaagtgtgggatatcacgagaaaacgcgacgattctgtcatcgccgatctgttcactggtctttacaagtcgactctggtttgccctgcctgtgacaaagttagcatcaccttcgacccgttcaacaatctcactcttcagttacctgtcggaaataagtggagtcatgttgttaaattctttcccctcaatgacaagcccgtcgacatcagggtagagattgagaagcatgacagtatcaaagctctcaaacagttcatatcagccaggacaggtgtccctgtcgaccgattgcactcatgtgaagaatggagcaagaagttctacaagcatcaccccgacaacagtactgcgagtgatgaaatctcgtctcctaatgatcacgtgttcgtcttcgaattggaggcgaagcctacaaactatccggggaaagccatcaaacagcagaagtttcggtccatgctggatccagagcccgcgcccgtgacctgggacgatgaagaagcagagagtcttctagttcccgtattccatcgcaagcccaataccaaaaaggggttctcatctccgaagttgatggctgcttgcattcctcatttcattatgcttacccctcaggaggcaaggagcgaggacatcatccgccgcaaagtgcttgagaaggtggctacttttacaaagcatccctggtttgcgcggtcagatgactctgatggctctgagactaccgaacctgaaatgatagggccgaatggctcggacacagggtcgtccgtaggaggcaaagtcgtagctcagtctataaagggggaggacgaccttgttgatgtgcaaatgaaagacgcacctgatgcaaagaacagcaatgcgagccgtttgccacaacgtgtctttaaccgcaagaagcccgcatgggtgaaccacaattcattcctcccgtcagagttacagaatctcttcgagatcggtatctgcggagagtcttcaagtcccatccccacaggtagtaatgctaatatggaggataaagagtatccgagactttcgtctcgcgctataccagactctccctcttctgaggaccaacttgataatgccacgactggtacagcctcaaacgacgaattcagctcagacgaggcacccaaatcttcggcagagatggctgcaacgcgcatgaacgatgaaagtgacgacgacgatggcactcctgtggtgaagtcatatccgcatcgacctaagcaacagcgacagtcgaaagccaataacaaagcaaatcgtggtaagaaggtcaaatacggtaaaaagggcactaaaagagctcagcaagctcaacgcgagcaaaaggaacagcgaaagaaaaaggcattgggcttcgaagacttcaccgaaatggccgaccctattcccgatggcggcccactcgtcaggttgagggaaggtcttgttgtggactggtccgaggatgcctacgataacgtctttggtacggatacaactctggagacctgggaaaactgcgaaaccttgccagatccagatctagagaaagcccagacagctcgtgccaggcgtcgtaagcatggcattaccctagaggagtgcctggatgagtttgagcgagatgagattctctcggaacaagacatgtggtactgtcctcggtgtaaggagcatcgccgggccagcaagaaacttgacctctggaagtcgccagatatccttatttgccatctcaagcgcttcagctccagtggattccgcagagacaaacttgagacgttggtcgaatttcctattgagaatctcgacatcacttctcgcgtactgcaaacagagccggggaagcaagagatttatgatctcattggtgtcgactgtcattacggaggacttggcggtggccactacacagcgtacgcgaagaactttgtggacggacagtggtattcatacaatgattcatccgtatccaagatcagcccggagcgcatagttgacagttcagcgtacatgctcttctaccgtagacgatctgacattccacttgggggccctcgatttaccgagatcctagaacagttcacagaagcacatggctctgatgaagagatgtctaagccgggggaaggtcggcgtctcggcgagggctcctcccagattgggtcgtcgagcgctataccaggagtaggagctactcgcctgcccggaaatcatggttctagcaagctatcctatggagcagatgatatgcagatctccaacacgtcttaccaatctggacaaatggacgaagatgaaggtattgggatggcagaagacaccaaagcaaccggattccaaggctttgctaatattaatacctggtcattcgatggagtgacgaatgaaaacagccccattgactctggcgccgcgtccgacgaagcacagcacgactcgtcaggcgatgaacgagcttctagtcggcggctcagcgttgaaggaatgctggagtacacactgccgccacaatcagaggcagagccaccatcctacagcgagatgcctgcccctgttccaagacaatgggccgctcaacacgcagtgcacgaaattgtacccaacggcgagcatgaaccccaatcagatgacgcggcagagattcatctagacgatgatgataaaatcagggtctag

SEQ ID NO: 20554 - protein, 1638 aa, Muscodor strobelii
  misc_feature: SGI Peptide ID NO. 566940
  misc_feature (605)..(1421): Pfam Id: PF00443 Pfam Desc: Ubiquitin carboxyl-terminal hydrolase
  misc_feature (84)..(1638): NCBI GI: 256732693 Blast Desc: NECHADRAFT_38413 [Nectria haematococca mpVI 77-13-4]
  misc_feature (32)..(1635): NCBI GI: 164429141 Blast Desc: NCU00480 [Neurospora crassa OR74A] gi|157072425|gb|EAA26929.2| conserved [Neurospora crassa OR74A]
  misc_feature (195)..(1632): NCBI GI: 171686156 Blast Desc: protein product [Podospora anserina] gi|170943039|emb|CAP68692.1| protein product [Podospora anserina]
  misc_feature (195)..(1633): NCBI GI: 116207694 Blast Desc: CHGG_03140 [Chaetomium globosum CBS 148.51] gi|88183737|gb|EAQ91205.1| CHGG_03140 [Chaetomium globosum CBS 148.51]
  misc_feature (51)..(1560): NCBI GI: 261358163 Blast Desc: ubiquitin carboxyl-terminal hydrolase [Verticillium albo-atrum VaMs.102]
  misc_feature (85)..(1633): NCBI GI: 46125069 Blast Desc: FG06912.1 [Gibberella zeae PH-1]
  misc_feature (195)..(1638): NCBI GI: 156044997 Blast Desc: SS1G_09687 [Sclerotinia sclerotiorum 1980] gi|154694082|gb|EDN93820.1| SS1G_09687 [Sclerotinia sclerotiorum 1980]
  misc_feature (395)..(1633): NCBI GI: 145615547 Blast Desc: MGG_05666 [Magnaporthe grisea 70-15] gi|145022357|gb|EDK06377.1| MGG_05666 [Magnaporthe grisea 70-15]
  misc_feature (232)..(1540): NCBI GI: 119190871 Blast Desc: CIMG_05483 [Coccidioides immitis RS]
  misc_feature (234)..(1540): NCBI GI: 240107340 Blast Desc: Ubiquitin carboxyl-terminal hydrolase family protein [Coccidioides posadasii C735 delta SOWgp]
MDATGLHPRLRSPRLRIMRINDWKTYHLTDSQTHAWQLATLLIWLLLQSPELLRQLAAKTSSTKKRKITTNTPAAGDEDIDLGSPDVPLQSCEHEQDSDLTFSFTSAAVDAPPSPAYLRADSLPASSLPPRLQTFHAGTHPIAEDGSSVASSPSGAYADLSINSDRGADTPAPEFTTCPRGASPFAKTTHHRALMGGASDFPERASSPLKRRASSMEPDENARHGAGGTDLDMTSPPSDAAAPAPTSAPAHNTNGSPTQSLDDTVMDASDAATSQPPRSIEAHISSIRTLVQEMSVNRLEADQECYIVSKSWLDKYVPDSSKKQTDSDLSTIPPVDNSDLIWEVITDPCVGSGITDVMKKKFVRMKPGLNLDNFVPFPAEAWKLLMQWPGLVKDQMPIRRYASDTSDRQDGSNIMFEFHPPVLSIHRLWSAHSRVPVEASLKRSNPEPARLVRRGSSKFEVFLKQAKNVAKIDLNQRVRGWQIHPQGKDQDPAVWNHLLVDVEAFAKLERGAEKELVEFGDFTTGSVKTLHSLEISQDMPIVLDPHEEGMEWTSTYVPSAEMTLPTRSSATNLAVQNHSSRGGRTSPAPIGPMTRGRSTKSGRTIGCVGLTNLGNTCYMNAALQCVRSVEELTKYFLVGEWEKELNKDNILAHNGEVAATYAALLRDIYKDSAPSATTPRQFKHTIGRHAAQFSGYGQQDSQEFLGFLLDGLQEDLSRVKKKPYIEKPDSTDEMIHDPEAIRKMADEVWDITRKRDDSVIADLFTGLYKSTLVCPACDKVSITFDPFNNLTLQLPVGNKWSHVVKFFPLNDKPVDIRVEIEKHDSIKALKQFISARTGVPVDRLHSCEEWSKKFYKHHPDNSTASDEISSPNDHVFVFELEAKPTNYPGKAIKQQKFRSMLDPEPAPVTWDDEEAESLLVPVFHRKPNTKKGFSSPKLMAACIPHFIMLTPQEARSEDIIRRKVLEKVATFTKHPWFARSDDSDGSETTEPEMIGPNGSDTGSSVGGKVVAQSIKGEDDLVDVQMKDAPDAKNSNASRLPQRVFNRKKPAWVNHNSFLPSELQNLFEIGICGESSSPIPTGSNANMEDKEYPRLSSRAIPDSPSSEDQLDNATTGTASNDEFSSDEAPKSSAEMAATRMNDESDDDDGTPVVKSYPHRPKQQRQSKANNKANRGKKVKYGKKGTKRAQQAQREQKEQRKKKALGFEDFTEMADPIPDGGPLVRLREGLVVDWSEDAYDNVFGTDTTLETWENCETLPDPDLEKAQTARARRRKHGITLEECLDEFERDEILSEQDMWYCPRCKEHRRASKKLDLWKSPDILICHLKRFSSSGFRRDKLETLVEFPIENLDITSRVLQTEPGKQEIYDLIGVDCHYGGLGGGHYTAYAKNFVDGQWYSYNDSSVSKISPERIVDSSAYMLFYRRRSDIPLGGPRFTEILEQFTEAHGSDEEMSKPGEGRRLGEGSSQIGSSSAIPGVGATRLPGNHGSSKLSYGADDMQISNTSYQSGQMDEDEGIGMAEDTKATGFQGFANINTWSFDGVTNENSPIDSGAASDEAQHDSSGDERASSRRLSVEGMLEYTLPPQSEAEPPSYSEMPAPVPRQWAAQHAVHEIVPNGEHEPQSDDAAEIHLDDDDKIRV

SEQ ID NO: 20555 - DNA, 6374 bp, Muscodor strobelii
  misc_feature: SGI EST ID NO. CUFF.48252.1
  misc_feature: Variant of the nucleotide sequence at SEQ ID NO 20553
atttgattggacctggagcacaatagtcccttgcctgggcgatggatgccactgggctgcatcctcgcctgcgctctcctaggttgcgaataatgcgcatcaacgactggaaaacctatcaccttaccgactcgcagacccatgcctggcaactagcaacgctactcatatggctactacttcaagtgaagttagaacaatacccctacactgattttgtctcttgtttctgttcatcctgaacattctgattttgacatttttgaagttgaaggaactctcgtaaggccagccagggctgcattccatgtgaggatccaacaaccacctgccctttctgtgtcacgcaacgccagtgtcggcattgataattgtgcattccacttctcagccagcagctactgcaggcgccgcattgtttttggccgcttgagggagcgactcgctgtccttcgctgagcccgaccacacaccctctttcataggtaggtaagcatcaccgtggaaggcgcccccccaccacctgcgactgccaccactgccacttctgtgcactgtggctactcctgctgctgcccgcctaccaaacctaccaaagcgcccgccatcgtcgcttcaacaaccagaagcttcttctcccgcgccaccagcaacctgcttctttcccgcctgttttcgtgacagtgtcgttgttgtcgtcttcagtgacgagacaatatcaagtatcgcttagtcaccggagctgctaaggcagctcgccgccaagacgtcttccacaaagaaaaggaagatcactaccaacacgcccgccgccggggatgaagacatagacctcggctctcccgacgtgcccctccagtcctgcgagcacgagcaggactccgatctcaccttctccttcacctctgccgccgtcgacgccccgccctcgcccgcctacctgcgcgccgactcgctgcccgcctcgagcctcccgcctcgcctgcagaccttccacgccggcacgcaccccatcgccgaggacgggtcgtcggtcgcgagctcaccctcgggcgcctacgccgacctctccatcaacagcgaccgtggcgcagacacacccgccccggagttcaccacctgcccgcggggcgcctctcccttcgccaagaccacccaccaccgagctctcatggggggcgcttccgatttcccggaacgggcctcctcgcccttgaagcgtcgtgcatccagcatggaaccggacgagaacgcccggcatggagctggcggcacggatctagacatgacctcccctccctccgatgccgcagcaccggccccgacctctgctcccgcccacaacacaaatggctcccctactcagagcctcgacgacacggtcatggacgcttcagatgcagctacctcacagccgcctcggtcgattgaggcccatataagcagcatacggacgcttgtacaagagatgagcgtcaatcgcttggaagccgatcaagaatgctatattgtctccaaaagctggcttgataaatatgtacccgattcttctaagaaacagactgactccgatctctccaccattccgccggttgataactcggatttgatttgggaagtcatcaccgatccttgtgtcggaagtggtattaccgacgtcatgaagaagaaattcgtgcggatgaagcctggccttaacttggacaacttcgtaccgttccctgctgaagcctggaagctgctaatgcagtggccaggcttggtgaaagatcagatgccgattcgccgttacgcctcggataccagtgacaggcaagacggatccaatatcatgtttgagtttcacccacccgtgcttagcatacatcgactctggtctgcccacagtcgtgtacctgtcgaggcatccttaaaacggagtaacccagaacctgccaggcttgtccgccgtggctccagcaagtttgaagtcttcctcaagcaagcgaagaatgtcgccaagatcgacctgaatcagcgagtcagaggctggcaaatccacccacaaggtaaagaccaggatcccgcagtctggaatcatctccttgtagatgtggaggcctttgccaaactcgaaaggggtgcggaaaaggagttagtcgagtttggggactttactaccggttctgtcaagacgttgcattctctggagatcagtcaagacatgcccattgttctcgacccacacgaggagggtatggagtggacttcgacgtatgtgccgagcgcagaaatgacccttcctacgcgctccagtgcgacgaatctggctgtccagaatcactcttcccgaggtggacgtacaagtcctgctccaatcggccccatgacccggggcagatcaactaaatcgggccgtactattggatgcgttggtctcacaaacctaggaaatacatgttatatgaacgctgcactccagtgtgtgagaagtgtcgaggaactgaccaagtacttcctggttggtgagtgggagaaagagctgaataaagacaacatcctggcccataatggtgaggttgccgctacgtacgcagctctcctcagggatatctacaaagattcggctccgagtgcgacgacaccgcgccagttcaagcatacgattggccgtcatgccgctcaattctctggctacgggcaacaagattcgcaggaatttctcggattcttgttagatggccttcaggaagatctcagccgcgtcaagaagaagccttatatcgaaaagcctgattccacggatgagatgattcatgaccccgaagctattcgcaagatggccgatgaagtgtgggatatcacgagaaaacgcgacgattctgtcatcgccgatctgttcactggtctttacaagtcgactctggtttgccctgcctgtgacaaagttagcatcaccttcgacccgttcaacaatctcactcttcagttacctgtcggaaataagtggagtcatgttgttaaattctttcccctcaatgacaagcccgtcgacatcagggtagagattgagaagcatgacagtatcaaagctctcaaacagttcatatcagccaggacaggtgtccctgtcgaccgattgcactcatgtgaagaatggagcaagaagttctacaagcatcaccccgacaacagtactgcgagtgatgaaatctcgtctcctaatgatcacgtgttcgtcttcgaattggaggcgaagcctacaaactatccggggaaagccatcaaacagcagaagtttcggtccatgctggatccagagcccgcgcccgtgacctgggacgatgaagaagcagagagtcttctagttcccgtattccatcgcaagcccaataccaaaaaggggttctcatctccgaagttgatggctgcttgcattcctcatttcattatgcttacccctcaggaggcaaggagcgaggacatcatccgccgcaaagtgcttgagaaggtggctacttttacaaagcatccctggtttgcgcggtcagatgactctgatggctctgagactaccgaacctgaaatgatagggccgaatggctcggacacagggtcgtccgtaggaggcaaagtcgtagctcagtctataaagggggaggacgaccttgttgatgtgcaaatgaaagacgcacctgatgcaaagaacagcaatgcgagccgtttgccacaacgtgtctttaaccgcaagaagcccgcatgggtgaaccacaattcattcctcccgtcagagttacagaatctcttcgagatcggtatctgcggagagtcttcaagtcccatccccacaggtagtaatgctaatatggaggataaagagtatccgagactttcgtctcgcgctataccagactctccctcttctgaggaccaacttgataatgccacgactggtacagcctcaaacgacgaattcagctcagacgaggcacccaaatcttcggcagagatggctgcaacgcgcatgaacgatgaaagtgacgacgacgatggcactcctgtggtgaagtcatatccgcatcgacctaagcaacagcgacagtcgaaagccaataacaaagcaaatcgtggtaagaaggtcaaatacggtaaaaagggcactaaaagagctcagcaagctcaacgcgagcaaaaggaacagcgaaagaaaaaggcattgggcttcgaagacttcaccgaaatggccgaccctattcccgatggcggcccactcgtcaggttgagggaaggtcttgttgtggactggtccgaggatgcctacgataacgtctttggtacggatacaactctggagacctgggaaaactgcgaaaccttgccagatccagatctagagaaagcccagacagctcgtgccaggcgtcgtaagcatggcattaccctagaggagtgcctggatgagtttgagcgagatgagattctctcggaacaagacatgtggtactgtcctcggtgtaaggagcatcgccgggccagcaagaaacttgacctctggaagtcgccagatatccttatttgccatctcaagcgcttcagctccagtggattccgcagagacaaacttgagacgttggtcgaatttcctattgagaatctcgacatcacttctcgcgtactgcaaacagagccggggaagcaagagatttatgatctcattggtgtcgactgtcattacggaggacttggcggtggccactacacagcgtacgcgaagaactttgtggacggacagtggtattcatacaatgattcatccgtatccaagatcagcccggagcgcatagttgacagttcagcgtacatgctcttctaccgtagacgatctgacattccacttgggggccctcgatttaccgagatcctagaacagttcacagaagcacatggctctgatgaagagatgtctaagccgggggaaggtcggcgtctcggcgagggctcctcccagattgggtcgtcgagcgctataccaggagtaggagctactcgcctgcccggaaatcatggttctagcaagctatcctatggagcagatgatatgcagatctccaacacgtcttaccaatctggacaaatggacgaagatgaaggtattgggatggcagaagacaccaaagcaaccggattccaaggctttgctaatattaatacctggtcattcgatggagtgacgaatgaaaacagccccattgactctggcgccgcgtccgacgaagcacagcacgactcgtcaggcgatgaacgagcttctagtcggcggctcagcgttgaaggaatgctggagtacacactgccgccacaatcagaggcagagccaccatcctacagcgagatgcctgcccctgttccaagacaatgggccgctcaacacgcagtgcacgaaattgtacccaacggcgagcatgaaccccaatcagatgacgcggcagagattcatctagacgatgatgataaaatcagggtctagtggctgatgtcattgtcgtggctatgcctttccaagttcttacaagcggtgcagtatgtcttgtgcaagactggcagtgtcttttcaaatgtcctcgctacatttgtatttttggccgccaaattctacgcacatctctacatgatgctcttagtgtactggattgaggaaaaaagggagcgtcaggcccgagtactggaggtacaaatttccaaacctaagaattagtcgcaaaccagtcctgctgacaatctggacatggaaagaaaagaggcctctcttcacttgcccgtggcgactcttccaagacaatgactattaagtcgctgtcaatgtcggctctaactacatatttttcacatgagaaccgaccgtacatacatacactctatacatagtgagggtagatactacactccaaacaaaagagacactcacagtgatgaacgctacaccaacttgcggtgtgaggtggagagtttagagatagacagatatgattatcacgacaaagaagaacatgatagacggcggggtttcataaggacagggtggttctggcgttccgtctcattcaagagtgagtgaaagaatgaactcaggatgatcgatgtaactgcatggcataaacctgtcgcgaccacacagcacgtcgtacgggtaggcgttttgtatgggtgtttgaagggtcgagagatatttgtttgatacgaatgcaagtatgttcgatcttgctaattgactttccaatgtgataggcagcttaagcaagtgagatgaacctaagcatgcacaacatggtatgggagacaaaacgtagactagtagatccaaaagaagccaagacatactataattctcaagtcag

SEQ ID NO: 20556 - DNA, 2574 bp, Muscodor strobelii
  misc_feature: SGI cDNA ID NO. 566941
  misc_feature: Reduced expression when VOC is produced
  misc_feature: Encodes the peptide sequence at SEQ ID NO 20557
atggacagcgcaacctgcaatgtcatctacgtcgaccgcaatgtctgccaagaacgattgatcgggcccaattcgtccgacttcctcgagagcggcgagcttcgtgccaacctcgagcttctcattaatgccttccaacatgtccacctgtgtaccaatggcgccgaatgcctttcgaaactatctaatctgcacgacacgtcaatggtagagttgaagccaacgcttgtactaatcgatacgccccaagatgagcagttgttgcgaccgacgcccgtatcacgcgacccgtcgccgcactcgaaagtaatcaacggccacgaaagaggagacagcgcctcaaccgtgtcggaagatctatatggcttggctttgttggagaaactagtatacgaaacacaccttagaagtctatcgaagctggtcgttccgattcccatcgtcagcttccctttgctgcgcacaccgccggcaactgctgacaatgcagacgaggcgccgctgcagcccacatacactagatatctctcggagacgcaggatccgatcggcaactcattgacgagccgcgcactcctgagaaaatgcctcgatctgggtgctgtggacataatggccagcccgcttcatgtcaagaccctcaccacactcgaagtccacgcgtatcgagcccataaagaagctgccaaagagcaacaagccctaatggagatccgcaggggccgaaaacgatcatgggttggcgtgcacgacgaaaagccctttgcgtacctgagggaggccatggtgtcaggcttgatgggtgggatatgtcgttcgggagaggaggcggaagaccgcatctcaagcgtgcggatcaatctgtcatccaggcgccgtgaagaaataggggaagcactgggcaaatggcatttttgcgccccagacttctgcgacgatgctctattgattgcagcgacaataatgtttgagcatgccctctccatgccggaattagagaagtggcggatacctacagatcaacttacgacatttctggtcgcctgccgagcagcgtacaataagttcgtaccgtatcacaactttcgccatgctgtcgacgttctccaggctacgttcgacttcctggtgcacgttggagcactccctccctattcgtccgaatcacaacccaccaccatttccacagaaagctcgccaatcacctctcttattggaccatttgaggccttgacgctactcgtcagcgcgattggccatgatgtcggccatccgggcgtcaacaatggctttttggtaactttgaatgcccctcttgcgcaattgtacaacgaccgctctgttttggagtctttccattgcgcagcgtattcgcagattcttcgaagacattggccacgcgtcttcgaagattctaaaatgcgaactctgatgatcagttctatcttagcaacagacatgggcctgcatttcgactacatgaagaagctttgcaatcttcaagaaaagttgaaagaagatccgtctaccgagggatggaatgcccgcaccgtggaggagaaccgggctctcctctgttccttactgatcaaatgcgcagatatcagcaatgtggctcgtaagtacgatgctgctcttcagtggatggccatcctctgcgacgaattctccagacagttcgagatggagaaggagatcggaattccctcttcgctcatctcgcctcccaagaaagacttcatgtctcttgctcaatcccaacttggcttcgtcaatctatttgcgataccattattccagggcgtggctgaagtcttacctcacatggagtataccgttcaagaactccacaaaaacgtgcgtcactttgaagcagctctcgaacatattccaaccttggccgacgaccagaaaatcgcattcaatcagcaaccattcaggccggagtcagtgaaattggttcatgtcttggttgaagaagaccgatgctcctcgactgagactgccaaggccgacacggttccggttcccgaacaccacgccgaaatgaagcaagccggctcatcgccccccaaccagccgacccaggttccgaatataccgggacaatacaaagaagcgaatggcattactacttactacgaggatacgatagactttgccacaagcgatccattccacacacatgagcatcagcggtgcagtgaaacgacagaaggggggagctcttcccgatttggcgcagactggcagtctcaagctacaagcgccacgactagcaagatgcccctgtctcccagcacgcaagggacgagtatagtgagccaagactctatggagcgcccggcaagtgatccaaccacagtgacgacggctcccgactcgtccagtactagtaccccgaccgcaaatgtcgactcgaccacgcagtctgaggaagaatcgaatggaaatactctgaaacctgacggaacgctcaaaaagaagacaagccggtttaggatgaacgtgtcaaccttcttcaggcgaaacaggggaattggctcgccctcttctggcggatcaagtaattga

SEQ ID NO: 20557 - protein, 857 aa, Muscodor strobelii
  misc_feature: SGI Peptide ID NO. 566941
  misc_feature (359)..(620): Pfam Id: PF00233 Pfam Desc: 3'5'-cyclic nucleotide phosphodiesterase
  misc_feature (407)..(569): Pfam Id: PF00233 Pfam Desc: 3'5'-cyclic nucleotide phosphodiesterase
  misc_feature (1)..(856): NCBI GI: 260103321 Blast Desc: high-affinity cAMP phosphodiesterase [Magnaporthe oryzae]
  misc_feature (1)..(857): NCBI GI: 256732694 Blast Desc: [Nectria haematococca mpVI 77-13-4]
  misc_feature (1)..(855): NCBI GI: 261358162 Blast Desc: 3',5'-cyclic-nucleotide phosphodiesterase regA [Verticillium albo-atrum VaMs.102]
  misc_feature (1)..(856): NCBI GI: 145615543 Blast Desc: MGG_05664 [Magnaporthe grisea 70-15] gi|145022355|gb|EDK06375.1| MGG_05664 [Magnaporthe grisea 70-15]
  misc_feature (1)..(850): NCBI GI: 116207692 Blast Desc: CHGG_03139 [Chaetomium globosum CBS 148.51] gi|88183736|gb|EAQ91204.1| CHGG_03139 [Chaetomium globosum CBS 148.51]
  misc_feature (1)..(832): NCBI GI: 46125073 Blast Desc: FG06914.1 [Gibberella zeae PH-1]
  misc_feature (1)..(647): NCBI GI: 156037760 Blast Desc: SS1G_12594 [Sclerotinia sclerotiorum 1980] gi|154698002|gb|EDN97740.1| SS1G_12594 [Sclerotinia sclerotiorum 1980]
  misc_feature (1)..(649): NCBI GI: 154304294 Blast Desc: BC1G_08417 [Botryotinia fuckeliana B05.10] gi|150854219|gb|EDN29411.1| BC1G_08417 [Botryotinia fuckeliana B05.10]
  misc_feature (1)..(816): NCBI GI: 85081823 Blast Desc: NCU00478 [Neurospora crassa OR74A] gi|28917874|gb|EAA27561.1| [Neurospora crassa OR74A]
  misc_feature (1)..(643): NCBI GI: 238486544 Blast Desc: high affinity cAMP phosphodiesterase, [Aspergillus flavus NRRL3357] gi|220699389|gb|EED55728.1| high affinity cAMP phosphodiesterase, [Aspergillus flavus NRRL3357]
  misc_feature: Useful for introducing or modulating the production of volatile compounds
MDSATCNVIYVDRNVCQERLIGPNSSDFLESGELRANLELLINAFQHVHLCTNGAECLSKLSNLHDTSMVELKPTLVLIDTPQDEQLLRPTPVSRDPSPHSKVINGHERGDSASTVSEDLYGLALLEKLVYETHLRSLSKLVVPIPIVSFPLLRTPPATADNADEAPLQPTYTRYLSETQDPIGNSLTSRALLRKCLDLGAVDIMASPLHVKTLTTLEVHAYRAHKEAAKEQQALMEIRRGRKRSWVGVHDEKPFAYLREAMVSGLMGGICRSGEEAEDRISSVRINLSSRRREEIGEALGKWHFCAPDFCDDALLIAATIMFEHALSMPELEKWRIPTDQLTTFLVACRAAYNKFVPYHNFRHAVDVLQATFDFLVHVGALPPYSSESQPTTISTESSPITSLIGPFEALTLLVSAIGHDVGHPGVNNGFLVTLNAPLAQLYNDRSVLESFHCAAYSQILRRHWPRVFEDSKMRTLMISSILATDMGLHFDYMKKLCNLQEKLKEDPSTEGWNARTVEENRALLCSLLIKCADISNVARKYDAALQWMAILCDEFSRQFEMEKEIGIPSSLISPPKKDFMSLAQSQLGFVNLFAIPLFQGVAEVLPHMEYTVQELHKNVRHFEAALEHIPTLADDQKIAFNQQPFRPESVKLVHVLVEEDRCSSTETAKADTVPVPEHHAEMKQAGSSPPNQPTQVPNIPGQYKEANGITTYYEDTIDFATSDPFHTHEHQRCSETTEGGSSSRFGADWQSQATSATTSKMPLSPSTQGTSIVSQDSMERPASDPTTVTTAPDSSSTSTPTANVDSTTQSEEESNGNTLKPDGTLKKKTSRFRMNVSTFFRRNRGIGSPSSGGSSN

SEQ ID NO: 20558 - DNA, 4264 bp, Muscodor strobelii
  misc_feature: SGI EST ID NO. CUFF.48255.0
  misc_feature: Variant of the nucleotide sequence at SEQ ID NO 20556
gtcgccagacctgccaccgccgctggtcttttcgcatactattctgtactgcacattcacctttctcgacatatctcctccctccactcctgctgctacatacctctttgctactgcatttcacttctccatcgtttctacctacctacgagcctacacaccggcgtgactttgcccttgccagccccgtgcggtgctcgatactgcaccagacgcccccatctcttgctcttctgtctccattcggacctcacttcccacctcgttctcttacctatccatttctctgccgacctgcgccaaaattagcattcgccctactctgctctcttatctaccgcattcatatcgcataccagtatatcgcctgtttttcgtagcctcacctcgacgcatacccgtatcgatcgattcctctccgactcgctcttcgtgtcgtcacagcagcccgtcctgcatattgtacattctcacagcggctacgagcatccaccacggcacctcgccatagttcgtacatgcgcacctcgcccgtcttgcacccatctcttaattcgtccactgcgatttctcgacgccattcctgcataccaccgcatagtctgcctctgctctaacgcaaacttgacccgagaacaaggctcttctgcaatcacgctcttcggttctccgtgcgagggtaatgcagtgattccgcttttgcgccgttataatcgaccgcagactgcttttccatgttgacattagttcaccccgacgtgtctggccctctttacttctggtcgcatgcccaatagccctgcgctttgtcgacatctttgctattgctgtttcatgtgggcctgtttgtctcgctcccatcgttgtcgatagccgactgaggccctgttcgagtctgcagttccacccgcgcctcgacatagcacctggacgtggtacgggcaacttgcgacggccccgaaatagctgcaggctgagacacatatctcactgacaggctgctactgctcagtgcgatcgcctcgttccttctgtatatatcatttccgtcggccaccaccgatattctccagtccatcggcgtcgatcgcgacggccggtccgtagtcgggtggaagcgctccagtcgcgggactgagtgcacaagccgccgccatggacagcgcaacctgcaatgtcatctacgtcgaccgcaatgtctgccaagaacgattgatcgggcccaattcgtccgacttcctcgagagcggcgagcttcgtgccaacctcgagcttctcattaatgccttccaacatgtccacctgtgtaccaatggcgccgaatgcctttcgaaactatctaatctgcacgacacgtcaatggtagagttgaagccaacgcttgtactaatcgatacgccccaagatgagcagttgttgcgaccgacgcccgtatcacgcgacccgtcgccgcactcgaaagtaatcaacggccacgaaagaggagacagcgcctcaaccgtgtcggaagatctatatggcttggctttgttggagaaactagtatacgaaacacaccttagaagtctatcgaagctggtcgttccgattcccatcgtcagcttccctttgctgcgcacaccgccggcaactgctgacaatgcagacgaggcgccgctgcagcccacatacactagatatctctcggagacgcaggatccgatcggcaactcattgacgagccgcgcactcctgagaaaatgcctcgatctgggtgctgtggacataatggccagcccgcttcatgtcaagaccctcaccacactcgaagtccacgcgtatcgagcccataaagaagctgccaaagagcaacaagccctaatggagatccgcaggggccgaaaacgatcatgggttggcgtgcacgacgaaaagccctttgcgtacctgagggaggccatggtgtcaggcttgatgggtgggatatgtcgttcgggagaggaggcggaagaccgcatctcaagcgtgcggatcaatctgtcatccaggcgccgtgaagaaataggggaagcactgggcaaatggcatttttgcgccccagacttctgcgacgatgctctattgattgcagcgacaataatgtttgagcatgccctctccatgccggaattagagaagtggcggatacctacaggtaagaagccatctcccacgtcagattggctgcccgtttccgtccagggtagtaagctcacggtgtgcatgcagatcaacttacgacatttctggtcgcctgccgagcagcgtacaataagttcgtaccgtatcacaactttcgccatgctgtcgacgttctccaggctacgttcgacttcctggtgcacgttggagcactccctccctattcgtccgaatcacaacccaccaccatttccacagaaagctcgccaatcacctctcttattggaccatttgaggccttgacgctactcgtcagcgcgattggccatgatgtcggccatccgggcgtcaacaatggctttttggtaactttgaatgcccctcttgcgcaattgtacaacgaccgctctgttttggagtctttccattgcgcagcgtattcgcagattcttcgaagacattggccacgcgtcttcgaagattctaaaatgcgaactctgatgatcagttctatcttagcaacagacatgggcctgcatttcgactacatgaagaagctttgcaatcttcaagaaaagttgaaagaagatccgtctaccgagggatggaatgcccgcaccgtggaggagaaccgggctctcctctgttccttactgatcaaatgcgcagatatcagcaatgtggctcgtaagtacgatgctgctcttcagtggatggccatcctctgcgacgaattctccagacagttcgagatggagaaggagatcggaattccctcttcgctcatctcgcctcccaagaaagacttcatgtctcttgctcaatcccaacttggcttcgtcaatctatttgcgataccattattccagggcgtggctgaagtcttacctcacatggagtataccgttcaagaactccacaaaaacgtgcgtcactttgaagcagctctcgaacatattccaaccttggccgacgaccagaaaatcgcattcaatcagcaaccattcaggccggagtcagtgaaattggttcatgtcttggttgaagaagaccgatgctcctcgactgagactgccaaggccgacacggttccggttcccgaacaccacgccgaaatgaagcaagccggctcatcgccccccaaccagccgacccaggttccgaatataccgggacaatacaaagaagcgaatggcattactacttactacgaggatacgatagactttgccacaagcgatccattccacacacatgagcatcagcggtgcagtgaaacgacagaaggggggagctcttcccgatttggcgcagactggcagtctcaagctacaagcgccacgactagcaagatgcccctgtctcccagcacgcaagggacgagtatagtgagccaagactctatggagcgcccggcaagtgatccaaccacagtgacgacggctcccgactcgtccagtactagtaccccgaccgcaaatgtcgactcgaccacgcagtctgaggaagaatcgaatggaaatactctgaaacctgacggaacgctcaaaaagaagacaagccggtttaggatgaacgtgtcaaccttcttcaggcgaaacaggggaattggctcgccctcttctggcggatcaagtaattgatgcgacgacccactgatgcgagtcgaagatacgaacccgaaggaaagagaggacgtgatggagaggaaggaacatgtcaccattttacgtcgtttataccatgatacccagcaaacatagacggtaagggggaaggtcggaggccaacgatggcctgtgcgcagagccggttggcgtcgctacattttgtttctacgtacatattgctatgagcgactgagggatgtgcgcttggtctcgccaagagcggtggaggagatgaggctggccgggcttggaaaaatagcattgctgcagggtggtgcataggaggcgtttttggagagattctcaggcttgcccatcacggattcgtggaaggtgacaaaatatagccgacttttcttgaacaatcatgccattatttatgcttcagcgtgaagaacagtgttgtttctagtaatgcttgctgatgagcttag

SEQ ID NO: 20559 - DNA, 3960 bp, Muscodor strobelii
  misc_feature: SGI cDNA ID NO. 566942
  misc_feature: Encodes the peptide sequence at SEQ ID NO 20560
atgatccgacccccaatcgattcccccgtccgcatcctcgtcaaccccgcgctttgcttgcagcactccagcaacccctccgtcctggacgatcccgcccaagagccctcaaccaccgccctcgactcccgcctgagccagtctcgcaagtcttacacatacttctctctgtctcttttcttatctcttctcttctcttgggttgctagactgtgccgcgtcgtcatctgcggcttttcactttactttatcctctatcatcccctctcatcggcacatccacatcccacgttgatccgagcttcttggccatcttcctcccggattccgcatccctcaagcatgaaacagaatcatggcggcggccagggtaccggcgccgacaaaacgcatcctacggatgatgagcggcaatcccacctccagccgtcccgaggcagtcgcaccgtctcggccaagcacatctcgccacagctccagatccccaagaacaggagcaccggcaacctggccatcgtagccgaggacgacgcccacgtcgacagcgacgacgaccccaagccgagactgcgcttctcgctcgacgccggcgctgctctcgccgattccgataatctgctcagccggtcgacgtccatcatcgccgagcatgaccacggcttggggctgtctggtcttcgtcgcatccgccagcacccgactcctcgcaatcccaccctgccctcgaccgccgcatcctcgcgtagtccctcgatgagcctcgcccgtactgcctcgctgaccatgatgcttcctccgtcggggccctcctctcccagcttcggcgaggatctctcccgctttccctccgagtccctgcactccttctccttcgcccatcagtctgaagatctgatacacagtcgccagaacgtcttgaaacggtcgatcgagtttatgaaagaccgcatgggctgggccgtgtcttccaacgcagccatcgccagcgcccaggccagagtaaccggcgatgtggagacgcagaacatgcttgacttactagccagggcacatctcgtcggcgccggtaacttgccgaatgtagaccctgctctcgcgcccggccccatcaccggcccggcacacgtctctggagagaacctgttcgagcgtcagttcatccctaggaccgggagccccgactcgtacgctacttctccgacaacgacgcggagccatgacaaagtgccgccgagtgtccccagcgaccaagcgaggacgacagaaaagcacttggaagtgcagcaagatcaaaccgactcggagaactcgtctaggacgccgacaaacgagagtggttcgaccgccaagacctcaccacccacaacccggcggccgagtttgaggaggacattcacagacgttgccggagctggcgtacaacagaaacttatagatgcgcttgcccagccctttcccgccagccaaggcagtggctacccggatgcgttgttatcccccattgtaccatcacagcccttcacttcactggcctcccccggagctctgggcccagtacacacgcattcctcacggtgggtgcctgctgcacaggctatatttacgaccgaggctaaaccgccgtggaccattatcgctgccaacgatttagcatgtctcgtcttcggtgtgaccaaggccgaggtgcggaagatgggcattttagaagtagtgcaggaggagcggcgagactggcttgaaaagaaactccttcaggccgactcagaaggtggtgaccagccggcttccagcatcacgccacccacgccaacgccatctgcaggttcgactcttctgggcggtcgcggtggtatcacggcacaactattaagtaaaccaaattctagatcgcagcctccaaaggctccaacaaggcgtgcgcaaaccgtacacagcggagatacgagagagcccaaagcacgtggtcctacttctcattcgcggtcaagaggcgtactactatgcggagacgttgtgccgatacaaaagcgcaacggtaccacaggatccgcgagtctatgggtgaaggagaagaaagtcggtttaatttgggtactagaagaaattcatgaagacgttgcctttctgagcctcgacgaggacggcgttgtcacaaaggttacaggcaatacatcatcgatttgggggcaagagaagatccggcccggaattgatgtagggaaactcattactcgaatacctcgacaaggcatcgacccgcgctttggtgccatcgactatgctcaaatcgccaagcgaaaatatttcacatgtcggaacggcggcaacgttaatatccctgctactgttgcacaaacgaggggtcaaatggaactgcgtgtctcttgtttccctcatatcgccggcatcatcgttgtaaacaccgatagcctcaagatcaaaagctccaactccgcgttttgcggagcattatttggctacgaaaaaccagagggccaatctatcaatgatcttctgccggactttgacaaaattctcgatgttcttcagcggcaagaaggtgtccagattcgagatggcatcgtcatcccagaacacagctttcgaaaagcatcggctttggtaggaattcatgagggacgacccgatgccgcttcgaccttccttaatccagacggcttgcttgcgcgccaccgggatggcactgagttgaagattgatgtacaaatgagaattgtgaagagtgagaagcactcagctgacgattcagggtcaagtgacgatgagtcatccgccgacgagacggctttgtcgggcgtcgaatcggaaatggtgtacgcaatgtggattacatattccaggcatctgcacgcctcgaaacacatgccccccaacgcatctcctctattatcaggagtcgggaccccccctcaccaaccctcacctggccaaacacctgcacctacacccccagatttcgcatcggaaccagaggatgcgactccgaaagcctcaccttctgctgcttccatgttgtcgagacaactcaaggatgtagccgtgaacgcagccaagaaatttacgggcggtcaaaaacgcgaagagccaccgaaggcttcctcaataaccccgacggtcgttgcgcccccagcgaagaagacgatagacagctttgtgatactagaagatatggggcaaggtgcatacggccaagtcaagctagctcggtataaacataatggaggaaagaaagttgttctgaagtacgtgacgaaaaggcggattttggtcgacacatggactagagatcggcggctcggcactgtcccccttgagatacacgttctagattatcttcggcgagatggctacaagcaccccaacatcgtagagatggaagactttttcgaggacgaaaccaattattacatagaaatggcgcctcatgggctacccggcatggacttgttcgactacattgagcttcgcgcgaacatggacgaagaggagtgtcgtagcatcttcgttcaagtcgccaaagctatacgtcatttgcatatcgaggcaaaggtcgtccatcgtgacatcaaggacgagaatgtgatccttgatggtgaaggcaatatcaagcttatcgacttcggcagtgcggcatatatcaagaatgggccttttgacgtattcgtgggtaccattgattatgccgcccctgaggttctagctggcaagccatatggcgggaaagagcaggacgtgtgggctcttgggattctcctttatactatcatatacaaggagaatcctttctacagcatcgacgagataatggatcgcgatcttagagtgccgtacaccatcagcgatgagagtatcagcctcatccgatgtatgcttaaccgcgacgtatcacagcgctatgacatcgatcaggtgctgcaacatccttggtgtcaactgtga

SEQ ID NO: 20560 - protein, 1319 aa, Muscodor strobelii
  misc_feature: SGI Peptide ID NO. 566942
  misc_feature (1058)..(1317): Pfam Id: PF00069 Pfam Desc: Protein kinase domain
  misc_feature (135)..(1319): NCBI GI: 85109812 Blast Desc: NCU06249 [Neurospora crassa OR74A] gi|28924751|gb|EAA33864.1| conserved [Neurospora crassa OR74A]
  misc_feature (146)..(1319): NCBI GI: 116192201 Blast Desc: CHGG_05818 [Chaetomium globosum CBS 148.51] gi|88181731|gb|EAQ89199.1| CHGG_05818 [Chaetomium globosum CBS 148.51]
  misc_feature (155)..(1319): NCBI GI: 171686678 Blast Desc: protein product [Podospora anserina] gi|170943300|emb|CAP68953.1| protein product [Podospora anserina]
  misc_feature (192)..(1318): NCBI GI: 261360309 Blast Desc: serine/threonine-protein kinase ppk6 [Verticillium albo-atrum VaMs.102]
  misc_feature (115)..(1318): NCBI GI: 46125185 Blast Desc: FG06970.1 [Gibberella zeae PH-1]
  misc_feature (115)..(1319): NCBI GI: 256732721 Blast Desc: [Nectria haematococca mpVI 77-13-4]
  misc_feature (156)..(1317): NCBI GI: 156051108 Blast Desc: SS1G_06961 [Sclerotinia sclerotiorum 1980] gi|154704739|gb|EDO04478.1| SS1G_06961 [Sclerotinia sclerotiorum 1980]
  misc_feature (125)..(1318): NCBI GI: 145602057 Blast Desc: MGG_05220 [Magnaporthe grisea 70-15] gi|145010506|gb|EDJ95162.1| MGG_05220 [Magnaporthe grisea 70-15]
  misc_feature (159)..(1317): NCBI GI: 154295219 Blast Desc: BC1G_13423 [Botryotinia fuckeliana B05.10] gi|150844150|gb|EDN19343.1| BC1G_13423 [Botryotinia fuckeliana B05.10]
  misc_feature (193)..(1318): NCBI GI: 169616969 Blast Desc: SNOG_11660 [Phaeosphaeria nodorum SN15] gi|160703302|gb|EAT80704.2| SNOG_11660 [Phaeosphaeria nodorum SN15]
MIRPPIDSPVRILVNPALCLQHSSNPSVLDDPAQEPSTTALDSRLSQSRKSYTYFSLSLFLSLLFSWVARLCRVVICGFSLYFILYHPLSSAHPHPTLIRASWPSSSRIPHPSSMKQNHGGGQGTGADKTHPTDDERQSHLQPSRGSRTVSAKHISPQLQIPKNRSTGNLAIVAEDDAHVDSDDDPKPRLRFSLDAGAALADSDNLLSRSTSIIAEHDHGLGLSGLRRIRQHPTPRNPTLPSTAASSRSPSMSLARTASLTMMLPPSGPSSPSFGEDLSRFPSESLHSFSFAHQSEDLIHSRQNVLKRSIEFMKDRMGWAVSSNAAIASAQARVTGDVETQNMLDLLARAHLVGAGNLPNVDPALAPGPITGPAHVSGENLFERQFIPRTGSPDSYATSPTTTRSHDKVPPSVPSDQARTTEKHLEVQQDQTDSENSSRTPTNESGSTAKTSPPTTRRPSLRRTFTDVAGAGVQQKLIDALAQPFPASQGSGYPDALLSPIVPSQPFTSLASPGALGPVHTHSSRWVPAAQAIFTTEAKPPWTIIAANDLACLVFGVTKAEVRKMGILEVVQEERRDWLEKKLLQADSEGGDQPASSITPPTPTPSAGSTLLGGRGGITAQLLSKPNSRSQPPKAPTRRAQTVHSGDTREPKARGPTSHSRSRGVLLCGDVVPIQKRNGTTGSASLWVKEKKVGLIWVLEEIHEDVAFLSLDEDGVVTKVTGNTSSIWGQEKIRPGIDVGKLITRIPRQGIDPRFGAIDYAQIAKRKYFTCRNGGNVNIPATVAQTRGQMELRVSCFPHIAGIIVVNTDSLKIKSSNSAFCGALFGYEKPEGQSINDLLPDFDKILDVLQRQEGVQIRDGIVIPEHSFRKASALVGIHEGRPDAASTFLNPDGLLARHRDGTELKIDVQMRIVKSEKHSADDSGSSDDESSADETALSGVESEMVYAMWITYSRHLHASKHMPPNASPLLSGVGTPPHQPSPGQTPAPTPPDFASEPEDATPKASPSAASMLSRQLKDVAVNAAKKFTGGQKREEPPKASSITPTVVAPPAKKTIDSFVILEDMGQGAYGQVKLARYKHNGGKKVVLKYVTKRRILVDTWTRDRRLGTVPLEIHVLDYLRRDGYKHPNIVEMEDFFEDETNYYIEMAPHGLPGMDLFDYIELRANMDEEECRSIFVQVAKAIRHLHIEAKVVHRDIKDENVILDGEGNIKLIDFGSAAYIKNGPFDVFVGTIDYAAPEVLAGKPYGGKEQDVWALGILLYTIIYKENPFYSIDEIMDRDLRVPYTISDESISLIRCMLNRDVSQRYDIDQVLQHPWCQL

SEQ ID NO: 20561 - DNA, 5001 bp, Muscodor strobelii
  misc_feature: SGI EST ID NO. CUFF.48249.1
  misc_feature: Variant of the nucleotide sequence at SEQ ID NO 20559
tcaagaagtctcagccgtcatgctatctgatcaactagcaaattagtttgaagacgcaatgggacgaagtttggcgcttgtcacacatggttctggaatgttgtcagagccgcgttgtttggtggtgggagctgtgggttgaggtggcacctgagtcgagttgtctaactaagcttgtcaaggattccccggctttcactacactgctttcagcgaaatctcaactactcctctagcgtgtctagtactaagccatgtcttagttgtaccgcctaacacgatagatggactcaaattaaggggtctggcagcaagtctctgctctcgattgcccaaagagatctggagacgagcatgtagacggcgggcaccggtagcggcaagaagatcagcggggaggaggtgacgttatcgtggactcgcacatgtctagggtccagggaggtccggggtatgtggaaggagggagtcgtgaggcatctggaatttgctagccattcaaattctcatactaccgactgcccggtggagatagtcagagaccaacggatcgtattcgtagcccagagacagacaaattcaattagcttacagacccgaaaaagagagagagaaaagatatgaaagataatagcttttgagaaaaagatgagcagccagtcccaaacgccgacaacaggactggagggtctatcgtgaaattcgcatgatccgacccccaatcgattcccccgtccgcatcctcgtcaaccccgcgctttgcttgcagcactccagcaacccctccgtcctggacgatcccgcccaagagccctcaaccaccgccctcgactcccgcctgagccagtctcgcaagtcttacacatacttctctctgtctcttttcttatctcttctcttctcttgggttgctagactgtgccgcgtcgtcatctgcggcttttcactttactttatcctctatcatcccctctcatcggcacatccacatcccacgttgatccgagcttcttggccatcttcctcccggattccgcatccctcaagcatgaaacagaatcatggcggcggccagggtaccggcgccgacaaaacgcatcctacggatgatgagcggcaatcccacctccagccgtcccgaggcagtcgcaccgtctcggccaagcacatctcgccacagctccagatccccaagaacaggagcaccggcaacctggccatcgtagccgaggacgacgcccacgtcgacagcgacgacgaccccaagccgagactgcgcttctcgctcgacgccggcgctgctctcgccgattccgataatctgctcagccggtcgacgtccatcatcgccgagcatgaccacggcttggggctgtctggtcttcgtcgcatccgccagcacccgactcctcgcaatcccaccctgccctcgaccgccgcatcctcgcgtagtccctcgatgagcctcgcccgtactgcctcgctgaccatgatgcttcctccgtcggggccctcctctcccagcttcggcgaggatctctcccgctttccctccgagtccctgcactccttctccttcgcccatcagtctgaagatctgatacacagtcgccagaacgtcttgaaacggtcgatcgagtttatgaaagaccgcatgggctgggccgtgtcttccaacgcagccatcgccagcgcccaggccagagtaaccggcgatgtggagacgcagaacatgcttgacttactagccagggcacatctcgtcggcgccggtaacttgccgaatgtagaccctgctctcgcgcccggccccatcaccggcccggcacacgtctctggagagaacctgttcgagcgtcagttcatccctaggaccgggagccccgactcgtacgctacttctccgacaacgacgcggagccatgacaaagtgccgccgagtgtccccagcgaccaagcgaggacgacagaaaagcacttggaagtgcagcaagatcaaaccgactcggagaactcgtctaggacgccgacaaacgagagtggttcgaccgccaagacctcaccacccacaacccggcggccgagtttgaggaggacattcacagacgttgccggagctggcgtacaacagaaacttatagatgcgcttgcccagccctttcccgccagccaaggcagtggctacccggatgcgttgttatcccccattgtaccatcacagcccttcacttcactggcctcccccggagctctgggcccagtacacacgcattcctcacggtgggtgcctgctgcacaggctatatttacgaccgaggctaaaccgccgtggaccattatcgctgccaacgatttagcatgtctcgtcttcggtgtgaccaaggccgaggtgcggaagatgggcattttagaagtagtgcaggaggagcggcgagactggcttgaaaagaaactccttcaggccgactcagaaggtggtgaccagccggcttccagcatcacgccacccacgccaacgccatctgcaggttcgactcttctgggcggtcgcggtggtatcacggcacaactattaagtaaaccaaattctagatcgcagcctccaaaggctccaacaaggcgtgcgcaaaccgtacacagcggagatacgagagagcccaaagcacgtggtcctacttctcattcgcggtcaagaggcgtactactatgcggagacgttgtgccgatacaaaagcgcaacggtaccacaggatccgcgagtctatgggtgaaggagaagaaagtcggtttaatttgggtactagaagaaattcatgaagacgttgcctttctgagcctcgacgaggacggcgttgtcacaaaggttacaggcaatacatcatcgatttgggggcaagagaagatccggcccggaattgatgtagggaaactcattactcgaatacctcgacaaggcatcgacccgcgctttggtgccatcgactatgctcaaatcgccaagcgaaaatatttcacatgtcggaacggcggcaacgttaatatccctgctactgttgcacaaacgaggggtcaaatggaactgcgtgtctcttgtttccctcatatcgccggcatcatcgttgtaaacaccgatagcctcaagatcaaaagctccaactccgcgttttgcggagcattatttggctacgaaaaaccagagggccaatctatcaatgatcttctgccggactttgacaaaattctcgatgttcttcagcggcaagaaggtgtccagattcgagatggcatcgtcatcccagaacacagctttcgaaaagcatcggctttggtaggaattcatgagggacgacccgatgccgcttcgaccttccttaatccagacggcttgcttgcgcgccaccgggatggcactgagttgaagattgatgtacaaatgagaattgtgaagagtgagaagcactcagctgacgattcagggtcaagtgacgatgagtcatccgccgacgagacggctttgtcgggcgtcgaatcggaaatggtgtacgcaatgtggattacatattccaggcatctgcacgcctcgaaacacatgccccccaacgcatctcctctattatcaggagtcgggaccccccctcaccaaccctcacctggccaaacacctgcacctacacccccagatttcgcatcggaaccagaggatgcgactccgaaagcctcaccttctgctgcttccatgttgtcgagacaactcaaggatgtagccgtgaacgcagccaagaaatttacgggcggtcaaaaacgcgaagagccaccgaaggcttcctcaataaccccgacggtcgttgcgcccccagcgaagaagacgatagacagctttgtgatactagaagatatggggcaaggtgcatacggccaagtcaagctagctcggtataaacataatggaggaaagaaagttgttctgaagtacgtgacgaaaaggcggattttggtcgacacatggactagagatcggcggctcggcactgtcccccttgagatacacgttctagattatcttcggcgagatggctacaagcaccccaacatcgtagagatggaagactttttcgaggacgaaaccaattattacatagaaatggcgcctcatgggctacccggcatggacttgttcgactacattgagcttcgcgcgaacatggacgaagaggagtgtcgtagcatcttcgttcaagtcgccaaagctatacgtcatttgcatatcgaggcaaaggtcgtccatcgtgacatcaaggacgagaatgtgatccttgatggtgaaggcaatatcaagcttatcgacttcggcagtgcggcatatatcaagaatgggccttttgacgtattcgtgggtaccattgattatgccgcccctgaggttctagctggcaagccatatggcgggaaagagcaggacgtgtgggctcttgggattctcctttatactatcatatacaaggagaatcctttctacagcatcgacgagataatggatcgcgatcttagagtgccgtacaccatcagcgatgagagtatcagcctcatccgatgtatgcttaaccgcgacgtatcacagcgctatgacatcgatcaggtgctgcaacatccttggtgtcaactgtgacggaccaaccgcttgtaaatatgcggaaatgacgtttggacgaaaaatgcaacatgagattatggcgccgaggatgtacttgcgtactggcgaattcgaagactggcttttaggtcagagaactaaagtgcggggactttacataagtagcaaccccgagtaaagacatgagagagaagcatgatttatttgttttaatgggacgagatacccttggggagtttgcttttctttcgggtggtgggtagatcattaggtagggacccatagatttagcatacagagacatcagatacttacatgcatacatacaaacaagcttatatacggtgact

SEQ ID NO: 20562 - DNA, 984 bp, Muscodor strobelii
  misc_feature: SGI cDNA ID NO. 566943
  misc_feature: Encodes the peptide sequence at SEQ ID NO 20563
atgggaggtacgagatcccccctctccccctcgcgtttccgcccgccctcaggcggcgtagaagccatatttcaaggcgctgcaaagaatgtctttgagcagggcgagagactaggcatcaaccaagcggtgcgcgatgctatgctagagatccgtcgcaccgcaaacgaggcaaggagttccatgaagtcgggtaaggatctcttctcggaaccccgaccgaacacagcgatccgtgccgttgctgtcatggaccggcgtaatcggcgtctagcgtccatgctcgacgagtccatcacgagcttgaaaggtgctctctcagataaagagaagacgcaggatatcctagatatcgccgtagcaaaactccaattcataaaagtctacctcgaggactccaccatggcgctccaagacgacgaacccatgtccccgggcatatccctcagcatcgagcggagagtagactcggaacccctgagcgacgccgtcgcagctatggcgctaaacacgtccatggccatcgactcacccgatcccagtgccacttcaactcccaagccatcaacttcaccccccgcaatcccgccaacatcggaaaaagggccctctaaacaatcaccagccaccgatcccctcggcgccacctcatcagtccctgtccaaactctccaaagaccacaaccccctattccaacccgatcaacattagcacaatccagtttctcctggatgctcgagcagcccgactcaccaacacatacacacgcccaccccgcgcgtggctcagggtccgagtctgtattttcatcatcagacggcaaacccaacagcggcgcgcaccgtaagcgtccttctcagaatgcgagtcgtgagcgcacggcttttctgttcggtgaggtgccgtctgatgctgaggggaacgcgatactggaagagaatatctttggcatggagccgttgaggaatagagggagtgggtag

SEQ ID NO: 20563 - protein, 327 aa, Muscodor strobelii
  misc_feature: SGI Peptide ID NO. 566943
  misc_feature (3)..(322): NCBI GI: 46125209 Blast Desc: FG06982.1 [Gibberella zeae PH-1]
  misc_feature (3)..(321): NCBI GI: 256732725 Blast Desc: NECHADRAFT_92820 [Nectria haematococca mpVI 77-13-4]
  misc_feature (3)..(323): NCBI GI: 171685706 Blast Desc: protein product [Podospora anserina] gi|170942814|emb|CAP68467.1| protein product [Podospora anserina]
  misc_feature (9)..(300): NCBI GI: 154295231 Blast Desc: BC1G_13429 [Botryotinia fuckeliana B05.10] gi|150844156|gb|EDN19349.1| BC1G_13429 [Botryotinia fuckeliana B05.10]
  misc_feature (9)..(306): NCBI GI: 156051098 Blast Desc: SS1G_06956 [Sclerotinia sclerotiorum 1980] gi|154704734|gb|EDO04473.1| SS1G_06956 [Sclerotinia sclerotiorum 1980]
  misc_feature (2)..(322): NCBI GI: 145602067 Blast Desc: MGG_05216 [Magnaporthe grisea 70-15] gi|145010513|gb|EDJ95169.1| MGG_05216 [Magnaporthe grisea 70-15]
  misc_feature (3)..(135): NCBI GI: 261360306 Blast Desc: WD repeat-containing protein [Verticillium albo-atrum VaMs.102]
  misc_feature (3)..(145): NCBI GI: 164425210 Blast Desc: NCU06257 [Neurospora crassa OR74A] gi|157070834|gb|EAA33625.2| conserved [Neurospora crassa OR74A]
  misc_feature (5)..(317): NCBI GI: 169617063 Blast Desc: SNOG_11706 [Phaeosphaeria nodorum SN15] gi|160703326|gb|EAT80750.2| SNOG_11706 [Phaeosphaeria nodorum SN15]
  misc_feature (9)..(141): NCBI GI: 189188050 Blast Desc: PTRG_00031 [Pyrenophora tritici-repentis Pt-1C-BFP] gi|187971970|gb|EDU39469.1| PTRG_00031 [Pyrenophora tritici-repentis Pt-1C-BFP]
MGGTRSPLSPSRFRPPSGGVEAIFQGAAKNVFEQGERLGINQAVRDAMLEIRRTANEARSSMKSGKDLFSEPRPNTAIRAVAVMDRRNRRLASMLDESITSLKGALSDKEKTQDILDIAVAKLQFIKVYLEDSTMALQDDEPMSPGISLSIERRVDSEPLSDAVAAMALNTSMAIDSPDPSATSTPKPSTSPPAIPPTSEKGPSKQSPATDPLGATSSVPVQTLQRPQPPIPTRSTLAQSSFSWMLEQPDSPTHTHAHPARGSGSESVFSSSDGKPNSGAHRKRPSQNASRERTAFLFGEVPSDAEGNAILEENIFGMEPLRNRGSG

SEQ ID NO: 20564 - DNA, 2338 bp, Muscodor strobelii
  misc_feature: SGI EST ID NO. CUFF.48247.0
  misc_feature: Variant of the nucleotide sequence at SEQ ID NO 20562
cgtgaaccgacctcacctaagttgctcgactagcaggctcgaaacccaaccttcaacccgtttccaacatgagatctcttgtcgatgcttccgcacgatggcaagagactctcaaacacagctctagccttgccgacttgcagcgagctgtcaaagaaggtggaacaggcagtccctgcctctcgggatgtcggtcagtgtgttggaaggccttcttactgaatcagacaacacacactacgaattgggctcatgcgatgctagagtctcggagctcatacgcatctttgagagatcattttcttaagtacatcaagcatccggaatatcttaatgctggaaatttagaccccttggccgacgacgccaactcaccgtggaacacttatagacaagatgagatgatacgtgcagaaattctccaagatgttcagcgtctgccagatgacccattctaccaccaagcccatattcagactctcatcacagacgttctctttatctactgcaagttaaatccagacgttggcggatatcgccaggggatgcatgagctcctcgcacctattgtgcaggttgtcgagcaagatgctttggatcctaccaccgccgctggtacttcagccgacctgagaatggtggaaatgctcgatgcctcatttatagagcacgactcctttgcccttttttctaaagtcatggactgtgcaaaatcgttctatgagactggcgagcagccagaaagcgttggtaacacgtcgtttggaatgcagtcaacgaagtcttcgattgtcgagaagagccagtttatccatgaggtctgtttgtataaagtagatcccgaactgtcgacacatcttaaaaacattgagattttaccccaagtatttctaattcgttggatacgattactatttagccgtgaattcccttacgaccagatatctcgtctgcacatccatgctacttagaataagatgggaactactcgaggcagattacacaacagccctgcagctccttcttaaatacccagcaccacaggctcccaacggaccacatacattcatagcagatgcagttcaccttcgcgaccaccttgacactcaaggcggcgccgagctcgtcacgaaatacacaggcaagcccccctatcccttctgatctgccccgtcctacaacacctcgcgccagccgtccgagcatccggcagaaaatgggaggtacgagatcccccctctccccctcgcgtttccgcccgccctcaggcggcgtagaagccatatttcaaggcgctgcaaagaatgtctttgagcagggcgagagactaggcatcaaccaagcggtgcgcgatgctatgctagagatccgtcgcaccgcaaacgaggcaaggagttccatgaagtcgggtaaggatctcttctcggaaccccgaccgaacacagcgatccgtgccgttgctgtcatggaccggcgtaatcggcgtctagcgtccatgctcgacgagtccatcacgagcttgaaaggtgctctctcagataaagagaagacgcaggatatcctagatatcgccgtagcaaaactccaattcataaaagtctacctcgaggactccaccatggcgctccaagacgacgaacccatgtccccgggcatatccctcagcatcgagcggagagtagactcggaacccctgagcgacgccgtcgcagctatggcgctaaacacgtccatggccatcgactcacccgatcccagtgccacttcaactcccaagccatcaacttcaccccccgcaatcccgccaacatcggaaaaagggccctctaaacaatcaccagccaccgatcccctcggcgccacctcatcagtccctgtccaaactctccaaagaccacaaccccctattccaacccgatcaacattagcacaatccagtttctcctggatgctcgagcagcccgactcaccaacacatacacacgcccaccccgcgcgtggctcagggtccgagtctgtattttcatcatcagacggcaaacccaacagcggcgcgcaccgtaagcgtccttctcagaatgcgagtcgtgagcgcacggcttttctgttcggtgaggtgccgtctgatgctgaggggaacgcgatactggaagagaatatctttggcatggagccgttgaggaatagagggagtgggtaggacggcactaggaggagagtagatatatggtactttgaggatgatttggtggggctgtatatagggaaactaacggtagggatgattatgaatgaattacgaataccagtcttcgagctctatacccttcaattcgct

SEQ ID NO: 20565 - DNA, 1149 bp, Muscodor strobelii
  misc_feature: SGI cDNA ID NO. 566944
  misc_feature: Encodes the peptide sequence at SEQ ID NO 20566
atgagatctcttgtcgatgcttccgcacgatggcaagagactctcaaacacagctctagccttgccgacttgcagcgagctgtcaaagaaggtggaacaggcagtccctgcctctcgggatgtcggtcagtgtgttggaaggccttcttactgaatcagacaacacacactacgaattgggctcatgcgatgctagagtctcggagctcatacgcatctttgagagatcattttcttaagtacatcaagcatccggaatatcttaatgctggaaatttagaccccttggccgacgacgccaactcaccgtggaacacttatagacaagatgagatgatacgtgcagaaattctccaagatgttcagcgtctgccagatgacccattctaccaccaagcccatattcagactctcatcacagacgttctctttatctactgcaagttaaatccagacgttggcggatatcgccaggggatgcatgagctcctcgcacctattgtgcaggttgtcgagcaagatgctttggatcctaccaccgccgctggtacttcagccgacctgagaatggtggaaatgctcgatgcctcatttatagagcacgactcctttgcccttttttctaaagtcatggactgtgcaaaatcgttctatgagactggcgagcagccagaaagcgttggtaacacgtcgtttggaatgcagtcaacgaagtcttcgattgtcgagaagagccagtttatccatgaggtctgtttgtataaagtagatcccgaactgtcgacacatcttaaaaacattgagattttaccccaagtatttctaattcgttggatacgattactatttagccgtgaattcccttacgaccagatgttggtattgtgggataccttattcgctatcgatccatcatttaaccttatagatctcgtctgcacatccatgctacttagaataagatgggaactactcgaggcagattacacaacagccctgcagctccttcttaaatacccagcaccacaggctcccaacggaccacatacattcatagcagatgcagttcaccttcgcgaccaccttgacactcaaggcggcgccgagctcgtcacgaaatacacaggcaagcccccctatcccttctga

SEQ ID NO: 20566 - protein, 382 aa, Muscodor strobelii
  misc_feature: SGI Peptide ID NO. 566944
  misc_feature (1)..(379): NCBI GI: 46125209 Blast Desc: FG06982.1 [Gibberella zeae PH-1]
  misc_feature (1)..(379): NCBI GI: 256732725 Blast Desc: NECHADRAFT_92820 [Nectria haematococca mpVI 77-13-4]
  misc_feature (1)..(379): NCBI GI: 171685706 Blast Desc: protein product [Podospora anserina] gi|170942814|emb|CAP68467.1| protein product [Podospora anserina]
  misc_feature (49)..(379): NCBI GI: 164425210 Blast Desc: NCU06257 [Neurospora crassa OR74A] gi|157070834|gb|EAA33625.2| conserved [Neurospora crassa OR74A]
  misc_feature (1)..(381): NCBI GI: 154275670 Blast Desc: [Ajellomyces capsulatus NAm1] gi|150415126|gb|EDN10488.1| [Ajellomyces capsulatus NAm1]
  misc_feature (1)..(381): NCBI GI: 225556759 Blast Desc: TBC1D5 protein [Ajellomyces capsulatus G186AR]
  misc_feature (10)..(379): NCBI GI: 242785377 Blast Desc: TBC domain protein, [Talaromyces stipitatus ATCC 10500] gi|218720728|gb|EED20147.1| TBC domain protein, [Talaromyces stipitatus ATCC 10500]
  misc_feature (1)..(381): NCBI GI: 261197397 Blast Desc: TBC domain-containing protein [Ajellomyces dermatitidis SLH14081] gi|239595731|gb|EEQ78312.1| TBC domain-containing protein [Ajellomyces dermatitidis SLH14081]
  misc_feature (1)..(381): NCBI GI: 240281616 Blast Desc: TBC domain-containing protein [Ajellomyces capsulatus H143]
  misc_feature (1)..(379): NCBI GI: 212542985 Blast Desc: TBC domain protein, [Penicillium marneffei ATCC 18224] gi|210066554|gb|EEA20647.1| TBC domain protein, [Penicillium marneffei ATCC 18224]
MRSLVDASARWQETLKHSSSLADLQRAVKEGGTGSPCLSGCRSVCWKAFLLNQTTHTTNWAHAMLESRSSYASLRDHFLKYIKHPEYLNAGNLDPLADDANSPWNTYRQDEMIRAEILQDVQRLPDDPFYHQAHIQTLITDVLFIYCKLNPDVGGYRQGMHELLAPIVQVVEQDALDPTTAAGTSADLRMVEMLDASFIEHDSFALFSKVMDCAKSFYETGEQPESVGNTSFGMQSTKSSIVEKSQFIHEVCLYKVDPELSTHLKNIEILPQVFLIRWIRLLFSREFPYDQMLVLWDTLFAIDPSFNLIDLVCTSMLLRIRWELLEADYTTALQLLLKYPAPQAPNGPHTFIADAVHLRDHLDTQGGAELVTKYTGKPPYPF

SEQ ID NO: 20567 - DNA, 2338 bp, Muscodor strobelii; identical to SEQ ID NO: 20564
  misc_feature: SGI EST ID NO. CUFF.48247.0
  misc_feature: Variant of the nucleotide sequence at SEQ ID NO 20565

SEQ ID NO: 20568 - DNA, 414 bp, Muscodor strobelii
  misc_feature: SGI cDNA ID NO. 566945
  misc_feature: Encodes the peptide sequence at SEQ ID NO 20569
atgaactcaatcggcaattcacaagtcatcgaggtctctggttccggactgtcatgcgcagagatcggatacgtcgaagcaaaagcgagttcaactggtggcgacacttgcgctaccgataagagttattggaacattgcctatagcacgagcggcgtgcccaatgagaagtctgggaatctccgtagccgttggttgagaccccatttgaatacaaatgccatctatatagaacaatcgccgagaggtgctcaagtctgcggctctcaggccctatgctctgcggcagagttcgactggaaggcaggtacaacgggtcctgcatatttcatgttccagcctgatctacaggataccggatccggcatccagcgtgggagtgacttcacctacgaggctgagcgagagctctga

SEQ ID NO: 20569 - protein, 137 aa, Muscodor strobelii
  misc_feature: SGI Peptide ID NO. 566945
  misc_feature (1)..(114): NCBI GI: 126464845 Blast Desc: Rsph17029_4110 [Rhodobacter sphaeroides ATCC 17029] gi|126106660|gb|ABN79185.1| Rsph17029_4110 [Rhodobacter sphaeroides ATCC 17029]
  misc_feature (1)..(114): NCBI GI: 221634534 Blast Desc: RSKD131_4509 [Rhodobacter sphaeroides KD131] gi|221163407|gb|ACM04369.1| RSKD131_4509 [Rhodobacter sphaeroides KD131]
  misc_feature (1)..(114): NCBI GI: 125654719 Blast Desc: RSP_4285 [Rhodobacter sphaeroides 2.4.1] gi|77386379|gb|ABA81807.1| conserved [Rhodobacter sphaeroides 2.4.1]
MNSIGNSQVIEVSGSGLSCAEIGYVEAKASSTGGDTCATDKSYWNIAYSTSGVPNEKSGNLRSRWLRPHLNTNAIYIEQSPRGAQVCGSQALCSAAEFDWKAGTTGPAYFMFQPDLQDTGSGIQRGSDFTYEAEREL

SEQ ID NO: 20570 - DNA, 537 bp, Muscodor strobelii
  misc_feature: SGI cDNA ID NO. 566946
  misc_feature: Elevated expression when VOC is produced
  misc_feature: Encodes the peptide sequence at SEQ ID NO 20571
atgacttcacaagcagactacccatctttcaagccaagtgaccacgaagcattcatggagtatgccctagtacaagcccgcaagtcccctccagcatccaacaaattctgcgtcggagccgtgctagtcgacgaggacgcgggcacaatcctatcaacagggtactccctcgagttcccgcgagactacaaaggcgatccaggcacgacacacgccgagcagtgctgcttcatcaaaatcgcagatcagcacaacatacccgaagagcgcatccacgaggtcttgccacctaatacggtgctgtatactactatggagccgtgtaatgagaggcttagtggcaatatgacgtgtgcgactaggattttacgattgaagggcgctattaagacggtgtatgttgggattagggagccgggaacttttattgagaggaatgatgggcagaagaggcttgaggatgggggtgtcagggttgtttttcctgttgagcatttacggagggggattatggaggtttctatggcgggacattga

SEQ ID NO: 20571 - protein, 178 aa, Muscodor strobelii
  misc_feature: SGI Peptide ID NO. 566946
  misc_feature (12)..(136): Pfam Id: PF00383 Pfam Desc: Cytidine and deoxycytidylate deaminase zinc-binding region
  misc_feature (1)..(178): NCBI GI: 46135871 Blast Desc: FG09451.1 [Gibberella zeae PH-1]
  misc_feature (1)..(178): NCBI GI: 256734178 Blast Desc: [Nectria haematococca mpVI 77-13-4]
  misc_feature (8)..(178): NCBI GI: 255931347 Blast Desc: Pc12g03450 [Penicillium chrysogenum Wisconsin 54-1255] gi|211581849|emb|CAP79972.1| Pc12g03450 [Penicillium chrysogenum Wisconsin 54-1255]
  misc_feature (1)..(172): NCBI GI: 71000341 Blast Desc: DRAP deaminase [Aspergillus fumigatus Af293] gi|66852502|gb|EAL92827.1| DRAP deaminase, [Aspergillus fumigatus Af293] gi|159127878|gb|EDP52993.1| DRAP deaminase, [Aspergillus
  misc_feature (19)..(178): NCBI GI: 119492758 Blast Desc: cytidine and deoxycytidylate deaminase zinc-binding domain protein [Neosartorya fischeri NRRL 181] gi|119411858|gb|EAW21801.1| cytidine and deoxycytidylate domain
  misc_feature (8)..(178): NCBI GI: 171679239 Blast Desc: protein product [Podospora anserina] gi|170939245|emb|CAP64473.1| protein product [Podospora anserina]
  misc_feature (6)..(178): NCBI GI: 116201857 Blast Desc: CHGG_08813 [Chaetomium globosum CBS 148.51] gi|88177331|gb|EAQ84799.1| CHGG_08813 [Chaetomium globosum CBS 148.51]
  misc_feature (10)..(178): NCBI GI: 171682182 Blast Desc: protein product [Podospora anserina] gi|170941050|emb|CAP66700.1| protein product [Podospora anserina]
  misc_feature (9)..(178): NCBI GI: 116202471 Blast Desc: CHGG_09120 [Chaetomium globosum CBS 148.51] gi|88177638|gb|EAQ85106.1| CHGG_09120 [Chaetomium globosum CBS 148.51]
  misc_feature (12)..(178): NCBI GI: 189190780 Blast Desc: cytidine and deoxycytidylate deaminase zinc-binding domain containing protein [Pyrenophora tritici-repentis Pt-1C-BFP] gi|187973335|gb|EDU40834.1| cytidine and deaminase
  misc_feature (1)..(160): SWISSPROT Homolog: EC 3.5.4.26 Diaminohydroxyphosphoribosylaminopyrimidine deaminase
  misc_feature: Useful for introducing or modulating the production of volatile compounds
MTSQADYPSFKPSDHEAFMEYALVQARKSPPASNKFCVGAVLVDEDAGTILSTGYSLEFPRDYKGDPGTTHAEQCCFIKIADQHNIPEERIHEVLPPNTVLYTTMEPCNERLSGNMTCATRILRLKGAIKTVYVGIREPGTFIERNDGQKRLEDGGVRVVFPVEHLRRGIMEVSMAGH

SEQ ID NO: 20572 - DNA, 1549 bp, Muscodor strobelii
  misc_feature: SGI EST ID NO. CUFF.48270.0
  misc_feature: Variant of the nucleotide sequence at SEQ ID NO 20570
taacgagtcacggttgaaatggcgaatggaggtcgtacctaccccgaaatagcgccaacaatcatgcagggaggggggttctgcgataacgagcttgcttgtatcacaacaatatgcctacctcgcctactacagtatctccgggcatgcacaggacggcgtaatcatcattcagacagtcttagataattaggtgcttatttcgacaacaggcaaactcagattcttcactatttccgtctgagtcctcagtagagcattgcctttgatacaccgttactaagcacctgaaccccaaaatcaaccttgacgatctcgccatgacttcacaagcagactacccatctttcaagccaagtgaccacgaagcattcatggagtatgccctagtacaagcccgcaagtcccctccagcatccaacaaattctgcgtcggagccgtgctagtcgacgaggacgcgggcacaatcctatcaacagggtactccctcgagttcccgcgagactacaaaggcgatccaggcacgacacacgccgagcagtgctgcttcatcaaaatcgcagatcagcacaacatacccgaagagcgcatccacgaggtcttgccacctaatacggtgctgtatactactatggagccgtgtaatgagaggcttagtggcaatatgacgtgtgcgactaggattttacgattgaagggcgctattaagacggtgtatgttgggattagggagccgggaacttttattgagaggaatgatgggcagaagaggcttgaggatgggggtgtcagggttgtttttcctgttgagcatttacggagggggattatggaggtttctatggcgggacattgagttctacttaggatggggcgcggactatctataagtgtcgttacgtgcggtttgggtcgatcttgattattagtttctcattcgacggtgttcatttgcaacgtttggatcacatactgatcagctgggcattatgaacacagaggatacatgttcattgccgatcatgatggtgcgctactgaagatcatgagtttgattgatcacataagtagtcgcgatgcctaccacattccaccgcaaaagcttgttatcctcttagtgagacactcttatgatgaaatgctgagagtagtgtagcgagctagcccgtcctacaactctacttgggatctacaacataggtcttgccttgagttgttggactctgaccaggtccctagctagacggttggccaaagaaactcctggtgttcgaagcgaattaggcattgatagcaagattgatcccgcccgacttttgtcggaagttgatcagggtcttagtgtagttgaccttacacgagttgggtgaaattgattcattggaagtgagctgatggacaagtgttgggaaccgtgatcttgagtctgattactcatgtcctgattgtaggattgatgttggcatttctaagtcaggagattactatctgagcatcactagcagtgcgtgctaaagagataggggccatggaagagttgtatacccg

SEQ ID NO: 20573 - DNA, 3783 bp, Muscodor strobelii
  misc_feature: SGI cDNA ID NO. 566947
  misc_feature: Reduced expression when VOC is produced
  misc_feature: Encodes the peptide sequence at SEQ ID NO 20574
atgcttagaatcagccgcagtcacatctgccgggcctcctcgtactgtgcgtgcgcttcgtcctcgacgacgccgctgccgctgccgctctccttctatgcatctcacctgagatggcgccgggctgcgagccagcagcccgtccggcgcctcgccacagatgccgcagacgcggtagccgcgaccaaacctaccgcgccccccaccctacctccgcagcctgcgccgaccgcgaaatcaaagccgtcagcacaatccgagacatcgccagagacgacagcaccagacccctcagaaccgagccagcctgcgaagaaaaagaaaaagaagaagaagcctgtcaaagacaaggctgaggctcaggctcctgcggcatctctacccgaagggaccgagcgtaaactggtcgtgctcgaaggcgcactcgaggccctgaaaaatgttctctctacccaaggcatagacgtcggtcaggtcctcggggacgctgcccctagcccgcctacgcccgcagattcgacgcccgcgtccgcaaaaaaacctccaaagacgtctcgaaagccgcctgtggctgagaagacgaagccggcgaagaagccaaagaagacaatcactgcgaaggagcccacagagaagcagaccgagaagcagaccgagaagcctgcgccttcgtattcctttagaccaccacgagcgcgccccgggcgcaaacctgtagggaaacctttagggaaaccatcttccgacgaatcggagaataaaactgcccgccctgttgccgagtcgccttccagcgatgcgctagacttgcttgtcaagcgcaatgtgcagaattatcgtgggctcgctgacaaagatgcggaagtggacgctgaacaattaccgtctgactccgtacgatctgggggcactcgtacacgtgtgaggaaacattttgcaagcaaagtgagaagaatcaattctaccaaggcagtgccggaaaccgaaaaaacagtgccaaaaaggatggccgagaagacgataacgcccaagacgacgacacctaagcctgtgaaggtgaaattcgctgcaccgccgctgcctatatccaagctttcaccaatgacgatggctctggagccaatggacatcgacaagccacctgtgccggcactctcttacggcttggacagggtgctgttcaactccggcgtctaccagctgcaggacccccataccaacgtcttcaacttcgatccctacctgtccaacattatgcccataagtgaattcgacttcaacgctctcaagcagtacgtcacgtcctccaaagatacacatctcatctccatcgcaaaggacaacaacaagaagtacacgggctccacgtctagcatgacgagcatgctctcccatttccactatctcctttcctccttccgacctctcaattactccatgctgtcgcggcgcttcagtcccgagtcagaccgctttacgcaaatcatgcgagcacctgcggcgactttcctgcactggaaagatggcacctatgccattgacgccgacaaagagttcgacacggccaacgtcctgtccatgctcggaaagtccatggagaaactcctgactcttcccaaggacgaatacgagaagtaccgtcacgaaaactcggatcagatcaccgaagaggaacgaaacgcggaagaggccttccatttcacaagctttggggatttcatgatgcgatcacagctcgatgcgtacgacccccgcgtacctggctccggcatgttcgacttgaagacccgcgccgtcgtctctatccgcatggacgtccagggcttcgaaaagggtctcgactatgaaattcggcagaagttcggccagtgggaatcattcgagcgagagtattatgatatgattcgctcggctttcttgaagtactcgcttcaggttcgcatgggaagaatggatggcatttttgttgcctatcacaacatcagacgcatattcgggttccaatacgtctcactacgtgagatggatgaatccttgcacggtggctccacaaacttggttctgggcgatgccgagttcaaagcgagtctgcgtcttttgaacgaattgctgaatcgagccagtgagaaatggccagaacaatccttgagcattgtagtagagactcgagagtctgtcaagagtggcgttaccacgcctttcatgtatttctttgcaaagcccgtaactgctagttacatcaagcagaaacaagagaaaggcaaggccaaaattgaggcttatgagagaaagattttggggctggtacaggctgccgaaaaggccccatcagaaactcccgtcgagtccgatgtagtcgccaacgaagatcaagcgcctgaagtctcgccagcagcagaggagctgataagcgtggccacttgggacgaagcacgggagatggtacagaatgccatggatgatgatgagctaggtattggcgttgttcgagaagccattgaagatgctctcgagcagagtaatatcttgcctaccacttcctcggtcgaggcgcggcagtatgttgatgcactcattgagacactcacaggccgctcgcctgcagttatatcggaaacgcctgaaaatgacctcgatgaaggcgaaccccacaacgaacttgaggaagaggatgtgcaaggcaaccatgacaatagtaataaagtcatggaggaagtcctcgatgaagtagacgaggagcccgaagacagtggagaacagaccgctcaggacggtgtcgatgagtcgaagaacgtactcggagacaatcaagtttctgcagaggcagcaagacccgcacccagcatgtcagctcagactgatacgacagcggcacccaatgagtcaactttgggcatggagattgtgacgccagacgaagccaacgttgtttctgatatggatgatacacaagcgactcaattatcagcagcttcggatgataaggtggaagaaataattgaggaggagcaagaggacgaagaagatgaagatgatgaatcagaagacgacatcgaagtaaatgacacgaaggaagaggttgcatccgtacgcctggcccccctgacggatctcattatgcgtatggctcaaagaattgacgaaaaaccggctggggttgttggctctcgtgacatgggtgatgatgcatcgagactgaaaatcttcgaacagaccctgagccgactcatctccgggtcaaaaccagctgaagcgaagaaggaagatctctcgaaaatcggcgatatgccgcaggaaacaatacctaccacgacggaagaatctctcacgaagactaccgatgtggaagacgctgcagctcaggatgatacacctgtttcttccgcagaatcagccaaagacgacgtcctggcaatggtcttgacggtgaagaataaagtcaatggaaaatatgttgcgcgacccatgaacctagaggaaaaagatgattggaccgtggagtacattatccaaaatatcgagaaccaaagtaaagccaaaactctcttcgcccagtgtatgcaacggcgcaaggttgcatttactttcgaagacaaagatgccgaatggtacaatatgtttaggggcgcactggccagatcaaccacggccggccgagagtacaggaaacagaaagaggagaccgatcgaagttctcccttgtatatggctaactctactaagccgctttcacggcacgagcaggttcagctgaggtctgagttgacggagtccacagattag

SEQ ID NO: 20574 - protein, 1260 aa, Muscodor strobelii
  misc_feature: SGI Peptide ID NO. 566947
  misc_feature (432)..(705): Pfam Id: PF08634 Pfam Desc: Mitochondrial protein Pet127
  misc_feature (362)..(891): NCBI GI: 116206646 Blast Desc: CHGG_02616 [Chaetomium globosum CBS 148.51] gi|88183213|gb|EAQ90681.1| CHGG_02616 [Chaetomium globosum CBS 148.51]
  misc_feature (331)..(862): NCBI GI: 11595670 Blast Desc: related to PET127 [Neurospora crassa]
  misc_feature (331)..(862): NCBI GI: 85102792 Blast Desc: NCU01304 [Neurospora crassa OR74A] gi|28922935|gb|EAA32154.1| [Neurospora crassa OR74A]
  misc_feature (358)..(882): NCBI GI: 171692153 Blast Desc: protein product [Podospora anserina] gi|170946025|emb|CAP72826.1| protein product [Podospora anserina]
  misc_feature (349)..(878): NCBI GI: 261351635 Blast Desc: mitochondrial membrane protein Pet127 [Verticillium albo-atrum VaMs.102]
  misc_feature (343)..(863): NCBI GI: 39972461 Blast Desc: MGG_07532 [Magnaporthe grisea 70-15] gi|145016729|gb|EDK01159.1| MGG_07532 [Magnaporthe grisea 70-15]
  misc_feature (362)..(835): NCBI GI: 256731418 Blast Desc: NECHADRAFT_71916 [Nectria haematococca mpVI 77-13-4]
  misc_feature (364)..(921): NCBI GI: 156064863 Blast Desc: SS1G_00439 [Sclerotinia sclerotiorum 1980] gi|154691301|gb|EDN91039.1| SS1G_00439 [Sclerotinia sclerotiorum 1980]
  misc_feature (316)..(897): NCBI GI: 154322645 Blast Desc: BC1G_00665 [Botryotinia fuckeliana B05.10] gi|150847999|gb|EDN23192.1| BC1G_00665 [Botryotinia fuckeliana B05.10]
  misc_feature (355)..(794): NCBI GI: 259480111 Blast Desc: TPA: mitochondrial mRNA processing protein PET127, (AFU_orthologue; AFUA_6G04720) [Aspergillus nidulans FGSC A4]
  misc_feature: Useful for introducing or modulating the production of volatile compounds
MLRISRSHICRASSYCACASSSTTPLPLPLSFYASHLRWRRAASQQPVRRLATDAADAVAATKPTAPPTLPPQPAPTAKSKPSAQSETSPETTAPDPSEPSQPAKKKKKKKKPVKDKAEAQAPAASLPEGTERKLVVLEGALEALKNVLSTQGIDVGQVLGDAAPSPPTPADSTPASAKKPPKTSRKPPVAEKTKPAKKPKKTITAKEPTEKQTEKQTEKPAPSYSFRPPRARPGRKPVGKPLGKPSSDESENKTARPVAESPSSDALDLLVKRNVQNYRGLADKDAEVDAEQLPSDSVRSGGTRTRVRKHFASKVRRINSTKAVPETEKTVPKRMAEKTITPKTTTPKPVKVKFAAPPLPISKLSPMTMALEPMDIDKPPVPALSYGLDRVLFNSGVYQLQDPHTNVFNFDPYLSNIMPISEFDFNALKQYVTSSKDTHLISIAKDNNKKYTGSTSSMTSMLSHFHYLLSSFRPLNYSMLSRRFSPESDRFTQIMRAPAATFLHWKDGTYAIDADKEFDTANVLSMLGKSMEKLLTLPKDEYEKYRHENSDQITEEERNAEEAFHFTSFGDFMMRSQLDAYDPRVPGSGMFDLKTRAVVSIRMDVQGFEKGLDYEIRQKFGQWESFEREYYDMIRSAFLKYSLQVRMGRMDGIFVAYHNIRRIFGFQYVSLREMDESLHGGSTNLVLGDAEFKASLRLLNELLNRASEKWPEQSLSIVVETRESVKSGVTTPFMYFFAKPVTASYIKQKQEKGKAKIEAYERKILGLVQAAEKAPSETPVESDVVANEDQAPEVSPAAEELISVATWDEAREMVQNAMDDDELGIGVVREAIEDALEQSNILPTTSSVEARQYVDALIETLTGRSPAVISETPENDLDEGEPHNELEEEDVQGNHDNSNKVMEEVLDEVDEEPEDSGEQTAQDGVDESKNVLGDNQVSAEAARPAPSMSAQTDTTAAPNESTLGMEIVTPDEANVVSDMDDTQATQLSAASDDKVEEIIEEEQEDEEDEDDESEDDIEVNDTKEEVASVRLAPLTDLIMRMAQRIDEKPAGVVGSRDMGDDASRLKIFEQTLSRLISGSKPAEAKKEDLSKIGDMPQETIPTTTEESLTKTTDVEDAAAQDDTPVSSAESAKDDVLAMVLTVKNKVNGKYVARPMNLEEKDDWTVEYIIQNIENQSKAKTLFAQCMQRRKVAFTFEDKDAEWYNMFRGALARSTTAGREYRKQKEETDRSSPLYMANSTKPLSRHEQVQLRSELTESTD

SEQ ID NO: 20575 - DNA, 4352 bp, Muscodor strobelii
  misc_feature: SGI EST ID NO. CUFF.48279.0
  misc_feature: Variant of the nucleotide sequence at SEQ ID NO 20573
cttgaaagcagctcgaggatgctattggagtgttgagttgatgggtcatgtacctatacctcttatcttatcttgatagtgatgcatggcccatataatttttccccagaaccaacaagccggaagagtcgtcgcgccaccgccgacagcatcgcgtttctccatgtacccaagttttcttcacagttcttctgcatcctttgcacgtctatcgcgaagctactcacagcctccttcgcgttctcctccagcttcgccaatcccctccgatgtacgatttctgccatgcttagaatcagccgcagtcacatctgccgggcctcctcgtactgtgcgtgcgcttcgtcctcgacgacgccgctgccgctgccgctctccttctatgcatctcacctgagatggcgccgggctgcgagccagcagcccgtccggcgcctcgccacagatgccgcagacgcggtagccgcgaccaaacctaccgcgccccccaccctacctccgcagcctgcgccgaccgcgaaatcaaagccgtcagcacaatccgagacatcgccagagacgacagcaccagacccctcagaaccgagccagcctgcgaagaaaaagaaaaagaagaagaagcctgtcaaagacaaggctgaggctcaggctcctgcggcatctctacccgaagggaccgagcgtaaactggtcgtgctcgaaggcgcactcgaggccctgaaaaatgttctctctacccaaggcatagacgtcggtcaggtcctcggggacgctgcccctagcccgcctacgcccgcagattcgacgcccgcgtccgcaaaaaaacctccaaagacgtctcgaaagccgcctgtggctgagaagacgaagccggcgaagaagccaaagaagacaatcactgcgaaggagcccacagagaagcagaccgagaagcagaccgagaagcctgcgccttcgtattcctttagaccaccacgagcgcgccccgggcgcaaacctgtagggaaacctttagggaaaccatcttccgacgaatcggagaataaaactgcccgccctgttgccgagtcgccttccagcgatgcgctagacttgcttgtcaagcgcaatgtgcagaattatcgtgggctcgctgacaaagatgcggaagtggacgctgaacaattaccgtctgactccgtacgatctgggggcactcgtacacgtgtgaggaaacattttgcaagcaaagtgagaagaatcaattctaccaaggcagtgccggaaaccgaaaaaacagtgccaaaaaggatggccgagaagacgataacgcccaagacgacgacacctaagcctgtgaaggtgaaattcgctgcaccgccgctgcctatatccaagctttcaccaatgacgatggctctggagccaatggacatcgacaagccacctgtgccggcactctcttacggcttggacagggtgctgttcaactccggcgtctaccagctgcaggacccccataccaacgtcttcaacttcgatccctacctgtccaacattatgcccataagtgaattcgacttcaacgctctcaagcagtacgtcacgtcctccaaagatacacatctcatctccatcgcaaaggacaacaacaagaagtacacgggctccacgtctagcatgacgagcatgctctcccatttccactatctcctttcctccttccgacctctcaattactccatgctgtcgcggcgcttcagtcccgagtcagaccgctttacgcaaatcatgcgagcacctgcggcgactttcctgcactggaaagatggcacctatgccattgacgccgacaaagagttcgacacggccaacgtcctgtccatgctcggaaagtccatggagaaactcctgactcttcccaaggacgaatacgagaagtaccgtcacgaaaactcggatcagatcaccgaagaggaacgaaacgcggaagaggccttccatttcacaagctttggggatttcatgatgcgatcacagctcgatgcgtacgacccccgcgtacctggctccggcatgttcgacttgaagacccgcgccgtcgtctctatccgcatggacgtccagggcttcgaaaagggtctcgactatgaaattcggcagaagttcggccagtgggaatcattcgagcgagagtattatgatatgattcgctcggctttcttgaagtactcgcttcaggttcgcatgggaagaatggatggcatttttgttgcctatcacaacatcagacgcatattcgggttccaatacgtctcactacgtgagatggatgaatccttgcacggtggctccacaaacttggttctgggcgatgccgagttcaaagcgagtctgcgtcttttgaacgaattgctgaatcgagccagtgagaaatggccagaacaatccttgagcattgtagtagagactcgagagtctgtcaagagtggcgttaccacgcctttcatgtatttctttgcaaagcccgtaactgctagttacatcaagcagaaacaagagaaaggcaaggccaaaattgaggcttatgagagaaagattttggggctggtacaggctgccgaaaaggccccatcagaaactcccgtcgagtccgatgtagtcgccaacgaagatcaagcgcctgaagtctcgccagcagcagaggagctgataagcgtggccacttgggacgaagcacgggagatggtacagaatgccatggatgatgatgagctaggtattggcgttgttcgagaagccattgaagatgctctcgagcagagtaatatcttgcctaccacttcctcggtcgaggcgcggcagtatgttgatgcactcattgagacactcacaggccgctcgcctgcagttatatcggaaacgcctgaaaatgacctcgatgaaggcgaaccccacaacgaacttgaggaagaggatgtgcaaggcaaccatgacaatagtaataaagtcatggaggaagtcctcgatgaagtagacgaggagcccgaagacagtggagaacagaccgctcaggacggtgtcgatgagtcgaagaacgtactcggagacaatcaagtttctgcagaggcagcaagacccgcacccagcatgtcagctcagactgatacgacagcggcacccaatgagtcaactttgggcatggagattgtgacgccagacgaagccaacgttgtttctgatatggatgatacacaagcgactcaattatcagcagcttcggatgataaggtggaagaaataattgaggaggagcaagaggacgaagaagatgaagatgatgaatcagaagacgacatcgaagtaaatgacacgaaggaagaggttgcatccgtacgcctggcccccctgacggatctcattatgcgtatggctcaaagaattgacgaaaaaccggctggggttgttggctctcgtgacatgggtgatgatgcatcgagactgaaaatcttcgaacagaccctgagccgactcatctccgggtcaaaaccagctgaagcgaagaaggaagatctctcgaaaatcggcgatatgccgcaggaaacaatacctaccacgacggaagaatctctcacgaagactaccgatgtggaagacgctgcagctcaggatgatacacctgtttcttccgcagaatcagccaaagacgacgtcctggcaatggtcttgacggtgaagaataaagtcaatggaaaatatgttgcgcgacccatgaacctagaggaaaaagatgattggaccgtggagtacattatccaaaatatcgagaaccaaagtaaagccaaaactctcttcgcccagtgtatgcaacggcgcaaggttgcatttactttcgaagacaaagatgccgaatggtacaatatgtttaggggcgcactggccagatcaaccacggccggccgagagtacaggaaacagaaagaggagaccgatcgaagttctcccttgtatatggctaactctactaagccgctttcacggcacgagcaggttcagctgaggtctgagttgacggagtccacagattagaccgttgaggatggatgatgtgcgataagatgtgtatgaaaattctatcctggctgggaaggactcttaaaaagttagattactggcatatctggacgtttgagtgagcgttgttatataactgccgtgttggatggcgtttgatcttttcacatgtatatgcggcattgcacattgtactgtataatatacaattgctttttttttttttggaagagaaagagcaagagtatgggcgcgatcaagatgcttgagcgtcagtgtagttatatatttagcccgaa

SEQ ID NO: 20576 - DNA, 1113 bp, Muscodor strobelii
  misc_feature: SGI cDNA ID NO. 566948
  misc_feature: Encodes the peptide sequence at SEQ ID NO 20577
atgaaggtcctccgccgctggttcggacaccgcaagtcctctcctccaccgccaaaacgggtttcggcctctacgcaatccacgtcgcggagtacgcggagtaggttgtctgacagactcagtcaaaatgaggagctatcaggcgcagactttcagatgcttgaagatttgcgggagaagtgcggcaagaataccctcaatgttgccgaggctgagactctcctggctgtatcctctaagctcggagctccgttgacgccccgggagatcgtggatctacagcggatcttatcgccgcaaacgcctcccgcaacacccaaaacagcggataggaatgccacagcgtcgcccgagtcacagaaacgggtgcggacgccgactgctcatatgcttccgacgacgcagacggagagcgcgctgttctgcctaccggctgaagtcagagctaggatctgggcatatgccgttggaggccgaaagatctacttggcggttcagaatgacaagttggtgcaacaaaaggatatgcagcagccgtattggcgacatgtcaatggattgctcagcgtgcctcttatatgtcgacaggcatatctcgagtccatcaacttactatactcagaaaacacatttggcataggcttcgggtcaataggcagcaacaaaaagttcttcacaaacatgaacacgttcctactcccccaatgcacagccgcaatgcggagcctagaaatcggcttccatctcagcgggggttattcacagtactacgatagccatccccaagcctgggatctttcactcgaggtaccggctccggaatcattaagtgactggatctctgtgttcaagtcactggccgggatgaagggccttaggcgattagtggtggtggtttgggcgtcgggagatagaagagatgagttcaaagcgagagagaacgagctcatggatattccgagtgtgatgacgggattgcagaaatttgaggtctggttgccgtggaagaaggatgagggcacgaggacagaggggaggggggcgtatgtggtgaggagggagttcgaggatagacggaggtttggtgtgagtgtgccgaagtattcgtcttga

SEQ ID NO: 20577 - protein, 370 aa, Muscodor strobelii
  misc_feature: SGI Peptide ID NO. 566948
  misc_feature (84)..(368): NCBI GI: 256729971 Blast Desc: NECHADRAFT_82496 [Nectria haematococca mpVI 77-13-4]
  misc_feature (57)..(366): NCBI GI: 46115560 Blast Desc: FG03622.1 [Gibberella zeae PH-1]
  misc_feature (137)..(211): NCBI GI: 189204085 Blast Desc: [Pyrenophora tritici-repentis Pt-1C-BFP] gi|187985477|gb|EDU50965.1| [Pyrenophora tritici-repentis Pt-1C-BFP]
  misc_feature (135)..(331): NCBI GI: 119195167 Blast Desc: [Coccidioides immitis RS]
  misc_feature (135)..(331): NCBI GI: 258566353 Blast Desc: [Uncinocarpus reesii 1704] gi|237907622|gb|EEP82023.1| [Uncinocarpus reesii 1704]
  misc_feature (133)..(264): NCBI GI: 238484869 Blast Desc: conserved [Aspergillus flavus NRRL3357] gi|220701723|gb|EED58061.1| conserved [Aspergillus flavus NRRL3357]
  misc_feature (133)..(264): NCBI GI: 169767940 Blast Desc: [Aspergillus oryzae RIB40] gi|83766296|dbj|BAE56439.1| protein product [Aspergillus oryzae]
  misc_feature (136)..(331): NCBI GI: 240105004 Blast Desc: [Coccidioides posadasii C735 delta SOWgp]
  misc_feature (102)..(264): NCBI GI: 145238586 Blast Desc: An07g08650 [Aspergillus niger] gi|134076431|emb|CAK39659.1| [Aspergillus niger]
MKVLRRWFGHRKSSPPPPKRVSASTQSTSRSTRSRLSDRLSQNEELSGADFQMLEDLREKCGKNTLNVAEAETLLAVSSKLGAPLTPREIVDLQRILSPQTPPATPKTADRNATASPESQKRVRTPTAHMLPTTQTESALFCLPAEVRARIWAYAVGGRKIYLAVQNDKLVQQKDMQQPYWRHVNGLLSVPLICRQAYLESINLLYSENTFGIGFGSIGSNKKFFTNMNTFLLPQCTAAMRSLEIGFHLSGGYSQYYDSHPQAWDLSLEVPAPESLSDWISVFKSLAGMKGLRRLVVVVWASGDRRDEFKARENELMDIPSVMTGLQKFEVWLPWKKDEGTRTEGRGAYVVRREFEDRRRFGVSVPKYSS

SEQ ID NO: 20578 - DNA, 1918 bp, Muscodor strobelii
  misc_feature: SGI EST ID NO. CUFF.48283.0
  misc_feature: Variant of the nucleotide sequence at SEQ ID NO 20576
cggcaatctatcatatagcaaggggaacccagatatacggaggagttgttcccatgactgtgactagctcaagttacaacttactagccggccgagtgatgatgtgggttcggagttgggctattgggatccatgatctgcccaactcgataaggtaggaggatctgcaggtaccattctgttggtgctgctgctagtgaactggttggcaaaaagcaaacggcaaaaacacctactaccccaattgagatccccagaacgagcatctccaaaattgcgcaacccgcgcttcagctgagctgcattagccttcctgctacaatgttattgtgatgcagctgaaagctgcgggcaagggcacttgaaattgtgacgatccggccgtttttttatttggagtttgtttttcttctctcttatttcgcgcaggtctgctctttcttgcttttataaaggtaacgaaagcctcggtttgttacggtgacgctgcaacgctgcaaggttgatcgtattctcgtaatcgggcgtctgattgttttcacataacggacttcggtcagtaacttactcgcattggcaagcaagggatataactgctttatttactccacgattgacgcctgacgcctgacgattcacgattgctcacatttacctcttacatacttaattgcttttgctgcgagccttgtacgacagtatgaaggtcctccgccgctggttcggacaccgcaagtcctctcctccaccgccaaaacgggtttcggcctctacgcaatccacgtcgcggagtacgcggagtaggttgtctgacagactcagtcaaaatgaggagctatcaggcgcagactttcagatgcttgaagatttgcgggagaagtgcggcaagaataccctcaatgttgccgaggctgagactctcctggctgtatcctctaagctcggagctccgttgacgccccgggagatcgtggatctacagcggatcttatcgccgcaaacgcctcccgcaacacccaaaacagcggataggaatgccacagcgtcgcccgagtcacagaaacgggtgcggacgccgactgctcatatgcttccgacgacgcagacggagagcgcgctgttctgcctaccggctgaagtcagagctaggatctgggcatatgccgttggaggccgaaagatctacttggcggttcagaatgacaagttggtgcaacaaaaggatatgcagcagccgtattggcgacatgtcaatggattgctcagcgtgcctcttatatgtcgacaggcatatctcgagtccatcaacttactatactcagaaaacacatttggcataggcttcgggtcaataggcagcaacaaaaagttcttcacaaacatgaacacgttcctactcccccaatgcacagccgcaatgcggagcctagaaatcggcttccatctcagcgggggttattcacagtactacgatagccatccccaagcctgggatctttcactcgaggtaccggctccggaatcattaagtgactggatctctgtgttcaagtcactggccgggatgaagggccttaggcgattagtggtggtggtttgggcgtcgggagatagaagagatgagttcaaagcgagagagaacgagctcatggatattccgagtgtgatgacgggattgcagaaatttgaggtctggttgccgtggaagaaggatgagggcacgaggacagaggggaggggggcgtatgtggtgaggagggagttcgaggatagacggaggtttggtgtgagtgtgccgaagtattcgtcttgaaattaaggaagacggaggattgagatgaagcactatgcattgcatagtttgacttgtttacacagcgattcttttatgtactaatcgaatgatacccaacaactt

SEQ ID NO: 20579 - DNA, 1089 bp, Muscodor strobelii
  misc_feature: SGI cDNA ID NO. 566949
  misc_feature: Encodes the peptide sequence at SEQ ID NO 20580
atggctttcccaaacaagcccattgcccacctcctagggtcaaatggccccgttcacgccctcgcatactcagcatcaccagggacatacatcctagccgggtcctcagaccggtcaatccgtctctacaatcccaccccatcaacgcccatccacccctcatcccacctctcaaagaaagccccctccaacacatcacccaccccagaagggcgcctaatccaaacctacacagcgcacgggtacgaagtcctctccctcagcgtctcaacggacaacgcgcggtttgcctcggcaggcggagaccgatccgtctacctctgggacgtatcaacagcgcaaacactccgccgtttcggcgccggcgggacatcaggtcacacggctcgcgtaaacgccgtctgtttcgcaggagaagatgacagtgttctcatctccggcggtttagacacaacagtccgtctctgggacgtgaagagcggagcgcagaaaccgatgcagatcctacaagatgctaaagacgccatatcctccatcgtcgtctgcggcgagcagatagtgactggcagtgtcgatggacgcgtcagatcgtatgatgtgcgtatggggagatgtacgacggatgtcataggaccgtctataacgggtttgtaccctacgaaagatgggaaggctgtactggttagtgcgctggatagtaaagtcagacttatggatagagaatcgggggagtgtctgaagatgtattctgatcctgggtttaagaatgaggagcttagggttcaggctatacttggtggtaaggagcagtatgtgctggctggtgatgagatgactgcgacgcagggccagaatggagagggcaggatatgggtttgggatattttgacgggggagaagaaagctgaagtacaagttccttggggtcctgttggctcagaacccaggaagaaggtcattgggaaggatgggaaggaaaaagagcgcagcaatgtgattagttgcttggcttggagggaagggggatttggagaccagttttgtgccagtgggacatctggtgttgttaccgtttatggatatcaatga

SEQ ID NO: 20580 - protein, 362 aa, Muscodor strobelii
  misc_feature: SGI Peptide ID NO. 566949
  misc_feature (118)..(157): Pfam Id: PF00400 Pfam Desc: WD domain, G-beta repeat
  misc_feature (71)..(109): Pfam Id: PF00400 Pfam Desc: WD domain, G-beta repeat
  misc_feature (5)..(44): Pfam Id: PF00400 Pfam Desc: WD domain, G-beta repeat
  misc_feature (126)..(157): Pfam Id: PF00400 Pfam Desc: WD domain, G-beta repeat
  misc_feature (1)..(360): NCBI GI: 46125983 Blast Desc: FG07369.1 [Gibberella zeae PH-1]
  misc_feature (3)..(360): NCBI GI: 171693601 Blast Desc: protein product [Podospora anserina] gi|170946749|emb|CAP73553.1| protein product [Podospora anserina]
  misc_feature (1)..(360): NCBI GI: 145612231 Blast Desc: MGG_08174 [Magnaporthe grisea 70-15] gi|145019430|gb|EDK03658.1| MGG_08174 [Magnaporthe grisea 70-15]
  misc_feature (3)..(360): NCBI GI: 28950101 Blast Desc: conserved [Neurospora crassa]
  misc_feature (1)..(360): NCBI GI: 156063232 Blast Desc: SS1G_01732 [Sclerotinia sclerotiorum 1980] gi|154697068|gb|EDN96806.1| SS1G_01732 [Sclerotinia sclerotiorum 1980]
  misc_feature (3)..(360): NCBI GI: 116206398 Blast Desc: CHGG_02492 [Chaetomium globosum CBS 148.51] gi|88183089|gb|EAQ90557.1| CHGG_02492 [Chaetomium globosum CBS 148.51]
  misc_feature (3)..(360): NCBI GI: 164426274 Blast Desc: NCU01389 [Neurospora crassa OR74A] gi|157071269|gb|EAA31710.2| conserved [Neurospora crassa OR74A]
  misc_feature (2)..(340): NCBI GI: 169615963 Blast Desc: SNOG_11148 [Phaeosphaeria nodorum SN15] gi|111060527|gb|EAT81647.1| SNOG_11148 [Phaeosphaeria nodorum SN15]
  misc_feature (2)..(360): NCBI GI: 189209878 Blast Desc: mitogen-activated protein kinase organizer 1 [Pyrenophora tritici-repentis Pt-1C-BFP] gi|187977364|gb|EDU43990.1| mitogen-activated protein kinase 1
  misc_feature (3)..(352): NCBI GI: 121718879 Blast Desc: WD domain protein [Aspergillus clavatus NRRL 1] gi|119404421|gb|EAW14797.1| WD domain protein [Aspergillus clavatus NRRL 1]
  misc_feature (71)..(249): SWISSPROT Homolog: EC 2.7.11.1 Non-specific serine/threonine protein kinase
MAFPNKPIAHLLGSNGPVHALAYSASPGTYILAGSSDRSIRLYNPTPSTPIHPSSHLSKKAPSNTSPTPEGRLIQTYTAHGYEVLSLSVSTDNARFASAGGDRSVYLWDVSTAQTLRRFGAGGTSGHTARVNAVCFAGEDDSVLISGGLDTTVRLWDVKSGAQKPMQILQDAKDAISSIVVCGEQIVTGSVDGRVRSYDVRMGRCTTDVIGPSITGLYPTKDGKAVLVSALDSKVRLMDRESGECLKMYSDPGFKNEELRVQAILGGKEQYVLAGDEMTATQGQNGEGRIWVWDILTGEKKAEVQVPWGPVGSEPRKKVIGKDGKEKERSNVISCLAWREGGFGDQFCASGTSGVVTVYGYQ

SEQ ID NO: 20581 - DNA, 2743 bp, Muscodor strobelii
  misc_feature: SGI EST ID NO. CUFF.48900.0
  misc_feature: Variant of the nucleotide sequence at SEQ ID NO 20579
ggattgttcaaacctcagcaaggggcttacaacaagggacgcaagtcctacctacatctagaccttctcatcaatcaaggtcattagccataaagtcaatagacatgagtactccaaatcctcaatggctttcccaaacaagcccattgcccacctcctagggtcaaatggccccgttcacgccctcgcatactcagcatcaccagggacatacatcctagccgggtcctcagaccggtcaatccgtctctacaatcccaccccatcaacgcccatccacccctcatcccacctctcaaagaaagccccctccaacacatcacccaccccagaagggcgcctaatccaaacctacacagcgcacgggtacgaagtcctctccctcagcgtctcaacggacaacgcgcggtttgcctcggcaggcggagaccgatccgtctacctctgggacgtatcaacagcgcaaacactccgccgtttcggcgccggcgggacatcaggtcacacggctcgcgtaaacgccgtctgtttcgcaggagaagatgacagtgttctcatctccggcggtttagacacaacagtccgtctctgggacgtgaagagcggagcgcagaaaccgatgcagatcctacaagatgctaaagacgccatatcctccatcgtcgtctgcggcgagcagatagtgactggcagtgtcgatggacgcgtcagatcgtatgatgtgcgtatggggagatgtacgacggatgtcataggaccgtctataacgggtttgtaccctacgaaagatgggaaggctgtactggttagtgcgctggatagtaaagtcagacttatggatagagaatcgggggagtgtctgaagatgtattctgatcctgggtttaagaatgaggagcttagggttcaggctatacttggtggtaaggagcagtatgtgctggctggtgatgagatgactgcgacgcagggccagaatggagagggcaggatatgggtttgggatattttgacgggggagaagaaagctgaagtacaagttccttggggtcctgttggctcagaacccaggaagaaggtcattgggaaggatgggaaggaaaaagagcgcagcaatgtgattagttgcttggcttggagggaagggggatttggagaccagttttgtgccagtgggacatctggtgttgttaccgtttatggatatcaatgaaatgttacaaacattccaatatcagagtgagaggttttttctgaactaatcatcagggtggctatcatcacaactcatatcatattatgatgacccgtaaataaatatgaaatgtcacaatgaagacgacgcatacattagtcatgtatttgatttgtacaagtaatggattgaaataactttctggctctacccaaacgccccttctatgcgccaaccaatacagtcatccaggacccatcaggtagcatacacatcgactatagaacattgtacccttccgacaatgacaacaccaccagacatgtgacattgataccccaacaatacctaattatcattacttcgtggatggctcagctcagtccatatgtgcgaacttgaaccagttcggccggcaatcttctttatgaagccagtttgcgccgtcagtcagctcgccagtcctgcagccgctgcactttggtgagttcgggcagttgaagaaggggatatgctgatatccgatatctcggaacctagtcacaagttagtatatctgatcccttaggaaactcgtctgcgtttctctcaccaatgaatcctgttcttatcctcaaacaaagccagcgcgatactgtgcacaggcgcatcgccccatcgctcgtagaagaaacctcccgcgcggtccagatggttaaaatagtcctcatagacctggcttctccagaattccatatcgccgatttcaaaatttgtccagaaatgacaagtggagtagccgttggccatggcattgtgtacaggtcgacgagtggcgtctgtaataaaaccctctgcgcggttgtcgtgcaagtattcggggtgctcggtgaggaacttggtcgtctcgggccacagcgaggggatggactgcggggcatcgtacaagctgatggtgaagccgtatgtcttgttgttatcctgcatgtagcggaagacatcgtagtcaacatcgcagaagaagtgcaccttgggctcgactctccagtagtatcggatgtcggcgagcgcgggatgtttgtagaaaaatccactgttccatcgacacatctggtggtatgagagcatgcttgcatactgaatgtcgttctcctcgaggatcttgacggattcggcgaaaaggtcatcgttgatccatgatggttttgcccagtgctctttcgggatcacctctgccaaacccatattagtgtcttcctccataacatgcgttcgctctgtagggccagggtcaggtgtgatggcgtaccatatctgcattcggccttggtcgcggcgctcgtcctgcgcttgaactcgtcggtgaagggaacatcgttgaagaaggtccaggggtagttaaatttgtggttccatgttcgctccaagtcgcccatcgattgcagcatgccgtcgagctcttcatttcggacgagggcgagcagcgtggcggggattcgagcggttccggccttgcctggcgcataggcatccgaggttcgaacgaggtttcctaccggctcttctgtc

SEQ ID NO: 20582 - DNA, 1230 bp, Muscodor strobelii
  misc_feature: SGI cDNA ID NO. 566950
  misc_feature: Encodes the peptide sequence at SEQ ID NO 20583
atggccatagcgaggccagttcgtgcgctggggcttgccgccatttgcgtcctgctcttctgtttctataatctgtacaagcccgaccacatacccttcaacggcggcaaatggcctgtcgacatcaaccccaacgaccttaagacgaatgcagattttaagggcacaatagaaagggatcctaatctagatttgacagaagagccggtaggaaacctcgttcgaacctcggatgcctatgcgccaggcaaggccggaaccgctcgaatccccgccacgctgctcgccctcgtccgaaatgaagagctcgacggcatgctgcaatcgatgggcgacttggagcgaacatggaaccacaaatttaactacccctggaccttcttcaacgatgttcccttcaccgacgagttcaagcgcaggacgagcgccgcgaccaaggccgaatgcagatatgaggtgatcccgaaagagcactgggcaaaaccatcatggatcaacgatgaccttttcgccgaatccgtcaagatcctcgaggagaacgacattcagtatgcaagcatgctctcataccaccagatgtgtcgatggaacagtggatttttctacaaacatcccgcgctcgccgacatccgatactactggagagtcgagcccaaggtgcacttcttctgcgatgttgactacgatgtcttccgctacatgcaggataacaacaagacatacggcttcaccatcagcttgtacgatgccccgcagtccatcccctcgctgtggcccgagacgaccaagttcctcaccgagcaccccgaatacttgcacgacaaccgcgcagagggttttattacagacgccactcgtcgacctgtacacaatgccatggccaacggctactccacttgtcatttctggacaaattttgaaatcggcgatatggaattctggagaagccaggtctatgaggactattttaaccatctggaccgcgcgggaggtttcttctacgagcgatggggcgatgcgcctgtgcacagtatcgcgctggctttgtttgaggataagaacaggattcattggttccgagatatcggatatcagcatatccccttcttcaactgcccgaactcaccaaagtgcagcggctgcaggactggcgagctgactgacggcgcaaactggcttcataaagaagattgccggccgaactggttcaagttcgcacatatggactga

SEQ ID NO: 20583 - protein, 409 aa, Muscodor strobelii
  misc_feature: SGI Peptide ID NO. 566950
  misc_feature (12)..(369): Pfam Id: PF01793 Pfam Desc: Glycolipid 2-alpha-mannosyltransferase
  misc_feature (92)..(369): Pfam Id: PF01793 Pfam Desc: Glycolipid 2-alpha-mannosyltransferase
  misc_feature (1)..(408): NCBI GI: 154294460 Blast Desc: alpha-1,2-mannosyltransferase [Botryotinia fuckeliana B05.10] gi|150844759|gb|EDN19952.1| alpha-1,2-mannosyltransferase [Botryotinia fuckeliana B05.10]
  misc_feature (1)..(406): NCBI GI: 171693599 Blast Desc: protein product [Podospora anserina] gi|170946748|emb|CAP73552.1| protein product [Podospora anserina]
  misc_feature (1)..(408): NCBI GI: 85100333 Blast Desc: NCU01388 [Neurospora crassa OR74A] gi|11595646|emb|CAC18268.1| alpha-1, 2-mannosyltransferase [Neurospora crassa] gi|28922478|gb|EAA31709.1| NCU01388 crassa
  misc_feature (38)..(408): NCBI GI: 156063250 Blast Desc: SS1G_01741 [Sclerotinia sclerotiorum 1980] gi|154697077|gb|EDN96815.1| SS1G_01741 [Sclerotinia sclerotiorum 1980]
  misc_feature (1)..(408): NCBI GI: 46125985 Blast Desc: FG07370.1 [Gibberella zeae PH-1]
  misc_feature (1)..(408): NCBI GI: 256730931 Blast Desc: glycosyltransferase family 15 [Nectria haematococca mpVI 77-13-4]
  misc_feature (1)..(406): NCBI GI: 212534862 Blast Desc: alpha-1,2-mannosyltransferase (Ktr4), [Penicillium marneffei ATCC 18224] gi|210069986|gb|EEA24076.1| alpha-1,2-mannosyltransferase (Ktr4), [Penicillium marneffei ATCC
  misc_feature (1)..(408): NCBI GI: 169615399 Blast Desc: SNOG_10857 [Phaeosphaeria nodorum SN15] gi|111060236|gb|EAT81356.1| SNOG_10857 [Phaeosphaeria nodorum SN15]
  misc_feature (1)..(409): NCBI GI: 154285202 Blast Desc: conserved [Ajellomyces capsulatus NAm1] gi|150407037|gb|EDN02578.1| conserved [Ajellomyces capsulatus NAm1]
  misc_feature (1)..(406): NCBI GI: 242791363 Blast Desc: alpha-1,2-mannosyltransferase (Ktr4), [Talaromyces stipitatus ATCC 10500] gi|218718330|gb|EED17750.1| alpha-1,2-mannosyltransferase (Ktr4), [Talaromyces stipitatus
  misc_feature (64)..(404): SWISSPROT Homolog: EC 2.4.1.131 Glycolipid 2-alpha-mannosyltransferase
MAIARPVRALGLAAICVLLFCFYNLYKPDHIPFNGGKWPVDINPNDLKTNADFKGTIERDPNLDLTEEPVGNLVRTSDAYAPGKAGTARIPATLLALVRNEELDGMLQSMGDLERTWNHKFNYPWTFFNDVPFTDEFKRRTSAATKAECRYEVIPKEHWAKPSWINDDLFAESVKILEENDIQYASMLSYHQMCRWNSGFFYKHPALADIRYYWRVEPKVHFFCDVDYDVFRYMQDNNKTYGFTISLYDAPQSIPSLWPETTKFLTEHPEYLHDNRAEGFITDATRRPVHNAMANGYSTCHFWTNFEIGDMEFWRSQVYEDYFNHLDRAGGFFYERWGDAPVHSIALALFEDKNRIHWFRDIGYQHIPFFNCPNSPKCSGCRTGELTDGANWLHKEDCRPNWFKFAHMD

SEQ ID NO: 20584 - DNA, 3296 bp, Muscodor strobelii
  misc_feature: SGI EST ID NO. CUFF.48901.1
  misc_feature: Variant of the nucleotide sequence at SEQ ID NO 20582
gcgcaataataatattttgttatcatcgattcgcggaaaaagaaagttgttgtcgcaacttgcgagaaaccgttggcgctgatcaacgcactattacgcctgtcgactccatctgtacaaattcattgccatccactctggagatattgattgcattttcagtgattttcagtgatacgttggccgttgcgtcgacccctgttggctttgcgttagggggctttgaaagtttcgttatccgcctgccctcttatctttcgtttcatttcgtgctttgattcagcgacagatttcttatcctcccatcgacttcggaaaagcacgagacaaatttgttcatgaccttgcgacgatagcctcacaacatggccatagcgaggccagttcgtgcgctggggcttgccgccatttgcgtcctgctcttctgtttctataatctgtacaagcccgaccacatacccttcaacggcggcaaatggcctgtcgacatcaaccccaacgaccttaagacgaatgcagattttaagggcacaatagaaagggatcctaatctagatttgacagaagagccggtaggaaacctcgttcgaacctcggatgcctatgcgccaggcaaggccggaaccgctcgaatccccgccacgctgctcgccctcgtccgaaatgaagagctcgacggcatgctgcaatcgatgggcgacttggagcgaacatggaaccacaaatttaactacccctggaccttcttcaacgatgttcccttcaccgacgagttcaagcgcaggacgagcgccgcgaccaaggccgaatgcagatatgaggtgatcccgaaagagcactgggcaaaaccatcatggatcaacgatgaccttttcgccgaatccgtcaagatcctcgaggagaacgacattcagtatgcaagcatgctctcataccaccagatgtgtcgatggaacagtggatttttctacaaacatcccgcgctcgccgacatccgatactactggagagtcgagcccaaggtgcacttcttctgcgatgttgactacgatgtcttccgctacatgcaggataacaacaagacatacggcttcaccatcagcttgtacgatgccccgcagtccatcccctcgctgtggcccgagacgaccaagttcctcaccgagcaccccgaatacttgcacgacaaccgcgcagagggttttattacagacgccactcgtcgacctgtacacaatgccatggccaacggctactccacttgtcatttctggacaaattttgaaatcggcgatatggaattctggagaagccaggtctatgaggactattttaaccatctggaccgcgcgggaggtttcttctacgagcgatggggcgatgcgcctgtgcacagtatcgcgctggctttgtttgaggataagaacaggattcattggttccgagatatcggatatcagcatatccccttcttcaactgcccgaactcaccaaagtgcagcggctgcaggactggcgagctgactgacggcgcaaactggcttcataaagaagattgccggccgaactggttcaagttcgcacatatggactgagctgagccatccacgaagtaatgataattaggtattgttggggtatcaatgtcacatgtctggtggtgttgtcattgtcggaagggtacaatgttctatagtcgatgtgtatgctacctgatgggtcctggatgactgtattggttggcgcatagaaggggcgtttgggtagagccagaaagttatttcaatccattacttgtacaaatcaaatacatgactaatgtatgcgtcgtcttcattgtgacatttcatatttatttacgggtcatcataatatgatatgagttgtgatgatagccaccctgatgattagttcagaaaaaacctctcactctgatattggaatgtttgtaacatttcattgatatccataaacggtaacaacaccagatgtcccactggcacaaaactggtctccaaatcccccttccctccaagccaagcaactaatcacattgctgcgctctttttccttcccatccttcccaatgaccttcttcctgggttctgagccaacaggaccccaaggaacttgtacttcagctttcttctcccccgtcaaaatatcccaaacccatatcctgccctctccattctggccctgcgtcgcagtcatctcatcaccagccagcacatactgctccttaccaccaagtatagcctgaaccctaagctcctcattcttaaacccaggatcagaatacatcttcagacactcccccgattctctatccataagtctgactttactatccagcgcactaaccagtacagccttcccatctttcgtagggtacaaacccgttatagacggtcctatgacatccgtcgtacatctccccatacgcacatcatacgatctgacgcgtccatcgacactgccagtcactatctgctcgccgcagacgacgatggaggatatggcgtctttagcatcttgtaggatctgcatcggtttctgcgctccgctcttcacgtcccagagacggactgttgtgtctaaaccgccggagatgagaacactgtcatcttctcctgcgaaacagacggcgtttacgcgagccgtgtgacctgatgtcccgccggcgccgaaacggcggagtgtttgcgctgttgatacgtcccagaggtagacggatcggtctccgcctgccgaggcaaaccgcgcgttgtccgttgagacgctgagggagaggacttcgtacccgtgcgctgtgtaggtttggattaggcgcccttctggggtgggtgatgtgttggagggggctttctttgagaggtgggatgaggggtggatgggcgttgatggggtgggattgtagagacggattgaccggtctgaggacccggctaggatgtatgtccctggtgatgctgagtatgcgagggcgtgaacggggcctggatgtcgttagtgtaatgttactcgggcgtgaggcatgggtgagtgagggtgaggccggggggagtgaggctcactatgtgagtgagtgagtgaatgagtgaggccaggggatgagaggcttaccatttgaccctaggaggtgggcaatgggcttgtttgggaaagccattgaggatttggagtactcatgtctattgactttatggctaatgaccttgattgatgagaaggtctagatgtaggtaggacttgcgtcccttgttgtaagccccttgctgaggtttgaacaatcc

SEQ ID NO: 20585 - DNA, 2640 bp, Muscodor strobelii
  misc_feature: SGI cDNA ID NO. 566951
  misc_feature: Encodes the peptide sequence at SEQ ID NO 20586
atggcttacgctgccatcctgaataacctgacggtggaactggtcgaagccatcgcttccacaacagcttcgagcgactcagagcatcttgatgtgttgagggaatcaagtcttcgaagactgcgcaatcacagcttcttacgtacaaatcaattcgatgtgtataacgcccttgatggatacgaggagcacttccgtgtcctcaatcgtgacgggcttgccgatgctctgcggaacagcctagatgccttggctaagtgctcaagtaactggacacctgatgcacttcacttgctgctccaactagcagatcgacccattcagaagtccaggctcaaagatctagagctacttaaagaaccagatgaagatcctgggccaaaactacattggggtgagattgcgaacgaggaaggctggggagaagaaccagatatctggcggaatgtcgactttggtggaaacacctcggatgaagattacgatgacgatagatccgctgcctcgcgctccgaggatacatcatcttcaagcaacgaggcccaacataacaagaggccaattgattatcttgacacgtcccatgatgatgagattctggaccaagtctggcaaagtcaaatttggagacaaaaacccgacaagagcagtctaaaggccccggtcaccgagactcaggtagtacgagacctgcttttcatgttaagcggccacgacaccaatctgtttgatgatcaaggaaaaccttcgcttgatattcaactccagcatgcgtcatggcagatttttagaacatttctgtactcggctagtgagactaggcgcgagatctctcttctgcgtcgccatattcaacaaacaccaaagataccgcttctgcaagtatttcaagaggctatcgaggagcgtttaagatcgttcgacaaaatgatttctgatgcacatgcaccctttgtcaatatgagccgtgatgttgtcgccagtgtgatgaaaacaatgaacgaccttgaacctcatattcatccacttaaatgcctctcgaaactcgtcgagcgcttagaagcaacccggcatcctcatccgtttcattaccttgaattgctctacgattcagcaaatgaactgcaagcggagggagacgatgtttcatataaattcatcggcgacctcttcttcaagtgtttcgaggtatatcttcgaccgatacgtctctggatggagaatggtgagctcgcggacgacgataaaattttctttgtgtctagttcaccgttagacttgcctcgagcccaagtctggactgaacagttcaatctgaagaaaataggtaaacaggggactctatatgcaccacgattccttcagcctgcagccacaaggatcttcacggctggcaaaagtatcgttatgctcaaactcctcggaaaacattcaccatcgcgggagaaagagccagagccggcgacacgagtcgacttaaatactgtatctgagttcatgcccttctgtgagatattcagggacatgttcgatcattggatgcaatcaaaacacacagctgcttccattacacttagacagaccctcttcgacaactgtaacctctggtcggacataaatatcctgcaccacatttacttgatgtgcgacggagcaaggtccgaccacttgacctacaccatcttcaacaatatcgatatccttgatcacaactggcataatcggttcactcttatagagatcgcgcgagaggctttcgatggcctagtcgagccgcatcgcctgacagttagcgtactaccgagcaatacgatcattaacgtcaacgatgttcggaagagcgttcgcaacggtctaccttcattgaaacccgggtacttgctaccttggccagcaagaatcgttatatctgatgaaagcctcgagcattatcaatctatcttcacctttctcttgcaattaaggcgagctacttatgtcctaacccgacagcgcatactttcaaatggcacagcgcacgcatcagccgaacaagatatgttctacaagctacgggcaaaagtcctctggttctgcaacatcctgcagtcctacctaagcacactcgtgcttgagccgcaagtgaaaaggttcaaagaagtcatgaaacaaacaatcgacgtagatcagatgatcacagaacattctacattcaccaaacgaatattggacgaatcctgccttggaagtcgacttgagcccatccgccaggttatcctagacgtcttcgatctagcgattcaactcatagacgcccgacggatcgaatcagagcgacaagagaacgagacccaagaactgtccagattatcggtaatgtcgtcactgcagaaatccaacgttgagcgattcataaagacaagcgaagaagaagacgagacgttccttgcggagcaagaccaaagcgtgatgatgcaagatacaggggagacgtttagggaggtgttggacgagataagcatggatctcgatcggcacgtaaagtttatctgtggtggtctgcgaggtgtcgcccgggccagtagtagcgttgcagccacgaaatgggacacgctcgccgagatgttggaagtgggtgtgagtgtagatgttcatgggtaa

SEQ ID NO: 20586 - protein, 879 aa, Muscodor strobelii
  misc_feature: SGI Peptide ID NO. 566951
  misc_feature (227)..(712): Pfam Id: PF04130 Pfam Desc: Spc97 / Spc98 family
  misc_feature (1)..(873): NCBI GI: 116206394 Blast Desc: CHGG_02490 [Chaetomium globosum CBS 148.51] gi|88183087|gb|EAQ90555.1| CHGG_02490 [Chaetomium globosum CBS 148.51]
  misc_feature (1)..(874): NCBI GI: 145612247 Blast Desc: MGG_12309 [Magnaporthe grisea 70-15] gi|145019440|gb|EDK03668.1| MGG_12309 [Magnaporthe grisea 70-15]
  misc_feature (1)..(873): NCBI GI: 171693597 Blast Desc: protein product [Podospora anserina] gi|170946747|emb|CAP73551.1| protein product [Podospora anserina]
  misc_feature (1)..(879): NCBI GI: 256731309 Blast Desc: NECHADRAFT_63448 [Nectria haematococca mpVI 77-13-4]
  misc_feature (1)..(878): NCBI GI: 85100329 Blast Desc: NCU01387 [Neurospora crassa OR74A] gi|16944578|emb|CAD11359.1| conserved [Neurospora crassa] gi|28922477|gb|EAA31708.1| [Neurospora crassa OR74A]
  misc_feature (1)..(873): NCBI GI: 46125987 Blast Desc: FG07371.1 [Gibberella zeae PH-1]
  misc_feature (1)..(746): NCBI GI: 154294462 Blast Desc: BC1G_13751 [Botryotinia fuckeliana B05.10] gi|150844760|gb|EDN19953.1| BC1G_13751 [Botryotinia fuckeliana B05.10]
  misc_feature (1)..(870): NCBI GI: 119182966 Blast Desc: CIMG_06471 [Coccidioides immitis RS]
  misc_feature (1)..(870): NCBI GI: 169615397 Blast Desc: SNOG_10856 [Phaeosphaeria nodorum SN15] gi|111060235|gb|EAT81355.1| SNOG_10856 [Phaeosphaeria nodorum SN15]
  misc_feature (1)..(870): NCBI GI: 240109457 Blast Desc: Spc97 / Spc98 family protein [Coccidioides posadasii C735 delta SOWgp]
MAYAAILNNLTVELVEAIASTTASSDSEHLDVLRESSLRRLRNHSFLRTNQFDVYNALDGYEEHFRVLNRDGLADALRNSLDALAKCSSNWTPDALHLLLQLADRPIQKSRLKDLELLKEPDEDPGPKLHWGEIANEEGWGEEPDIWRNVDFGGNTSDEDYDDDRSAASRSEDTSSSSNEAQHNKRPIDYLDTSHDDEILDQVWQSQIWRQKPDKSSLKAPVTETQVVRDLLFMLSGHDTNLFDDQGKPSLDIQLQHASWQIFRTFLYSASETRREISLLRRHIQQTPKIPLLQVFQEAIEERLRSFDKMISDAHAPFVNMSRDVVASVMKTMNDLEPHIHPLKCLSKLVERLEATRHPHPFHYLELLYDSANELQAEGDDVSYKFIGDLFFKCFEVYLRPIRLWMENGELADDDKIFFVSSSPLDLPRAQVWTEQFNLKKIGKQGTLYAPRFLQPAATRIFTAGKSIVMLKLLGKHSPSREKEPEPATRVDLNTVSEFMPFCEIFRDMFDHWMQSKHTAASITLRQTLFDNCNLWSDINILHHIYLMCDGARSDHLTYTIFNNIDILDHNWHNRFTLIEIAREAFDGLVEPHRLTVSVLPSNTIINVNDVRKSVRNGLPSLKPGYLLPWPARIVISDESLEHYQSIFTFLLQLRRATYVLTRQRILSNGTAHASAEQDMFYKLRAKVLWFCNILQSYLSTLVLEPQVKRFKEVMKQTIDVDQMITEHSTFTKRILDESCLGSRLEPIRQVILDVFDLAIQLIDARRIESERQENETQELSRLSVMSSLQKSNVERFIKTSEEEDETFLAEQDQSVMMQDTGETFREVLDEISMDLDRHVKFICGGLRGVARASSSVAATKWDTLAEMLEVGVSVDVHG

SEQ ID NO: 20587 - DNA, 3444 bp, Muscodor strobelii
  misc_feature: SGI EST ID NO. CUFF.48285.0
  misc_feature: Variant of the nucleotide sequence at SEQ ID NO 20585
catgcagcacgggtaacaaagtaacaatttggccgcatgtctctaaactccattcagcacattgtagaaacaaaatccagaactccacagccgttgcgatatgggtcagtgccaccgtcacagcacactaattggggacatcacgtatctcatcgttgcaacccagaagccttacctaaagtccaccaatttctaaacttcgacaatcagcaattttgcctcatactcatgcatttgagaacggtcgatacgatttctggcaaagatgatttgagcggagcaaataattgtctcaacgtgaaatgcacagtctggagcgagttacagaactattgaaatatggcttacgctgccatcctgaataacctgacggtggaactggtcgaagccatcgcttccacaacagcttcgagcgactcagagcatcttgatgtgttgagggaatcaagtcttcgaagactgcgcaatcacagcttcttacgtacaaatcaattcgatgtgtataacgcccttgatggatacgaggagcacttccgtgtcctcaatcgtgacgggcttgccgatgctctgcggaacagcctagatgccttggctaagtgctcaagtaactggacacctgatgcacttcacttgctgctccaactagcagatcgacccattcagaagtccaggctcaaagatctagagctacttaaagaaccagatgaagatcctgggccaaaactacattggggtgagattgcgaacgaggaaggctggggagaagaaccagatatctggcggaatgtcgactttggtggaaacacctcggatgaagattacgatgacgatagatccgctgcctcgcgctccgaggatacatcatcttcaagcaacgaggcccaacataacaagaggccaattgattatcttgacacgtcccatgatgatgagattctggaccaagtctggcaaagtcaaatttggagacaaaaacccgacaagagcagtctaaaggccccggtcaccgagactcaggtagtacgagacctgcttttcatgttaagcggccacgacaccaatctgtttgatgatcaaggaaaaccttcgcttgatattcaactccagcatgcgtcatggcagatttttagaacatttctgtactcggctagtgagactaggcgcgagatctctcttctgcgtcgccatattcaacaaacaccaaagataccgcttctgcaagtatttcaagaggctatcgaggagcgtttaagatcgttcgacaaaatgatttctgatgcacatgcaccctttgtcaatatgagccgtgatgttgtcgccagtgtgatgaaaacaatgaacgaccttgaacctcatattcatccacttaaatgcctctcgaaactcgtcgagcgcttagaagcaacccggcatcctcatccgtttcattaccttgaattgctctacgattcagcaaatgaactgcaagcggagggagacgatgtttcatataaattcatcggcgacctcttcttcaagtgtttcgaggtatatcttcgaccgatacgtctctggatggagaatggtgagctcgcggacgacgataaaattttctttgtgtctagttcaccgttagacttgcctcgagcccaagtctggactgaacagttcaatctgaagaaaataggtaaacaggggactctatatgcaccacgattccttcagcctgcagccacaaggatcttcacggctggcaaaagtatcgttatgctcaaactcctcggaaaacattcaccatcgcgggagaaagagccagagccggcgacacgagtcgacttaaatactgtatctgagttcatgcccttctgtgagatattcagggacatgttcgatcattggatgcaatcaaaacacacagctgcttccattacacttagacagaccctcttcgacaactgtaacctctggtcggacataaatatcctgcaccacatttacttgatgtgcgacggagcaaggtccgaccacttgacctacaccatcttcaacaatatcgatatccttgatcacaactggcataatcggttcactcttatagagatcgcgcgagaggctttcgatggcctagtcgagccgcatcgcctgacagttagcgtactaccgagcaatacgatcattaacgtcaacgatgttcggaagagcgttcgcaacggtctaccttcattgaaacccgggtacttgctaccttggccagcaagaatcgttatatctgatgaaagcctcgagcattatcaatctatcttcacctttctcttgcaattaaggcgagctacttatgtcctaacccgacagcgcatactttcaaatggcacagcgcacgcatcagccgaacaagatatgttctacaagctacgggcaaaagtcctctggttctgcaacatcctgcagtcctacctaagcacactcgtgcttgagccgcaagtgaaaaggttcaaagaagtcatgaaacaaacaatcgacgtagatcagatgatcacagaacattctacattcaccaaacgaatattggacgaatcctgccttggaagtcgacttgagcccatccgccaggttatcctagacgtcttcgatctagcgattcaactcatagacgcccgacggatcgaatcagagcgacaagagaacgagacccaagaactgtccagattatcggtaatgtcgtcactgcagaaatccaacgttgagcgattcataaagacaagcgaagaagaagacgagacgttccttgcggagcaagaccaaagcgtgatgatgcaagatacaggggagacgtttagggaggtgttggacgagataagcatggatctcgatcggcacgtaaagtttatctgtggtggtctgcgaggtgtcgcccgggccagtagtagcgttgcagccacgaaatgggacacgctcgccgagatgttggaagtgggtgtgagtgtagatgttcatgggtaaacaggcaatgactcggggatgtgtggtttgtgccatcgagatggatgcatggtcattggcatggcgtgggatcaaatcagccgtcgagcccgtacagtaaaacgatgacgaccggccgaagacgggatgcacaattacgaatctgctgcttgccagttgcctccctcgcgtttcatcatgctcgtcatatcactagcatcgagatgggagttttgttgatccccgaagattgagaatttggtcatacgttccacatattagctatgccacagtgcatttgaacatcacaccgagatcccccttcggatcaccaagcaaacaagcatctccaacgatgcctggttgcgaatgtcgtcaacagaagaatttagatcgagatgagattgaattctgaggtcagaatctgacgtgttatcaagctttgaacccacatttacgaagcttaataaagtttctgaagtggtt

SEQ ID NO: 20588 - DNA, 873 bp, Muscodor strobelii
  misc_feature: SGI cDNA ID NO. 566952
  misc_feature: Encodes the peptide sequence at SEQ ID NO 20589
atgtccgaacgcaaagtcctcacgaaatactacccgccggacttcgatccgagcgccctcactcgcgtgcgcaagcccaaaaccaccggtcccaaggtgcaaaccgtccgcctcatggcaccattttccatgaaatgcctccaatgcggcgaatacatctaccgcggccgcaaattcaacgcccgaaaagaaacaccacaagaagagaaatacctcggcatccagatcttccgcttctacataaaatgcacgcgctgctccgcagaaatctgcttccgcaccgatccaaagaacaacgactacgcctgcgagcggggcgcaaagcgcaatacagagccctggcgcatgggtagggaggaaacagatgaggagcgcctggatagactggagaaagaggaggaggagaaaaacgccatggttgaacttgaggctaagactgtggatgctaagagggagatggcggttgctgatgcgcttgacgagatcaggatgaggaatgcgagggtcgagagggcggataaggaggggctggaggttggtgttagtttgcctgaagatgatgaggaggacaggagggagagagaggatgcggaaactgcaaagaaagtctttgcggctgcgagacgactggagaacttgttggatgaggaggttattgatgaggaaatgaccgggtcggaggttttgactccgtccagttcgtcaactgggggtacgacgccaaaggatgtggctacgcctacttctgagacggtagtggtgccgaagacgacttcaactgatatgccgccgccgagtttcaagagggtggttaagaagaagaaggatcactctgcgttgctgggcatcaagaagaagccttcactggtctga

SEQ ID NO: 20589 - protein, 290 aa, Muscodor strobelii
  misc_feature: SGI Peptide ID NO. 566952
  misc_feature (1)..(289): Pfam Id: PF04502 Pfam Desc: Family of function (DUF572)
  misc_feature (1)..(287): Pfam Id: PF04502 Pfam Desc: Family of function (DUF572)
  misc_feature (1)..(286): NCBI GI: 145612243 Blast Desc: MGG_12308 [Magnaporthe grisea 70-15] gi|145019438|gb|EDK03666.1| MGG_12308 [Magnaporthe grisea 70-15]
  misc_feature (1)..(290): NCBI GI: 154318672 Blast Desc: BC1G_02725 [Botryotinia fuckeliana B05.10] gi|150857855|gb|EDN33047.1| BC1G_02725 [Botryotinia fuckeliana B05.10]
  misc_feature (1)..(290): NCBI GI: 85100341 Blast Desc: NCU01390 [Neurospora crassa OR74A] gi|28922480|gb|EAA31711.1| conserved [Neurospora crassa OR74A] gi|28950102|emb|CAD70864.1| conserved [Neurospora crassa]
  misc_feature (1)..(283): NCBI GI: 169615471 Blast Desc: SNOG_10893 [Phaeosphaeria nodorum SN15] gi|111060272|gb|EAT81392.1| SNOG_10893 [Phaeosphaeria nodorum SN15]
  misc_feature (1)..(271): NCBI GI: 156063800 Blast Desc: SS1G_02018 [Sclerotinia sclerotiorum 1980] gi|154697352|gb|EDN97090.1| SS1G_02018 [Sclerotinia sclerotiorum 1980]
  misc_feature (1)..(243): NCBI GI: 189207062 Blast Desc: cell cycle control protein cwf16 [Pyrenophora tritici-repentis Pt-1C-BFP] gi|187975958|gb|EDU42584.1| cell cycle control protein cwf16 [Pyrenophora tritici-repentis
  misc_feature (1)..(286): NCBI GI: 171693589 Blast Desc: protein product [Podospora anserina] gi|170946743|emb|CAP73547.1| protein product [Podospora anserina]
  misc_feature (1)..(290): NCBI GI: 261202734 Blast Desc: mRNA splicing protein Yju2 [Ajellomyces dermatitidis SLH14081] gi|239590678|gb|EEQ73259.1| mRNA splicing protein Yju2 [Ajellomyces dermatitidis SLH14081]
  misc_feature (1)..(290): NCBI GI: 239612399 Blast Desc: mRNA splicing protein Yju2 [Ajellomyces dermatitidis ER-3]
  misc_feature (1)..(290): NCBI GI: 119182954 Blast Desc: CIMG_06466 [Coccidioides immitis RS]
MSERKVLTKYYPPDFDPSALTRVRKPKTTGPKVQTVRLMAPFSMKCLQCGEYIYRGRKFNARKETPQEEKYLGIQIFRFYIKCTRCSAEICFRTDPKNNDYACERGAKRNTEPWRMGREETDEERLDRLEKEEEEKNAMVELEAKTVDAKREMAVADALDEIRMRNARVERADKEGLEVGVSLPEDDEEDRREREDAETAKKVFAAARRLENLLDEEVIDEEMTGSEVLTPSSSSTGGTTPKDVATPTSETVVVPKTTSTDMPPPSFKRVVKKKKDHSALLGIKKKPSLV

SEQ ID NO: 20590 - DNA, 1249 bp, Muscodor strobelii
  misc_feature: SGI EST ID NO. CUFF.48327.0
  misc_feature: Variant of the nucleotide sequence at SEQ ID NO 20588
tctagccacacctcatgaccctcctgacgggacctgtcgttctagcaaacgatggttcggagttaaggatcgcagctgcacttcactaccttagaccaggcaaactccacgatcccttcaacacctcactctcgtggcaacatatcttcaaaccacatcttgccgacacacataatccgccatgtccgaacgcaaagtcctcacgaaatactacccgccggacttcgatccgagcgccctcactcgcgtgcgcaagcccaaaaccaccggtcccaaggtgcaaaccgtccgcctcatggcaccattttccatgaaatgcctccaatgcggcgaatacatctaccgcggccgcaaattcaacgcccgaaaagaaacaccacaagaagagaaatacctcggcatccagatcttccgcttctacataaaatgcacgcgctgctccgcagaaatctgcttccgcaccgatccaaagaacaacgactacgcctgcgagcggggcgcaaagcgcaatacagagccctggcgcatgggtagggaggaaacagatgaggagcgcctggatagactggagaaagaggaggaggagaaaaacgccatggttgaacttgaggctaagactgtggatgctaagagggagatggcggttgctgatgcgcttgacgagatcaggatgaggaatgcgagggtcgagagggcggataaggaggggctggaggttggtgttagtttgcctgaagatgatgaggaggacaggagggagagagaggatgcggaaactgcaaagaaagtctttgcggctgcgagacgactggagaacttgttggatgaggaggttattgatgaggaaatgaccgggtcggaggttttgactccgtccagttcgtcaactgggggtacgacgccaaaggatgtggctacgcctacttctgagacggtagtggtgccgaagacgacttcaactgatatgccgccgccgagtttcaagagggtggttaagaagaagaaggatcactctgcgttgctgggcatcaagaagaagccttcactggtctgattgactactgggcttgtgaaaggggttctaatttacatagcgttggcgttggcgttaagggtgcatacttaactaccggtacatattgctcagtaaagagaaccaatgataccatgcgtttcattatgactacaagaggtacttttggcttgttataacaacttcatggtgtaactaatgtgcccgatctgatcg

SEQ ID NO: 20591 - DNA, 702 bp, Muscodor strobelii
  misc_feature: SGI cDNA ID NO. 566953
  misc_feature: Encodes the peptide sequence at SEQ ID NO 20592
atgtcgcgaagatcccatcaccggtcgcggtccagtatcgaccgcgtcatggacctactagtcgagctagacgagacccaaatggagctattacttcgagaagcagagtcaacagtcgctggaaatatcccagtgtctaaaggaatcgatttctttgaacgacctggcgtaactcctatcccagctcaaccacaatcaccaccgccgcgacgaaagttcttgacttcattatcaccacgcaaacagacggaattgcggaggaggcagagcaagcgggcatctacccaccaagatgcatcagccggtaccaccgggagtctaataacgccacaaacctcgaagaagacgcctcgttcgtacaagcgcatcagccgaccggtcttctcgcttccaggccctccggctacacaagatctcactgaactcctagctgcatatctgctggatacgacatctgcatcgacatctgcacttccttcatcgccggcttcttcgactacgctctcgtcacccaccacaccacgatcaatattctcaccgcacatacaaatcgaaagagaagagcctggactagatttgttagagccatcgcctgctagaacaatgcggaatatcgatatcttcggtaaaccgctgagacaaccaactcgcaagatcagcggcatctttgaggtcttgaatgatgtcgaattaccggaatga

SEQ ID NO: 20592 - protein, 233 aa, Muscodor strobelii
  misc_feature: SGI Peptide ID NO. 566953
  misc_feature (5)..(226): NCBI GI: 85100855 Blast Desc: NCU01136 [Neurospora crassa OR74A] gi|11545140|emb|CAB88576.2| [Neurospora crassa] gi|28922580|gb|EAA31807.1| [Neurospora crassa OR74A]
  misc_feature (1)..(226): NCBI GI: 116199049 Blast Desc: CHGG_07680 [Chaetomium globosum CBS 148.51] gi|88178959|gb|EAQ86427.1| CHGG_07680 [Chaetomium globosum CBS 148.51]
  misc_feature (2)..(227): NCBI GI: 46135683 Blast Desc: FG09357.1 [Gibberella zeae PH-1]
  misc_feature (16)..(226): NCBI GI: 256730015 Blast Desc: NECHADRAFT_45194 [Nectria haematococca mpVI 77-13-4]
  misc_feature (9)..(94): NCBI GI: 171693131 Blast Desc: protein product [Podospora anserina] gi|170946514|emb|CAP73315.1| protein product [Podospora anserina]
  misc_feature (7)..(56): NCBI GI: 39955580 Blast Desc: [Magnaporthe grisea 70-15] gi|145017753|gb|EDK02116.1| [Magnaporthe grisea 70-15]
MSRRSHHRSRSSIDRVMDLLVELDETQMELLLREAESTVAGNIPVSKGIDFFERPGVTPIPAQPQSPPPRRKFLTSLSPRKQTELRRRQSKRASTHQDASAGTTGSLITPQTSKKTPRSYKRISRPVFSLPGPPATQDLTELLAAYLLDTTSASTSALPSSPASSTTLSSPTTPRSIFSPHIQIEREEPGLDLLEPSPARTMRNIDIFGKPLRQPTRKISGIFEVLNDVELPE

SEQ ID NO: 20593 - DNA, 1709 bp, Muscodor strobelii
  misc_feature: SGI EST ID NO. CUFF.48305.0
  misc_feature: Variant of the nucleotide sequence at SEQ ID NO 20591
ttcaaggttcgttgccaggataaaacaatagtcggtaggcgagagttcaggggtcggcttgatggaagatagcgatctgcgcaaagccatgattggccaatttgacatggacagagctcctgaatccactgctcttaattgaaaccgataattgagaatcctacttcgcaattcagcattcctcggatgcaaacgacgtatcgtcactttctttttcttatttcttatttcttcacattatatatgagcttaccgctctcagccaagttttctgtatatacaactcagcccaggaatacaatttcccgaaaatgtcgcgaagatcccatcaccggtcgcggtccagtatcgaccgcgtcatggacctactagtcgagctagacgagacccaaatggagctattacttcgagaagcagagtcaacagtcgctggaaatatcccagtgtctaaaggaatcgatttctttgaacgacctggcgtaactcctatcccagctcaaccacaatcaccaccgccgcgacgaaagttcttgacttcattatcaccacgcaaacagacggaattgcggaggaggcagagcaagcgggcatctacccaccaagatgcatcagccggtaccaccgggagtctaataacgccacaaacctcgaagaagacgcctcgttcgtacaagcgcatcagccgaccggtcttctcgcttccaggccctccggctacacaagatctcactgaactcctagctgcatatctgctggatacgacatctgcatcgacatctgcacttccttcatcgccggcttcttcgactacgctctcgtcacccaccacaccacgatcaatattctcaccgcacatacaaatcgaaagagaagagcctggactagatttgttagagccatcgcctgctagaacaatgcggaatatcgatatcttcggtaaaccgctgagacaaccaactcgcaagatcagcggcatctttgaggtcttgaatgatgtcgaattaccggaatgagatggtgccgcctatgtgataggtgaatttttcgactatcatactggtatggatcagcagcaatgactggcagcatcataacagctgcgcattactgcctcggtgaggaaatgacaggtctttagctcaaaagtaaagaatgagcaaacatgtaaaacaatgatgacactccaaagtgtccgaagacttgatacccagattgatattcacaggcgttcgggacgagtgccatgctgttcaaaagcaatatagctagttggtgttattgggtttccaaaaatcgagttgggttgtttggcgttttgttaaggcagttcttacgatttgtatactaacctaatcgacgatgtgaagcttctatgtcccgtttcatcagtccgttgagacgcagctatttggtgatctgtaatgatttgcactaagggccagggtaatgttttcttgacgatacgtcactatgattactggacaggaatgaatgtatcgcaggcgtggtcagcgtatgtgaatggcagaagcccaagcagcaagcagcagcacgtggtatttgttgggatcattgttgtgagaacgttgtctcacgtcagacagctaactagatgggctgtcggcatcagatagcgtgggagcgattttttgtggtcacgtagagcatcacctatcagaatgtatgtcttgacactgtataacttcaac

SEQ ID NO: 20594 - DNA, 834 bp, Muscodor strobelii
  misc_feature: SGI cDNA ID NO. 566954
  misc_feature: Reduced expression when VOC is produced
  misc_feature: Encodes the peptide sequence at SEQ ID NO 20595
atgccatcgccagatattaccgttaaaaacctaacgtacacttttccagggtatgatacaggcctgtccggcgtgtctctaaaggtaccgccccgaagtcgcacacttctcatcggcgcgaacggcgccggcaaaaccactcttttgcgcctgcttgctggcaagcgtcttgcaccaagcgatacaattagcatctccggtgtggatccgttcaaagaaggccttgagggcgtcacatatctcggactggagtgggtgttgaaccctattgtgcggacagacatcggcgtgaaagagctcctccggtccgtaggcggagatgcatacccagaacgccgcgatgaactcatcggcgtcttagacatcgacgtcaattggcgcatgagtgcggttagtgatggcgagagacgtagggttcaacttgcaatgggtcttattcgtccatggacgattttacttctcgatgagatcactgttgatcttgatgtgctcagtcgcgccgaattcctgggttggttgaaagcagagacggaatcaagagagtgcaccatcgtgtatgcgacgcatatcctcgacaacctcgcaggctggcctactcatctcgttcacatgcatttgggtactgtgcgtgaatgggggcctgcagacgatttcctcggtgaggcagcaaacctcaagagtacgggtaacagccgtctgggagagcttgtactcggatggctgcgctctgatctgaaagagcgtgggcctcgaaaccagaagacgatgggtaccgaggggctgacgtacggtagcggtggaataggtggctatggtcttgagcacaaggactaa

SEQ ID NO: 20595 - protein, 277 aa, Muscodor strobelii
  misc_feature: SGI Peptide ID NO. 566954
  misc_feature (32)..(207): Pfam Id: PF00005 Pfam Desc: ABC transporter
  misc_feature (120)..(207): Pfam Id: PF00005 Pfam Desc: ABC transporter
  misc_feature (4)..(276): NCBI GI: 46125575 Blast Desc: FG07165.1 [Gibberella zeae PH-1]
  misc_feature (4)..(276): NCBI GI: 85099865 Blast Desc: NCU04097 [Neurospora crassa OR74A] gi|28922388|gb|EAA31623.1| NCU04097 [Neurospora crassa OR74A] gi|28950368|emb|CAD71023.1| related to ATP-binding cassette (ABC)
  misc_feature (4)..(276): NCBI GI: 256730958 Blast Desc: [Nectria haematococca mpVI 77-13-4]
  misc_feature (3)..(276): NCBI GI: 39961344 Blast Desc: MGG_09520 [Magnaporthe grisea 70-15] gi|145011021|gb|EDJ95677.1| MGG_09520 [Magnaporthe grisea 70-15]
  misc_feature (3)..(265): NCBI GI: 261354824 Blast Desc: CCR4-Not complex subunit Caf16 [Verticillium albo-atrum VaMs.102]
  misc_feature (4)..(276): NCBI GI: 171693943 Blast Desc: protein product [Podospora anserina] gi|170946920|emb|CAP73724.1| protein product [Podospora anserina]
  misc_feature (2)..(276): NCBI GI: 116198037 Blast Desc: CHGG_07174 [Chaetomium globosum CBS 148.51] gi|88178453|gb|EAQ85921.1| CHGG_07174 [Chaetomium globosum CBS 148.51]
  misc_feature (3)..(276): NCBI GI: 154305908 Blast Desc: BC1G_08185 [Botryotinia fuckeliana B05.10] gi|150853070|gb|EDN28262.1| BC1G_08185 [Botryotinia fuckeliana B05.10]
  misc_feature (3)..(276): NCBI GI: 259480082 Blast Desc: TPA: ABC transporter (Eurofung) [Aspergillus nidulans FGSC A4]
  misc_feature (3)..(277): NCBI GI: 115398512 Blast Desc: conserved [Aspergillus terreus NIH2624] gi|114191728|gb|EAU33428.1| conserved [Aspergillus terreus NIH2624]
  misc_feature (6)..(232): SWISSPROT Homolog: EC 3.6.3.25 Sulfate-transporting ATPase
  misc_feature: Useful for introducing or modulating the production of volatile compounds
MPSPDITVKNLTYTFPGYDTGLSGVSLKVPPRSRTLLIGANGAGKTTLLRLLAGKRLAPSDTISISGVDPFKEGLEGVTYLGLEWVLNPIVRTDIGVKELLRSVGGDAYPERRDELIGVLDIDVNWRMSAVSDGERRRVQLAMGLIRPWTILLLDEITVDLDVLSRAEFLGWLKAETESRECTIVYATHILDNLAGWPTHLVHMHLGTVREWGPADDFLGEAANLKSTGNSRLGELVLGWLRSDLKERGPRNQKTMGTEGLTYGSGGIGGYGLEHKD

SEQ ID NO: 20596 - DNA, 1423 bp, Muscodor strobelii
  misc_feature: SGI EST ID NO. CUFF.48357.0
  misc_feature: Variant of the nucleotide sequence at SEQ ID NO 20594
cggcgccaacaatatcatctcgtcatcgaatgccctcctttcatttgctttctttttgtaatttacaaccgccaccgtctctcttctacagttgccgttcattcaaaatatcatgccatcgccagatattaccgttaaaaacctaacgtacacttttccagggtatgatacaggcctgtccggcgtgtctctaaaggtaccgccccgaagtcgcacacttctcatcggcgcgaacggcgccggcaaaaccactcttttgcgcctgcttgctggcaagcgtcttgcaccaagcgatacaattagcatctccggtgtggatccgttcaaagaaggccttgagggcgtcacatatctcggactggagtgggtgttgaaccctattgtgcggacagacatcggcgtgaaagagctcctccggtccgtaggcggagatgcatacccagaacgccgcgatgaactcatcggcgtcttagacatcgacgtcaattggcgcatgagtgcggttagtgatggcgagagacgtagggttcaacttgcaatgggtcttattcgtccatggacgattttacttctcgatgagatcactgttgatcttgatgtgctcagtcgcgccgaattcctgggttggttgaaagcagagacggaatcaagagagtgcaccatcgtgtatgcgacgcatatcctcgacaacctcgcaggctggcctactcatctcgttcacatgcatttgggtactgtgcgtgaatgggggcctgcagacgatttcctcggtgaggcagcaaacctcaagagtacgggtaacagccgtctgggagagcttgtactcggatggctgcgctctgatctgaaagagcgtgggcctcgaaaccagaagacgatgggtaccgaggggctgacgtacggtagcggtggaataggtggctatggtcttgagcacaaggactaattaaacagtgaagaatgatttaagattcttttcacaacatagcgattaaaatagcgaagcgaatcacgatcaggggatgatagaggggaaatccggttgcatatagggtctggcggcgttaggcgatgcacttaacttgcatttgcaggcgcagggtcatttcaacaacaaacgagatgggcattttatcacggttggcgtttctgaacggcttcatcagccgttttctgtatacaaatgctacaggcatggggagatcgatattctgggatggcctttcaacaaaggctcaataaaatgatctcaaacaactagctctacagtcggacgcttcgataattcggttgagaatgtgcctgatttcaattaattaaattgataagctgtctcaggcatgtctgccaaagatactcttgtagcgaaatggtcccttgcgaagggcatgctcagcttcagacaaagacctatacagctcaa

SEQ ID NO: 20597 - DNA, 1086 bp, Muscodor strobelii
  misc_feature: SGI cDNA ID NO. 566955
  misc_feature: Elevated expression when VOC is produced
  misc_feature: Encodes the peptide sequence at SEQ ID NO 20598
atgggccaactcgtcccgcaggagatcgcagttaactctggtcgaccgacatttttcgacaactcagtttcctggccagggaagatcgttctcgaagaacatgtgactacaaacctcttccagcctgcattcacaacacccttcgtcaataatacaaatgagctatcctacgactcagctatatatctcgcagacatcggtccgaggcttctgcagacatccatctccgagcgcgtggctgatatggatgctgccaatatcagcctcagcatcgtttcacttggccctcctggaattcaaggtgtcttcaacacgagccttgcgattgaacttgcggcgggagtcaatgaccagattgcggcgaactacacccaaggagaattcgctgatcgattcgagttcttctgctctgttgccatgcaagatccatcctctgccgccgtcgagctagagcgctgtgtgcgaaaacttggaggagtgggcgtgatggtaggaggctacactaacatcggatctattgacaatatcacgtacttggatgatatagttaatgagccgttctgggtgaaagtagaagagcttgatgtaccactttatttgcatcctcgtatgccgcttccaagtcagcagcgcgtgtatcaaggttatgagtttctcggcgcttcgccatggggctttgcagcagaaacagcagcgcatgctcttcggctcatggtctcgggattattcgaccgacaccctactctccaaatcgtattagggcactgtggcgaaaacctgcccttttcacttgcgagagcagattccaggatgagacactttgatcaatcgctctggccggcgactcaatcgctcacgtattattacaagaataacttttacgttacgactgcgggagtcgcagacgatggtgcgttctttgatacgttacggaccattggaagcgatcgagtcatgttcagcgttgattatcctttcgaagacatggtggagatcggttcgtggtttgaccgggtacagttggatgatgagaccaaggggagagtagcgagtggtaatgcccaaaaactcttcaagttaagctaa

SEQ ID NO: 20598 - protein, 361 aa, Muscodor strobelii
  misc_feature: SGI Peptide ID NO. 566955
  misc_feature (80)..(360): Pfam Id: PF04909 Pfam Desc: Amidohydrolase
  misc_feature (5)..(361): NCBI GI: 154301847 Blast Desc: BC1G_10075 [Botryotinia fuckeliana B05.10] gi|150855737|gb|EDN30929.1| BC1G_10075 [Botryotinia fuckeliana B05.10]
  misc_feature (27)..(358): NCBI GI: 78063907 Blast Desc: amidohydrolase 2 [Burkholderia sp. 383] gi|77971792|gb|ABB13171.1| Amidohydrolase 2 [Burkholderia sp. 383]
  misc_feature (28)..(360): NCBI GI: 167578988 Blast Desc: Amidohydrolase family superfamily protein [Burkholderia thailandensis TXDOH]
  misc_feature (12)..(361): NCBI GI: 189199586 Blast Desc: amidohydrolase 2 [Pyrenophora tritici-repentis Pt-1C-BFP] gi|187983229|gb|EDU48717.1| amidohydrolase 2 [Pyrenophora tritici-repentis Pt-1C-BFP]
  misc_feature (28)..(360): NCBI GI: 257140985 Blast Desc: amidohydrolase [Burkholderia thailandensis E264]
  misc_feature (28)..(360): NCBI GI: 167617091 Blast Desc: Amidohydrolase family superfamily protein [Burkholderia thailandensis Bt4]
  misc_feature (63)..(360): NCBI GI: 83717434 Blast Desc: amidohydrolase [Burkholderia thailandensis E264] gi|83651259|gb|ABC35323.1| Amidohydrolase family superfamily [Burkholderia thailandensis E264]
  misc_feature (27)..(361): NCBI GI: 269919540 Blast Desc: o-pyrocatechuate decarboxylase [Klebsiella variicola At-22] gi|269132288|gb|EEZ62750.1| o-pyrocatechuate decarboxylase [Klebsiella variicola At-22]
  misc_feature (27)..(361): NCBI GI: 206576687 Blast Desc: amidohydrolase family protein [Klebsiella pneumoniae 342] gi|206565745|gb|ACI07521.1| amidohydrolase family protein [Klebsiella pneumoniae 342]
  misc_feature (27)..(361): NCBI GI: 239819994 Blast Desc: amidohydrolase 2 [Variovorax paradoxus S110] gi|239804847|gb|ACS21913.1| amidohydrolase 2 [Variovorax paradoxus S110]
  misc_feature (27)..(360): SWISSPROT Homolog: EC 4.1.1.46 o-pyrocatechuate decarboxylase
  misc_feature: Useful for introducing or modulating the production of volatile compounds
MGQLVPQEIAVNSGRPTFFDNSVSWPGKIVLEEHVTTNLFQPAFTTPFVNNTNELSYDSAIYLADIGPRLLQTSISERVADMDAANISLSIVSLGPPGIQGVFNTSLAIELAAGVNDQIAANYTQGEFADRFEFFCSVAMQDPSSAAVELERCVRKLGGVGVMVGGYTNIGSIDNITYLDDIVNEPFWVKVEELDVPLYLHPRMPLPSQQRVYQGYEFLGASPWGFAAETAAHALRLMVSGLFDRHPTLQIVLGHCGENLPFSLARADSRMRHFDQSLWPATQSLTYYYKNNFYVTTAGVADDGAFFDTLRTIGSDRVMFSVDYPFEDMVEIGSWFDRVQLDDETKGRVASGNAQKLFKLS

SEQ ID NO: 20599 - DNA, 888 bp, Muscodor strobelii
  misc_feature: SGI cDNA ID NO. 566956
  misc_feature: Elevated expression when VOC is produced
  misc_feature: Encodes the peptide sequence at SEQ ID NO 20600
atggcttccgacacatcaacatcgatgcaaaatgccagcttagaggtggtcgctctcacagacctagagaagaaagaatatagagcactttcctacacatggggcaaagtgcgcgactcggatgtccgcgagattaagaggccgaagacgtgcgctgccttgcacaagcatatcggcaaggctgctcttcttggcatgctgcgcactggagaggactcaaatatctcagttaccataactactggcgacgtaccaacgagagatgaagtagcacagggcacgacgatagggacattggaagagatggcacgggcactgaagcgtcctagtaccgaagtcgtcacttatcaatctcttatcatggatccattgttcagagtgatccgcaggttcggcaagctcgagtgttctgatccaagagataaactgtatggatttcttggtatcattgaagagggcagtcgaggacttgtggagcttgactacactaaaggggtggattatgcatattaccaagcactcaaaattggactacaggagatctacggagaagaggagagcgttgtctacgtatcccagtcagaagatcggaaactcccatatctcacattctactgccaggcgcgcgatgcatttggagtcaaggatgagatcagtctgccgattttgcgtcaagtactgaaagagctccggttcaggcttcgggctgagcatgatgtgctatctatgcaaagacgacaccagtttgcttggcgggacgatgaaatgcgattgtccccggatctaaaacgtgttattacgcattccccgcccaagatgtacgagtcgccacagagcctcgtagaggtggcatccatgacgacctcgaatgacaaacttgatcagtag

SEQ ID NO: 20600 - protein, 295 aa, Muscodor strobelii
  misc_feature: SGI Peptide ID NO. 566956
  misc_feature: Useful for introducing or modulating the production of volatile compounds
MASDTSTSMQNASLEVVALTDLEKKEYRALSYTWGKVRDSDVREIKRPKTCAALHKHIGKAALLGMLRTGEDSNISVTITTGDVPTRDEVAQGTTIGTLEEMARALKRPSTEVVTYQSLIMDPLFRVIRRFGKLECSDPRDKLYGFLGIIEEGSRGLVELDYTKGVDYAYYQALKIGLQEIYGEEESVVYVSQSEDRKLPYLTFYCQARDAFGVKDEISLPILRQVLKELRFRLRAEHDVLSMQRRHQFAWRDDEMRLSPDLKRVITHSPPKMYESPQSLVEVASMTTSNDKLDQ

SEQ ID NO: 20601 - DNA, 2124 bp, Muscodor strobelii
  misc_feature: SGI cDNA ID NO. 566957
  misc_feature: Encodes the peptide sequence at SEQ ID NO 20602
atgtcgctttccccggacaacagcgatgacgtaacgaatgagtcgccgaggagaccgaccgctcaaaaccgccctaggtccggctccgtcaatgcatcgccagagatacaggagcatttgatagaagtcatccaagcatctaagttgcccgcgaagcagcgaggcgtcaatatcaagccgacagtggagagacttgcatcgttgtcttatgaccagggtctcttgcctactgaattgaacgagctcattgatctggtcacaactccaaacttcctcgaccaggccagtctcggaagcatcatcaggaacttgtacccagcaacacctgtgagcgatgaaatcatcattaaagtcgtgggctgcttgggccatggcaaattgaagccctcgctcaccatccaagccgcactgctcaggtggctcatccttattcaacatatcgcgagccgtcaatttgtcttgtttcagacgtatccagtcttgtttaacttgctggatactgctggtctcaggccatacgtgtgccacttgttggccttaattacacgtcgacgacatgttcgtcctcacagaatccagacgctgctcgcgttatcgcgtcagacaggcaatgatccaccactcaccggtctccttagagtctacaaagactactaccccgagatcatcgtaggagaggcgactcgtgggaaagcatccgcattcaagcatccagatccacagtggcgtgagaggctagatgagatccgtcgtgctcacgcgcaacgacgtgcttctcgatctgaaatgcccctagacgctttcagagtcgcgcgtcacagaataaatggcaccaataagttatccgttccagaagtgcatacatcctatgctgttgaggttggttcttgttgcttgagcttggtctctttccccactaatctttttcagagttcgactacccttgaggagatcgagaatgtcgatagtttcgttaagaacttagagaaaatcgagttaccaaatcaactgattgcaattctcggagatcctctgctgcaaaagttcctccttctgcgaccgcaatctgacgcccaccgacgtgcctgcaactggctccagtcctatgcccaagatgtcgtgaacggagactctgacatccattttgttgacattctacagaccttacagatattcgttgctgcaatcaagaacccagaactcatgacgggtatcttactgcctcttgaacggaagatgttagatggaacatctcagtcccaacttcaactcttgcatttcttcgcagaatttctccgccgctggaatgtgcagctcaagtcagcagatagcaaaccagcgcacgcgtcggagaccgctgcccagctcattgcacacaccaataatctttgcctcacgctcctccagacatcacccgatgtgtcgtctcgcgctgcgatattggatttctacgatcatgcatcttcctttgcctctgacactcatctacttaggcagccaaataatgggtcgataccacccgcgcctctggtgtatgctttgttcttcgcaccctcgcctatcacggcatcacgagtgtgttccgtggtggccaaatacaaggaaggatttcagctcgccatgaatgcgacaggagctaccagcactcccaggcacattgctgagtacaacagcttcttaatggatatttgtaactgtttatggcgttcacgcgctttcagcgataaggacacgagtgcaaacggctgcctcatgagtaggccactggtaaacgatcttagcacctatgttgagagtctctccactggtggcactcttgcaaccctcttttctctatcatactctcccacatttgggctctttgcaatatcgcatcttcgcgaagtggaagagaacgagctggagaacggctcggagggactggatgttagacacgctggtccagtaacccgcaagacattatccacactcgcaagtagaggtggcgtgagactggcctgggatgattatcgtctaggtgtcctgaatcatcttgacagtcaaggaatggacggagttggccagctcctgtcaaatacgatgacgactctaatgcagaggaagccagctctgcaggcaagctag

SEQ ID NO: 20602 - protein, 707 aa, Muscodor strobelii
  misc_feature: SGI Peptide ID NO. 566957
  misc_feature (1)..(456): Pfam Id: PF07778 Pfam Desc: Mis6
  misc_feature (46)..(379): Pfam Id: PF07778 Pfam Desc: Mis6
  misc_feature (42)..(697): NCBI GI: 46125577 Blast Desc: FG07166.1 [Gibberella zeae PH-1]
  misc_feature (42)..(697): NCBI GI: 256731332 Blast Desc: NECHADRAFT_49005 [Nectria haematococca mpVI 77-13-4]
  misc_feature (40)..(701): NCBI GI: 85102192 Blast Desc: NCU04131 [Neurospora crassa OR74A] gi|16944420|emb|CAC28775.2| conserved [Neurospora crassa] gi|28922830|gb|EAA32051.1| [Neurospora crassa OR74A]
  misc_feature (46)..(698): NCBI GI: 171694025 Blast Desc: protein product [Podospora anserina] gi|170946961|emb|CAP73765.1| protein product [Podospora anserina]
  misc_feature (46)..(696): NCBI GI: 116198039 Blast Desc: CHGG_07175 [Chaetomium globosum CBS 148.51] gi|88178454|gb|EAQ85922.1| CHGG_07175 [Chaetomium globosum CBS 148.51]
  misc_feature (28)..(697): NCBI GI: 226277993 Blast Desc: Mis6 domain-containing protein [Paracoccidioides brasiliensis Pb01]
  misc_feature (28)..(697): NCBI GI: 226293269 Blast Desc: Mis6 domain-containing protein [Paracoccidioides brasiliensis Pb18]
  misc_feature (34)..(697): NCBI GI: 145250321 Blast Desc: An15g01340 [Aspergillus niger] gi|134082193|emb|CAL00948.1| protein product [Aspergillus niger]
  misc_feature (47)..(697): NCBI GI: 225683883 Blast Desc: conserved [Paracoccidioides brasiliensis Pb03]
  misc_feature (46)..(694): NCBI GI: 242781106 Blast Desc: Mis6 domain protein [Talaromyces stipitatus ATCC 10500] gi|218719881|gb|EED19300.1| Mis6 domain protein [Talaromyces stipitatus ATCC 10500]
MSLSPDNSDDVTNESPRRPTAQNRPRSGSVNASPEIQEHLIEVIQASKLPAKQRGVNIKPTVERLASLSYDQGLLPTELNELIDLVTTPNFLDQASLGSIIRNLYPATPVSDEIIIKVVGCLGHGKLKPSLTIQAALLRWLILIQHIASRQFVLFQTYPVLFNLLDTAGLRPYVCHLLALITRRRHVRPHRIQTLLALSRQTGNDPPLTGLLRVYKDYYPEIIVGEATRGKASAFKHPDPQWRERLDEIRRAHAQRRASRSEMPLDAFRVARHRINGTNKLSVPEVHTSYAVEVGSCCLSLVSFPTNLFQSSTTLEEIENVDSFVKNLEKIELPNQLIAILGDPLLQKFLLLRPQSDAHRRACNWLQSYAQDVVNGDSDIHFVDILQTLQIFVAAIKNPELMTGILLPLERKMLDGTSQSQLQLLHFFAEFLRRWNVQLKSADSKPAHASETAAQLIAHTNNLCLTLLQTSPDVSSRAAILDFYDHASSFASDTHLLRQPNNGSIPPAPLVYALFFAPSPITASRVCSVVAKYKEGFQLAMNATGATSTPRHIAEYNSFLMDICNCLWRSRAFSDKDTSANGCLMSRPLVNDLSTYVESLSTGGTLATLFSLSYSPTFGLFAISHLREVEENELENGSEGLDVRHAGPVTRKTLSTLASRGGVRLAWDDYRLGVLNHLDSQGMDGVGQLLSNTMTTLMQRKPALQAS

SEQ ID NO: 20603 - DNA, 5664 bp, Muscodor strobelii
  misc_feature: SGI EST ID NO. CUFF.48442.0
  misc_feature: Variant of the nucleotide sequence at SEQ ID NO 20601
gtcgaacttccgaggttatgtatccgttgtccggcagtgttcactttctattcatccaggtatgtgggctctctgcatcgatgctattgtgggcacttagcctacctggaagccggacgagctgcgacgcgttgatattcgcatgtaccgcgtcaattgacagccccaaacagagcacttgcataaagcaaccagggtatgtatggtgatgaccaacatgttctcataaacatttcacttgtgcttcacaaaccacttttgaatgaccatgtcgctttccccggacaacagcgatgacgtaacgaatgagtcgccgaggagaccgaccgctcaaaaccgccctaggtccggctccgtcaatgcatcgccagagatacaggagcatttgatagaagtcatccaagcatctaagttgcccgcgaagcagcgaggcgtcaatatcaagccgacagtggagagacttgcatcgttgtcttatgaccagggtctcttgcctactgaattgaacgagctcattgatctggtcacaactccaaacttcctcgaccaggccagtctcggaagcatcatcaggaacttgtacccagcaacacctgtgagcgatgaaatcatcattaaagtcgtgggctgcttgggccatggcaaattgaagccctcgctcaccatccaagccgcactgctcaggtggctcatccttattcaacatatcgcgagccgtcaatttgtcttgtttcagacgtatccagtcttgtttaacttgctggatactgctggtctcaggccatacgtgtgccacttgttggccttaattacacgtcgacgacatgttcgtcctcacagaatccagacgctgctcgcgttatcgcgtcagacaggcaatgatccaccactcaccggtctccttagagtctacaaagactactaccccgagatcatcgtaggagaggcgactcgtgggaaagcatccgcattcaagaacttgccccccgtgatgctttcgttctttcgtgagctgttaaatgcatgggacggcaaggatgggaaaaatcttgttcttgatattcttacattcacgccaatcttgcgctttgaagaactcatgacgggtatcttactgcctcttgaacggaagatgttagatggaacatctcagtcccaacttcaactcttgcatttcttcgcagaatttctccgccgctggaatgtgcagctcaagtcagcagatagcaaaccagcgcacgcgtcggagaccgctgcccagctcattgcacacaccaataatctttgcctcacgctcctccagacatcacccgatgtgtcgtctcgcgctgcgatattggatttctacgatcatgcatcttcctttgcctctgacactcatctacttaggcagccaaataatgggtcgataccacccgcgcctctggtgtatgctttgttcttcgcaccctcgcctatcacggcatcacgagtgtgttccgtggtggccaaatacaaggaaggatttcagctcgccatgaatgcgacaggagctaccagcactcccaggcacattgctgagtacaacagcttcttaatggatatttgtaactgtttatggcgttcacgcgctttcagcgataaggacacgagtgcaaacggctgcctcatgagtaggccactggtaaacgatcttagcacctatgttgagagtctctccactggtggcactcttgcaaccctcttttctctatcatactctcccacatttgggctctttgcaatatcgcatcttcgcgaagtggaagagaacgagctggagaacggctcggagggactggatgttagacacgctggtccagtaacccgcaagacattatccacactcgcaagtagaggtggcgtgagactggcctgggatgattatcgtctaggtgtcctgaatcatcttgacagtcaaggaatggacggagttggccagctcctgtcaaatacgatgacgactctaatgcagaggaagccagctctgcaggcaagctaggtaaactcatatacgagggacgcgggaaatgacatactctacagcatgggtcaccgaatgtgcaatctgaacttgtactccagaatgcagcgcaatagtcctattatgctgttgcctgggagctacccgtggagtacttggcgcagcttcttcgattggctatcaaatgcgaatgaatctggacgtgtggttggtggtccgattcccctcaccgcattgagcaagtgcagcatagcccagctcaagcgcagcaaacaggagcatagcctccatatcgctcaaaagcagctccttgcccaccatatactaatgaactaatacctccgtccacgttctattaacctgcccttttgacaaaatgaatgttaataatcatggaaggcgaaattgacaaagccctcaaccataaatatggcttccgacacatcaacatcgatgcaaaatgccaggttcgcttgctacgtctacaaagagtgcagtctagtcgactgcaatatagcttagaggtggtcgctctcacagacctagagaagaaagaatatagagcactttcctacacatggggcaaagtgcgcgactcggatgtccgcgagattaaggtagacgagcaatcattttgcgttcgtcgcaacttgcacgactttttgcaaacagcggcagcgaaaaacgagcatggcttattcttcattgatgcgctatgtatcaatcaaaatgatataatggagcgacagctccaggttgcaatgatgcctcaattatatcgccatgcgagcgcattgatcgtctggctaggtcttcctgagggattagaggccgaagacgtgcgctgccttgcacaagcatatcggcaaggctgctcttcttggcatgctgcgcactggagaggactcaaatatctcagttaccataactactggcgacgtgtatgggttgtccaagaggtcttgcttgcaagagagctcacaatttggtgcggcttcttttcgttcccggcctcgatattggcaatgtcttcatttggagccaggcacgactacaagcaaacgatgatggtagatcaaaatgggcgacctaatgtctttgcggatgccttatcacgatgccaaagcccagcagaaaaaattatcacagaccatacccgttatttgatcagaccaacgagagatgaagtagcacagggcacgacgatagggacattggaagagatggcacgggcactgaagcgtcctagtaccgaagtcgtcacttatcaatctcttatcatggatccattgttcagagtgatccgcaggttcggcaagctcgagtgttctgatccaagagataaactgtatggatttcttggtatcattgaagagggcagtcgaggacttgtggagcttgactacactaaaggggtggattatgcatattaccaagcactcaaaattggactacaggagatctacggagaagaggagagcgttgtctacgtatcccagtcagaagatcggaaactcccatatctcacattctactgccaggcgcgcgatgcatttggagtcaaggatgagatcagtctgccgattttgcgtcaagtactgaaagagctccggttcaggcttcgggctgagcatgatgtgctatctatgcaaagacgacaccagtttgcttggcgggacgatgaaatgcgattgtccccggatctaaaacgtctcttcgacatctgcgagccagcggaagaggaagattgccaagatcccaacaaacacaatcgactgttccgatttcaccaacggcaatcaaaatggatttacaaaatgagaagcaatctcctagccggcggtcaatggctaaccatagcgtgtttaaggtgttattacgcattccccgcccaagatgtacgagtcgccacagagcctcgtagaggtggcatccatgacgacctcgaatgacaaacttgatcagtagctagcaatctagcagccgtcaagacaacaggcgttgttatggccccttggtaggtgagaaatagtaaggaaaagaaagacgatctttgaaattagcttaacttgaagagtttttgggcattaccactcgctactctccccttggtctcatcatccaactgtacccggtcaaaccacgaaccgatctccaccatgtcttcgaaaggataatcaacgctgaacatgactcgatcgcttccaatggtccgtaacgtatcaaagaacgcaccatcgtctgcgactcccgcagtcgtaacgtaaaagttattcttgtaataatacgtgagcgattgagtcgccggccagagcgattgatcaaagtgtctcatcctggaatctgctctcgcaagtgaaaagggcaggttttcgccacagtgccctaatacgatttggagagtagggtgtcggtcgaataatcccgagaccatgagccgaagagcatgcgctgctgtttctgctgcaaagccccatggcgaagcgccgagaaactcataaccttgatacacgcgctgctgacttggaagcggcatacgaggatgcaaataaagtggtacatcaagctcttctactttcacccagaacggctcattaactatatcatccaagtacgtgatattgtcaatagatccgatgttagtgtagcctcctaccatcacgcccactcctccaagttttcgcacacagcgctctagctcgacggcggcagaggatggatcttgcatggcaacagagcagaagaactcgaatcgatcagcgaattctccttgggtgtagttcgccgcaatctggtcattgactcccgccgcaagttcaatcgcaaggctcgtgttgaagacaccttgaattccaggagggccaagtgaaacgatgctgaggctgatattggcagcatccatatcagccacgcgctcggagatggatgtctgcagaagcctcggaccgatgtctgcgagatatatagctgagtcgtaggatagctcatttgtattattgacgaagggtgttgtgaatgcaggctggaagaggtttgtagtcacatgttcttcgagaacgatcttccctggccaggaaactgagttgtcgaaaaatgtcggtcgaccagagttaactgcgatctcctgcgggacgagttggcccatgacgccaaatataggcaacacacaacattgccaccacttagggttcataacgtctatgaaattagattgacttgaagtcttcacgcttaagtaacaagcctactgaaaatcgaatatcaaaacacaaagaagagactgggcttgagggagccatgagtgtagttagcaaggactcaatatcgtacccgagcttggcgtccagctgcgatgattggagcacttgctgctatgaaccgctagaaccgggcatcgcaactttggacctgcgtccgggggaacggtgcggggtttcgcttacgcatatcgcgaatagtcgatttcctatgacctaccagacatagtgcggagtgagcaaggattcgcgtcgtcatcattctatgataccgtaagtagttcgaaagccggccagcagagatacttgatcacgttcgcatgatccagacatggcgacctgggactgggaataacaagatgctttgtcaatcacaaaagcaactggtgacagctgcgagtgtta

SEQ ID NO: 20604 - DNA, 2169 bp, Muscodor strobelii
  misc_feature: SGI cDNA ID NO. 566958
  misc_feature: Elevated expression when VOC is produced
  misc_feature: Encodes the peptide sequence at SEQ ID NO 20605
atgtcgctttccccggacaacagcgatgacgtaacgaatgagtcgccgaggagaccgaccgctcaaaaccgccctaggtccggctccgtcaatgcatcgccagagatacaggagcatttgatagaagtcatccaagcatctaagttgcccgcgaagcagcgaggcgtcaatatcaagccgacagtggagagacttgcatcgttgtcttatgaccagggtctcttgcctactgaattgaacgagctcattgatctggtcacaactccaaacttcctcgaccaggccagtctcggaagcatcatcaggaacttgtacccagcaacacctgtgagcgatgaaatcatcattaaagtcgtgggctgcttgggccatggcaaattgaagccctcgctcaccatccaagccgcactgctcaggtggctcatccttattcaacatatcgcgagccgtcaatttgtcttgtttcagacgtatccagtcttgtttaacttgctggatactgctggtctcaggccatacgtgtgccacttgttggccttaattacacgtcgacgacatgttcgtcctcacagaatccagacgctgctcgcgttatcgcgtcagacaggcaatgatccaccactcaccggtctccttagagtctacaaagactactaccccgagatcatcgtaggagaggcgactcgtgggaaagcatccgcattcaagcatccagatccacagtggcgtgagaggctagatgagatccgtcgtgctcacgcgcaacgacgtgcttctcgatctgaaatgcccctagacgctttcagagtcgcgcgtcacagaataaatggcaccaataagttatccgttccagaagtgcatacatcctatgctgttgagagttcgactacccttgaggagatcgagaatgtcgatagtttcgttaagaacttagagaaaatcgagttaccaaatcaactgattgcaattctcggagatcctctgctgcaaaagttcctccttctgcgaccgcaatctgacgcccaccgacgtgcctgcaactggctccagtcctatgcccaagatgtcgtgaacggagactctgacatccattttgttgacattctacagaccttacagatattcaacttgccccccgtgatgctttcgttctttcgtgagctgttaaatgcatgggacggcaaggatgggaaaaatcttgttcttgatattcttacattcacgccaatcttgcgctttgaagaactcatgacgggtatcttactgcctcttgaacggaagatgttagatggaacatctcagtcccaacttcaactcttgcatttcttcgcagaatttctccgccgctggaatgtgcagctcaagtcagcagatagcaaaccagcgcacgcgtcggagaccgctgcccagctcattgcacacaccaataatctttgcctcacgctcctccagacatcacccgatgtgtcgtctcgcgctgcgatattggatttctacgatcatgcatcttcctttgcctctgacactcatctacttaggcagccaaataatgggtcgataccacccgcgcctctggtgtatgctttgttcttcgcaccctcgcctatcacggcatcacgagtgtgttccgtggtggccaaatacaaggaaggatttcagctcgccatgaatgcgacaggagctaccagcactcccaggcacattgctgagtacaacagcttcttaatggatatttgtaactgtttatggcgttcacgcgctttcagcgataaggacacgagtgcaaacggctgcctcatgagtaggccactggtaaacgatcttagcacctatgttgagagtctctccactggtggcactcttgcaaccctcttttctctatcatactctcccacatttgggctctttgcaatatcgcatcttcgcgaagtggaagagaacgagctggagaacggctcggagggactggatgttagacacgctggtccagtaacccgcaagacattatccacactcgcaagtagaggtggcgtgagactggcctgggatgattatcgtctaggtgtcctgaatcatcttgacagtcaaggaatggacggagttggccagctcctgtcaaatacgatgacgactctaatgcagaggaagccagctctgcaggcaagctag

SEQ ID NO: 20605 - protein, 722 aa, Muscodor strobelii
  misc_feature: SGI Peptide ID NO. 566958
  misc_feature (1)..(471): Pfam Id: PF07778 Pfam Desc: Mis6
  misc_feature (46)..(471): Pfam Id: PF07778 Pfam Desc: Mis6
  misc_feature (42)..(712): NCBI GI: 46125577 Blast Desc: FG07166.1 [Gibberella zeae PH-1]
  misc_feature (42)..(712): NCBI GI: 256731332 Blast Desc: NECHADRAFT_49005 [Nectria haematococca mpVI 77-13-4]
  misc_feature (46)..(713): NCBI GI: 171694025 Blast Desc: protein product [Podospora anserina] gi|170946961|emb|CAP73765.1| protein product [Podospora anserina]
  misc_feature (40)..(716): NCBI GI: 85102192 Blast Desc: NCU04131 [Neurospora crassa OR74A] gi|16944420|emb|CAC28775.2| conserved [Neurospora crassa] gi|28922830|gb|EAA32051.1| [Neurospora crassa OR74A]
  misc_feature (46)..(711): NCBI GI: 116198039 Blast Desc: CHGG_07175 [Chaetomium globosum CBS 148.51] gi|88178454|gb|EAQ85922.1| CHGG_07175 [Chaetomium globosum CBS 148.51]
  misc_feature (34)..(712): NCBI GI: 145250321 Blast Desc: An15g01340 [Aspergillus niger] gi|134082193|emb|CAL00948.1| protein product [Aspergillus niger]
  misc_feature (28)..(712): NCBI GI: 226277993 Blast Desc: Mis6 domain-containing protein [Paracoccidioides brasiliensis Pb01]
  misc_feature (28)..(712): NCBI GI: 226293269 Blast Desc: Mis6 domain-containing protein [Paracoccidioides brasiliensis Pb18]
  misc_feature (47)..(712): NCBI GI: 225683883 Blast Desc: conserved [Paracoccidioides brasiliensis Pb03]
  misc_feature (44)..(712): NCBI GI: 115386362 Blast Desc: conserved [Aspergillus terreus NIH2624] gi|114190720|gb|EAU32420.1| conserved [Aspergillus terreus NIH2624]
  misc_feature: Useful for introducing or modulating the production of volatile compounds
MSLSPDNSDDVTNESPRRPTAQNRPRSGSVNASPEIQEHLIEVIQASKLPAKQRGVNIKPTVERLASLSYDQGLLPTELNELIDLVTTPNFLDQASLGSIIRNLYPATPVSDEIIIKVVGCLGHGKLKPSLTIQAALLRWLILIQHIASRQFVLFQTYPVLFNLLDTAGLRPYVCHLLALITRRRHVRPHRIQTLLALSRQTGNDPPLTGLLRVYKDYYPEIIVGEATRGKASAFKHPDPQWRERLDEIRRAHAQRRASRSEMPLDAFRVARHRINGTNKLSVPEVHTSYAVESSTTLEEIENVDSFVKNLEKIELPNQLIAILGDPLLQKFLLLRPQSDAHRRACNWLQSYAQDVVNGDSDIHFVDILQTLQIFNLPPVMLSFFRELLNAWDGKDGKNLVLDILTFTPILRFEELMTGILLPLERKMLDGTSQSQLQLLHFFAEFLRRWNVQLKSADSKPAHASETAAQLIAHTNNLCLTLLQTSPDVSSRAAILDFYDHASSFASDTHLLRQPNNGSIPPAPLVYALFFAPSPITASRVCSVVAKYKEGFQLAMNATGATSTPRHIAEYNSFLMDICNCLWRSRAFSDKDTSANGCLMSRPLVNDLSTYVESLSTGGTLATLFSLSYSPTFGLFAISHLREVEENELENGSEGLDVRHAGPVTRKTLSTLASRGGVRLAWDDYRLGVLNHLDSQGMDGVGQLLSNTMTTLMQRKPALQAS

SEQ ID NO: 20606 - DNA, 5664 bp, Muscodor strobelii; identical to SEQ ID NO: 20603
  misc_feature: SGI EST ID NO. CUFF.48442.0
  misc_feature: Variant of the nucleotide sequence at SEQ ID NO 20604

SEQ ID NO: 20607 - DNA, 1656 bp, Muscodor strobelii
  misc_feature: SGI cDNA ID NO. 566959
  misc_feature: Encodes the peptide sequence at SEQ ID NO 20608
atgctgatcttcgagaacagaacacttgtttcatggaggtcggggttgtctggaaaccgattaacttttacggaaatgattacaggccaactcgcctcgacagctggaaatcgtggaggtccccgtcagtcccaactcacagcaattcgagaccatcaagcatgcattccattaagcaacttgctcgaggacgatgacattatcctggtcctatccccggtcgtcgtcccgctgacactcaatactgatcatgacagcaccgatccctttgagccatttggtcgagcattggcctcaaaacacccatggatccggcatgttccatacactgctcgcaatggaataacagagacgcatagagagtttatcaagcgagcaaaggcaatcatcttcattgtatctggtgcatcaacatctgggcaattatcgcaggtcgagattgctcaggcggctcaaaatgcttcagatggcagacactttatagttgttgcatgtagtcattttgaagagctcggggctctggaagttgatttcccgactgttgtacaattgtcagactgcttgccaacaggcttaaaggcagctgcagcgatgttattcggcgaaacgaccggaacttctgcgagtggcgtgaaggtacaagaacttattatgacgcccaaattttggccccctgaaggttgggaggaacaggacgttacacctattcatgatctctggaatcaatgtctgccgaaaaaattccatcttgaaaggtacccgttgcaaaacttgctccagcgtgacgggtatgccatgcattttgtggtccgacttccagaatctcgcgagataatagggttctgtgcgacttatacgacattcgtggacaaagctggagagcgcctaattgggtcgctcgccatgttgattgtgaaatccccgtatagaagacgaggagttgggctaagtctatatgagcacgccgaaaagcaactcaaaaggattagaggtgtagatcggatccagctgggctctacatatccgcggatgttgagcggcataccagtgggcttcccttcggtggcatggtttcagaggcgcggctggctcatggatggtcatactccaggccgtggacaatacgtctgcgactggctgttgaaggttgaagattggccagatggaggcttctctgcaatcccctccgggttatcgtaccgccaggggacgtttgacgattttcaaccagtattggattttgtcgagagggagacagccagtaaaggccacactggctggttcgatcaatatatgaatctcgcccacgacggaagattgaacgacattattttagggcttgatcgaacacgaattgttgcgactgcgttggtatacacgatgtacgacggtagtccgttagcattggatcttccttgggcgcgtacaattggccctgacgttggaggtgtgacttgtatttgcattgcagacgactgtggttctatgacaagtagtaaggatactgttatgatcaggttactcgatgcttgcatcacggtgcttaagaatcaaggcatgaaacatatctaccttgacgcgattaaaggtggtgatgagggattccagtcaatgggtaagagtcttgacgttcaacaactccgagttgtcatctag

SEQ ID NO: 20608 - protein, 551 aa, Muscodor strobelii
  misc_feature: SGI Peptide ID NO. 566959
  misc_feature (270)..(364): Pfam Id: PF00583 Pfam Desc: Acetyltransferase (GNAT) family
  misc_feature (270)..(338): Pfam Id: PF00583 Pfam Desc: Acetyltransferase (GNAT) family
  misc_feature (47)..(539): NCBI GI: 171694027 Blast Desc: protein product [Podospora anserina] gi|170946962|emb|CAP73766.1| protein product [Podospora anserina]
  misc_feature (47)..(458): NCBI GI: 164426534 Blast Desc: NCU04132 [Neurospora crassa OR74A] gi|16944419|emb|CAC28774.2| [Neurospora crassa] gi|157071374|gb|EAA32052.2| [Neurospora crassa OR74A]
  misc_feature (42)..(482): NCBI GI: 116198041 Blast Desc: CHGG_07176 [Chaetomium globosum CBS 148.51] gi|88178455|gb|EAQ85923.1| CHGG_07176 [Chaetomium globosum CBS 148.51]
  misc_feature (51)..(489): NCBI GI: 256730959 Blast Desc: NECHADRAFT_48659 [Nectria haematococca mpVI 77-13-4]
  misc_feature (49)..(490): NCBI GI: 145602632 Blast Desc: MGG_09522 [Magnaporthe grisea 70-15] gi|145011023|gb|EDJ95679.1| MGG_09522 [Magnaporthe grisea 70-15]
  misc_feature (44)..(489): NCBI GI: 46125579 Blast Desc: FG07167.1 [Gibberella zeae PH-1]
  misc_feature (113)..(544): NCBI GI: 154290804 Blast Desc: BC1G_15441 [Botryotinia fuckeliana B05.10] gi|150847392|gb|EDN22585.1| BC1G_15441 [Botryotinia fuckeliana B05.10]
  misc_feature (112)..(544): NCBI GI: 156064013 Blast Desc: SS1G_00014 [Sclerotinia sclerotiorum 1980] gi|154690876|gb|EDN90614.1| SS1G_00014 [Sclerotinia sclerotiorum 1980]
  misc_feature (47)..(446): NCBI GI: 261354836 Blast Desc: conserved [Verticillium albo-atrum VaMs.102]
  misc_feature (43)..(538): NCBI GI: 119484098 Blast Desc: beta-N-acetylglucosaminidase, [Neosartorya fischeri NRRL 181] gi|119410108|gb|EAW20055.1| beta-N-acetylglucosaminidase, [Neosartorya fischeri NRRL 181]
MLIFENRTLVSWRSGLSGNRLTFTEMITGQLASTAGNRGGPRQSQLTAIRDHQACIPLSNLLEDDDIILVLSPVVVPLTLNTDHDSTDPFEPFGRALASKHPWIRHVPYTARNGITETHREFIKRAKAIIFIVSGASTSGQLSQVEIAQAAQNASDGRHFIVVACSHFEELGALEVDFPTVVQLSDCLPTGLKAAAAMLFGETTGTSASGVKVQELIMTPKFWPPEGWEEQDVTPIHDLWNQCLPKKFHLERYPLQNLLQRDGYAMHFVVRLPESREIIGFCATYTTFVDKAGERLIGSLAMLIVKSPYRRRGVGLSLYEHAEKQLKRIRGVDRIQLGSTYPRMLSGIPVGFPSVAWFQRRGWLMDGHTPGRGQYVCDWLLKVEDWPDGGFSAIPSGLSYRQGTFDDFQPVLDFVERETASKGHTGWFDQYMNLAHDGRLNDIILGLDRTRIVATALVYTMYDGSPLALDLPWARTIGPDVGGVTCICIADDCGSMTSSKDTVMIRLLDACITVLKNQGMKHIYLDAIKGGDEGFQSMGKSLDVQQLRVVI

SEQ ID NO: 20609 - DNA, 4551 bp, Muscodor strobelii
  misc_feature: SGI EST ID NO. CUFF.48375.0
  misc_feature: Variant of the nucleotide sequence at SEQ ID NO 20607
gcaacattgctgtgttatcatgtgcctctagcccctcgtcgggcttgtgttcatgcctggatggctagatttttctgcgtaaccatgcttgcggcgaactttggaattttgtaatgtttcttcccacggccttacctttccgtgctccgcaaattcagtaagcgtgccttttacgacggcttatttgaactacgcctctcgtcactcccgggttaagtagtattgtatgtaagttcgcttgcatcgtagacttgagagtgaaaatacgaaaaagaaagtattgttcttgactatcccttgcccactactcgctctactgctaaacatccctcttcaaatcgagtcattaccggactcacgctcccctatcctgctgccaattcttctcgccgcgcgcttgctgaataaagtcattgccggaaacaaaactattgaccagggtttgtgcgtcatcaaaactattggtcagacttgtcatcttttctattgcagcacacgagctgcgcctttacctacagccgtgcgattcaatcgaattttatttcggatgcgcgtatgagataggacctcatctgaagtggctcaacgacgtgtctgcaatgaggaagctcacctgaccatgcgcatattctaaaatctaactcaaggcgttttcgaacacttgtttcatggaggtcggggttgtctggaaaccgattaacttttacggaaatgattacaggccaactcgcctcgacagctggaaatcgtggaggtccccgtcagtcccaactcacagcaattcgagaccatcaagcatgcattccattaagcaacttgctcgaggacgatgacattatcctggtcctatccccggtcgtcgtcccgctgacactcaatactgatcatgacagcaccgatccctttgagccatttggtcgagcattggcctcaaaacacccatggatccggcatgttccatacactgctcgcaatggaataacagagacgcatagagagtttatcaagcgagcaaaggcaatcatcttcattgtatctggtgcatcaacatctgggcaattatcgcaggtcgagattgctcaggcggctcaaaatgcttcagatggcagacactttatagttgttgcatgtagtcattttgaagagctcggggctctggaagttgatttcccgactgttgtacaattgtcagactgcttgccaacaggcttaaaggcagctgcagcgatgttattcggcgaaacgaccggaacttctgcgagtggcgtgaaggtacaagaacttattatgacgcccaaattttggccccctgaaggttgggaggaacaggacgttacacctattcatgatctctggaatcaatgtctgccgaaaaaattccatcttgaaaggtacccgttgcaaaacttgctccagcgtgacgggtatgccatgcattttgtggtccgacttccagaatctcgcgagataatagggttctgtgcgacttatacgacattcgtggacaaagctggagagcgcctaattgggtcgctcgccatgttgattgtgaaatccccgtatagaagacgaggagttgggctaagtctatatgagcacgccgaaaagcaactcaaaaggattagaggtgtagatcggatccagctgggctctacatatccgcggatgttgagcggcataccagtgggcttcccttcggtggcatggtttcagaggcgcggctggctcatggatggtcatactccaggccgtggacaatacgtctgcgactggctgttgaaggttgaagattggccagatggaggcttctctgcaatcccctccgggttatcgtaccgccaggggacgtttgacgattttcaaccagtattggattttgtcgagagggagacagccagtaaaggccacactggctggttcgatcaatatatgaatctcgcccacgacggaagattgaacgacattattttagggcttgatcgaacacgaattgttgcgactgcgttggtatacacgatgtacgacggtagtccgttagcattggatcttccttgggcgcgtacaattggccctgacgttggaggtgtgacttgtatttgcattgcagacgactgtggttctatgacaagtagtaaggatactgttatgatcaggttactcgatgcttgcatcacggtgcttaagaatcaaggcatgaaacatatctaccttgacgcgattaaaggtggtgatgagggattccagtcaatgggttttcaaaaatgggaaatttatagcgaaaattggcgtccagcctgatgaaaccagcttttacataggctgctccatatcagtatgagccaattgctcgaaattcgcaggggacgaggctctgtgtttacatatacattgcagtgcccgacttacttttatcgagtaccacggtctgccagacgcggctcaagaaaggttttgctattacctcgagctccagtgtctgcgagcgttcaagactgtcgcttgctgtcaaacattcacaggtgcaacactcgagttatctacacgcgaagtttcgcacattgccgccatcgaatatggtgctgtcgcccatgaattagaatattatatatacccaactttcaatgagaactttatgtacgttgagaagacaacaagaaattaacatgttttagacatgatcctcgctccctgcagacaatgaagagcgtcaatgccgcttatacctcccagcttcgaatgaactgcacactctgttaggcccattattgggcatctcagagcatgtatacagcttatgggtgccttagaacgaaattgagccctgtgttcaaatcctgcggcgcaatattgcgcatcacctgttgcaggcatcgcatgttcctgtcacccgcatcttggcacacgcccatatctcttgtccggctcatagggttgagcgggggttcgtgggggccaaatgcccaacgcaatctaagattcctcgaatgtacaatcatgaatggagggacggcagtcgatcgccgaagccaataattaccaagatcgaaggttctctctccgaccgtcctcaggcagcatagagggaatcagctattgcgtgaggtaagacacagcggacacagatgtgatgtgaccagtaaaccctgcgatcggaaatttattgagcctttgcttcttctacgcattctagaatcgcctctgcaatgactcctgagttcaagggttcttcaccatcgctactataaagcgtgaacacaactttagccgaaactctttcatcgttgtacatggggtcactcctttcgcgctccctgacattatcgattgttttcagcttagtatcgctgcatgtcagcatcagaattataggttggacgaatcaagtcatttccagagtcgcagcgacgatttctcgatactgtctttgtctcacccttgccaggccagcttgtgatgcaggagttggattatacatcatcaggacgcatacataggttcactgcgcctgatgcggcgtttagaagacgacctccactgatgagtgacggcgagtgccgggaacttctggttactggacagaggtgatgtaccacggctgcaatttgtcacgcgccagaatatgactctcggggtagcacaacacggcgacaacctgcgttgcatgcatggaacaatcttgccgtcgggccagaataattcccttttctccatcaattctgaatttatgtatttagttcgtatgaattttcttcgcatacgcatgtcacgatcaggtctcacctaatttgcggacagtacaaagtccttaaatttactgagtctttcatgtactgattgcttacacggtataaggcaacgctcacaaagcaatactgaagcggcccttccagcatgaactgacgtcattggaaactagcgacttagaatagtcgttcgaacatgtttcgggtattattgagagcaactatatgtcaggatcttacatttgcccaccacaccccagcgcaaatcgtgcgtcagacagttgacgatttttgtctattacaatttcgtcttagtttccagctatctacgatacaacaaattttatagtacgcttgtgtcatcaatagtctttatgacccgttacctgatttctcgagttcaaagtcatgcagcctctcggaacaccgttctagaagaactggccaattcgacatgctgttcttgtactttctttttgtatcaaataggcgtcttcaggtcaagaaagcatgtgtactctcgaactatcgttccctgctataagcatgcagccaagatgatatgcatgccgaataagcctgaaccgtttccgaacctccgtagtgatcgaacccgagtcagtcccatgacataatcccgacagagacggcattacttcaacggctgatagatattaagataacccttgatgacatacagatagatttgtgtacagattaaagacattttaacccccaatcccatcagggccgaaaattaagctaagcttaaatgactcgagtctgtcatcaagttgcgatcataatc

SEQ ID NO: 20610 - DNA, 270 bp, Muscodor strobelii
  misc_feature: SGI cDNA ID NO. 566960
  misc_feature: Encodes the peptide sequence at SEQ ID NO 20611
atgtcgcagtccacacgcgaagcctcggaggacgaacttgccaggtttcaagagttcgtcgacacgccgcatagcactcgtcttcgtttctacggccctgctcctctaatcggcactcccgctatgcgtgcacctttcccctactctttcattgagacaatggacacagagctttctggttccgaggccgacgtggacaagacagagctgcgaatccagacgaaagatcgcgtccagatggccttcaaaaaagagagcatcggcacttag

SEQ ID NO: 20611 - protein, 89 aa, Muscodor strobelii
  misc_feature: SGI Peptide ID NO. 566960
MSQSTREASEDELARFQEFVDTPHSTRLRFYGPAPLIGTPAMRAPFPYSFIETMDTELSGSEADVDKTELRIQTKDRVQMAFKKESIGT

SEQ ID NO: 20612 - DNA, 1596 bp, Muscodor strobelii
  misc_feature: SGI cDNA ID NO. 566961
  misc_feature: Encodes the peptide sequence at SEQ ID NO 20613
atgcgcttcgtgtcaaagtcaaattcaaaacgcggctcagctggcctcgaagttggctaccatgttccatccttagcccatggccatgtcatcaccaggctaggacgaaatgccgatctaatcctccccaggagcaccccaaatgatcgcctgtctgcgatacacgttgcctttgagatcaatcccgcgacgaatctcataataatatctgtccgctcaaagcgggcctcatctgtctggttcagcgagctccccagggagaaagccagtacagcgagttccccaaatgattcgagagatgcgtcacctcttgaacaagaagcgcaggaagacggcacctcggcacaaaaaatcattggtgacggtgttctcctatacgcacataactacaagctctctatctcatcctatcgtttcaaactgtactggctaggggaaaaagaagacgcactcaaagccctagcgattagcggcttccaagaatctttgaaattactaaaggacataaggtcgcgcgatcgccccacagaatatgatgattctgaagcattatcatggcacgtaactaggctgaacactacaaaggctcatcttttcgaggatatctcaaagcttcgcgagattgagggccatgggagctttggcgaggtctacaaagccgttgatcgaataacgggccatccatttgctgtgaaagtgatcgatctgcaaaagtatggcgacactaatgtggcacgagcccaaatacatagggaaataaaggccatggaaagactgcaccatacacatatcatcgagtatttgggtcagcaacacttcgacaccgattctccagagatattcatgccactgagagaaggctccctcacatcgtatgtgaagactgacttcaagggtaatatcaatgaccttttcgcttgccagaacgattgcaacgtcgtagctaggcagagccccaagttggatatatggtctctctacgcaactatcgttgccatcggctgtggcttcaatgggttcccgccgatgacttctgaatatctcgctgtactaaagatactgcggggcaaggctcaaactcaaaccttacaacttaggcccatggcagagctgcatccagacgaccgtgcctcggctgctgagatgcttgtctacattggtgagaccaagggtttgacaacacctctatcgaaagttgcccgcatcaaagccgccgagcctaatgctagcttccaagggagacggtcgatcgcccgagacgtatcgcttccctcgacgctacaggatagaaatgttggcaacagtagcatttctcaagcggagacaaataaaggcccgttgatcgtttatccaccacgcctccctcgtgcagctgctgcccggcctgttcctcgggtatcacctgtcatggccaaccggggaggcagccccccgcgacccgtcactgcccagccatcgccacttcgtgcgcacagagctggcgtagcgaagcgccgatcgacgagagcaatagctggccatcaaactgccgctacggaagacgctacagaggaagcgccggagcaaagcagtgccactcctcggccccatgagtaa

SEQ ID NO: 20613 - protein, 531 aa, Muscodor strobelii
  misc_feature: SGI Peptide ID NO. 566961
  misc_feature (202)..(269): Pfam Id: PF00069 Pfam Desc: Protein kinase domain
  misc_feature (202)..(269): Pfam Id: PF07714 Pfam Desc: Protein tyrosine kinase
  misc_feature (16)..(399): NCBI GI: 239615004 Blast Desc: conserved [Ajellomyces dermatitidis ER-3]
  misc_feature (16)..(399): NCBI GI: 225561701 Blast Desc: STE family protein kinase [Ajellomyces capsulatus G186AR]
  misc_feature (123)..(399): NCBI GI: 258569955 Blast Desc: [Uncinocarpus reesii 1704] gi|237904051|gb|EEP78452.1| [Uncinocarpus reesii 1704]
  misc_feature (12)..(294): NCBI GI: 255940176 Blast Desc: Pc16g05100 [Penicillium chrysogenum Wisconsin 54-1255] gi|211585480|emb|CAP93180.1| Pc16g05100 [Penicillium chrysogenum Wisconsin 54-1255]
  misc_feature (16)..(403): NCBI GI: 225563286 Blast Desc: conserved [Ajellomyces capsulatus G186AR]
  misc_feature (16)..(403): NCBI GI: 240275875 Blast Desc: CAMK kinase [Ajellomyces capsulatus H143]
  misc_feature (16)..(399): NCBI GI: 261187980 Blast Desc: tyrosine protein kinase:Serine/threonine protein kinase [Ajellomyces dermatitidis SLH14081] gi|239593418|gb|EEQ75999.1| tyrosine protein protein kinase
  misc_feature (204)..(309): NCBI GI: 119196071 Blast Desc: [Coccidioides immitis RS]
  misc_feature (204)..(383): NCBI GI: 114624508 Blast Desc: : maternal embryonic leucine zipper kinase isoform 1 [Pan troglodytes] gi|114624510|ref|XP_001168745.1| : maternal embryonic leucine zipper kinase isoform 2 [Pan troglodytes]
  misc_feature (204)..(399): NCBI GI: 240275304 Blast Desc: protein kinase [Ajellomyces capsulatus H143]
MRFVSKSNSKRGSAGLEVGYHVPSLAHGHVITRLGRNADLILPRSTPNDRLSAIHVAFEINPATNLIIISVRSKRASSVWFSELPREKASTASSPNDSRDASPLEQEAQEDGTSAQKIIGDGVLLYAHNYKLSISSYRFKLYWLGEKEDALKALAISGFQESLKLLKDIRSRDRPTEYDDSEALSWHVTRLNTTKAHLFEDISKLREIEGHGSFGEVYKAVDRITGHPFAVKVIDLQKYGDTNVARAQIHREIKAMERLHHTHIIEYLGQQHFDTDSPEIFMPLREGSLTSYVKTDFKGNINDLFACQNDCNVVARQSPKLDIWSLYATIVAIGCGFNGFPPMTSEYLAVLKILRGKAQTQTLQLRPMAELHPDDRASAAEMLVYIGETKGLTTPLSKVARIKAAEPNASFQGRRSIARDVSLPSTLQDRNVGNSSISQAETNKGPLIVYPPRLPRAAAARPVPRVSPVMANRGGSPPRPVTAQPSPLRAHRAGVAKRRSTRAIAGHQTAATEDATEEAPEQSSATPRPHE

SEQ ID NO: 20614 - DNA, 2754 bp, Muscodor strobelii
  misc_feature: SGI EST ID NO. CUFF.48355.0
  misc_feature: Variant of the nucleotide sequence at SEQ ID NO 20612
ctaacccgtcaggcctcataggcgcctgcatgatatgagttctcaagcaagagcttcgatcaactcgcatcatctcccatctatcttcataatagcgcctttcaatgtcagtattgaggatgatactttgttgtcacgcaaatcgcggatcagccggcatggccgcgcccgtctctcctcggaccatacatcgttgtgctggtattggataaaatcgcatcatcagatttgtccatttgtgagaccgctgaaacagcacttcgccgtcctgtaggctgagcattgaaataacactgaacaccaacttgtgctagccgacgacgacgcatttcatttgcaagatgcaatgtccgctgttcccacaactgtctccctttacttcctcccggagcgttctcctgcttgtctctttcttgtataactacagttcgcatgtttcataaagaacttatacttatccaaacatcacacggaatgcttctcatatcgtgagaatccacagttttgaaatacattcggaatacatttagacaagcccacgactgaatccagtgatgtcttcaactcctcatccaaaaacactcttccacctggtaccagcgaatcaaatcgcccgtgacaccctgcttcatccggacaatatgcgcttcgtgtcaaagtcaaattcaaaacgcggctcagctggcctcgaagttggctaccatgttccatccttagcccatggccatgtcatcaccaggctaggacgaaatgccgatctaatcctccccaggagcaccccaaatgatcgcctgtctgcgatacacgttgcctttgagatcaatcccgcgacgaatctcataataatatctgtccgctcaaagcgggcctcatctgtctggttcagcgagctccccagggagaaagccagtacagcgagttccccaaatgattcgagagatgcgtcacctcttgaacaagaagcgcaggaagacggcacctcggcacaaaaaatcattggtgacggtgttctcctatacgcacataactacaagctctctatctcatcctatcgtttcaaactgtactggctaggggaaaaagaagacgcactcaaagccctagcgattagcggcttccaagaatctttgaaattactaaaggacataaggtcgcgcgatcgccccacagaatatgatgattctgaagcattatcatggcacgtaactaggctgaacactacaaaggctcatcttttcgaggatatctcaaagcttcgcgagattgagggccatgggagctttggcgaggtctacaaagccgttgatcgaataacgggccatccatttgctgtgaaagtgatcgatctgcaaaagtatggcgacactaatgtggcacgagcccaaatacatagggaaataaaggccatggaaagactgcaccatacacatatcatcgagtatttgggtcagcaacacttcgacaccgattctccagagatattcatgccactgagagaaggctccctcacatcgtatgtgaagactgacttcaagggtaatatcaatgacctttgtaaggttgtgctggtgcagatgctcagcgccctcgactacttagcaaacaacagatttattcatagagacttgaagcccgacaatatcctcttctacaaagagcccgacagcgtgtggccccatttccaacttgctgacttcgggctagcccatcatcagtcgcttgccagaacgattgcaacgtcgtagctaggcagagccccaagttggatatatggtctctctacgcaactatcgttgccatcggctgtggcttcaatgggttcccgccgatgacttctgaatatctcgctgtactaaagatactgcggggcaaggctcaaactcaaaccttacaacttaggcccatggcagagctgcatccagacgaccgtgcctcggctgctgagatgcttgtctacattggtgagaccaagggtttgacaacacctctatcgaaagttgcccgcatcaaagccgccgagcctaatgctagcttccaagggagacggtcgatcgcccgagacgtatcgcttccctcgacgctacaggatagaaatgttggcaacagtagcatttctcaagcggagacaaataaaggcccgttgatcgtttatccaccacgcctccctcgtgcagctgctgcccggcctgttcctcgggtatcacctgtcatggccaaccggggaggcagccccccgcgacccgtcactgcccagccatcgccacttcgtgcgcacagagctggcgtagcgaagcgccgatcgacgagagcaatagctggccatcaaactgccgctacggaagacgctacagaggaagcgccggagcaaagcagtgccactcctcggccccatgagtaataatggaaatcgtcagctgccttaattacagtaactcgatgtcaaacttaatggtcggtctctggggacatgtacttatcaccgctgaaaacaacatgatgacctcagaactcctgctgattaggcatacttgtctcgtgaaccaagacgtcctttgtccgacgcgacctcgcgacttgacaatcgtgagctttactaggcgtataacgctttatcatcagcactgtattcggaccgaaagagaccattgcctcaataaagcacgtgcctgctcatcataggcactgtatctttgctccaacaaataagtaagtttgtcatgagcgcagaggcccccatttcagggtatatttgca

SEQ ID NO: 20615 - DNA, 1698 bp, Muscodor strobelii
  misc_feature: SGI cDNA ID NO. 566962
  misc_feature: Encodes the peptide sequence at SEQ ID NO 20616
atgcctcgcttcttcgatcccgtccagctacacgctgctttacggcgccaagctgtgcctgctctcgaggcagtcgctgccaacgagcacctccgcggccgccgcttcgaccgcaacagccccccgccctacgtctcctcgaccgagtccgagctcgacgaagccgatctgtttccgccgcccgtgatctggcccatcccccaagacctgcaagatgtcatgaaccagcccctcaccgacgaggacctcgacgacatctccgagtccctcgacgagctgctcgcccccgagaatctttactacaaagcagcaaagcccgaagaccgccgcgtcgactcggcccgtcctggtcctcgaccccttttcttccggggactggcgggcatacggcggtcaggagtcctcgtccgtcacactgtgaaacgccgttgggagaagcttggtatctggaaccccgattgggggtttgccggccgtcaccaagagccacgcgacgattatcacgagtgggagtggagctgggagtctggtgtcgaggccacacccgccaacgttccccgacaccgtcatctatatcaccgccggtgcgacctagtggaacgggttttgcgtcaacgtcagaatctgcgacggggcgagcatgtcccctctgcaccgctgtcctgccccggcccagatgcaactgcggctcagggcgacgccttcctcacatctcggccgtggttccaattcgccatcgaatgcgctgaagaacgccaaaggcatgatcgcctggccgactacggcgatctcagacagtacccatactcgcccaagaagcaggtgatccggcggtggaaggagcgtggacactggaggcgggactccgaccgggttcaagcggtgacagcctggaagtggccgcatgaatctccctcgccagagcccgaggacctcacgcccattgcccacatccgagatacaccactggaagcggctgagactatgcattttaccccttccgagattgacgagctcgagacaatcgactcgcggcgctctgaagaacccggcgactcctggctcatcaagccggacaaccatcgtccaccctttccgggacaaatggcggatcccaggcggtgtcgggacgagagccccaagattccggcgtctacgtcccttgttggccgaaaggagacaagactgacatccttcccagaactccaagctgctgcatccgatgctcagtcaggcaaatcttgctcagcaccacgtagccaacgggtcttgcatcgtcgcccacttccaagtactaaaggcccccgaggcacgggccatcccgtctatccaccactccgacgcagtgcacggattgcggccatgaggcgtgctgctgacaactcgactccagctctggcaccaaccagaaaacgaaagagcagagatgacccgaaagctgcacccggtgtccctcaaccgcctgtacgcgagctgcgtcgcactagggcaacagtcgttgttgaacaagagccacagtcaaaggagagtcgtgcaaaaagggggaatagacggagcacccgctcttcttcgaacaagacggagacggaaaataaggccgcttcggctgtatctgccactcggttggctgcgaatgggagtgagtctgttgttcaaaagcgtagaagagggagaccgaggaagtatgaacaatcgtag

SEQ ID NO: 20616 - protein, 565 aa, Muscodor strobelii
  misc_feature: SGI Peptide ID NO. 566962
MPRFFDPVQLHAALRRQAVPALEAVAANEHLRGRRFDRNSPPPYVSSTESELDEADLFPPPVIWPIPQDLQDVMNQPLTDEDLDDISESLDELLAPENLYYKAAKPEDRRVDSARPGPRPLFFRGLAGIRRSGVLVRHTVKRRWEKLGIWNPDWGFAGRHQEPRDDYHEWEWSWESGVEATPANVPRHRHLYHRRCDLVERVLRQRQNLRRGEHVPSAPLSCPGPDATAAQGDAFLTSRPWFQFAIECAEERQRHDRLADYGDLRQYPYSPKKQVIRRWKERGHWRRDSDRVQAVTAWKWPHESPSPEPEDLTPIAHIRDTPLEAAETMHFTPSEIDELETIDSRRSEEPGDSWLIKPDNHRPPFPGQMADPRRCRDESPKIPASTSLVGRKETRLTSFPELQAAASDAQSGKSCSAPRSQRVLHRRPLPSTKGPRGTGHPVYPPLRRSARIAAMRRAADNSTPALAPTRKRKSRDDPKAAPGVPQPPVRELRRTRATVVVEQEPQSKESRAKRGNRRSTRSSSNKTETENKAASAVSATRLAANGSESVVQKRRRGRPRKYEQS

SEQ ID NO: 20617 - DNA, 2400 bp, Muscodor strobelii
  misc_feature: SGI EST ID NO. CUFF.48359.0
  misc_feature: Variant of the nucleotide sequence at SEQ ID NO 20615
cgcggttcggttgacatgagttgtcgggttatgattatcatcaatcttgtattatttggtcttgtacccgtaatggcattcggtggttcaattccttgactcctgcccacattccctagcgcgttgcggcactggacggtgcaccggaccacatacctatgaccgtagcacatgcaaacacatcaatcgacgtctctgaaacgaacctgcctcgcctcccccccgcgaccacctcgtctatccgtgtttggccagcacctgccaactcattgtatcgccggttctgctgcagtgagccgcactggcgcccggtctcgaagctttgatcggctccctttcgctctcatccttcaccctcgtccccgcgcaaagcgatgttgcgcagtcatgttgcacacgcgctacacagattacctatacggtatcgtgacagatgacagatcgtccgggcgtctccagccactcgttgcggcgccctgctctggaatgggtgaccctcttcacctcttccaagcacgctcgtagcacgttcgtagcatctgcctggcatcaaccctcctccagcctcgccaccgctctccatcgccctccatcgccccccatcctgccgaactgcctgcctgcctgccgccatgcctcgcttcttcgatcccgtccagctacacgctgctttacggcgccaagctgtgcctgctctcgaggcagtcgctgccaacgagcacctccgcggccgccgcttcgaccgcaacagccccccgccctacgtctcctcgaccgagtccgagctcgacgaagccgatctgtttccgccgcccgtgatctggcccatcccccaagacctgcaagatgtcatgaaccagcccctcaccgacgaggacctcgacgacatctccgagtccctcgacgagctgctcgcccccgagaatctttactacaaagcagcaaagcccgaagaccgccgcgtcgactcggcccgtcctggtcctcgaccccttttcttccggggactggcgggcatacggcggtcaggagtcctcgtccgtcacactgtgaaacgccgttgggagaagcttggtatctggaaccccgattgggggtttgccggccgtcaccaagagccacgcgacgattatcacgagtgggagtggagctgggagtctggtgtcgaggccacacccgccaacgttccccgacaccgtcatctatatcaccgccggtgcgacctagtggaacgggttttgcgtcaacgtcagaatctgcgacggggcgagcatgtcccctctgcaccgctgtcctgccccggcccagatgcaactgcggctcagggcgacgccttcctcacatctcggccgtggttccaattcgccatcgaatgcgctgaagaacgccaaaggcatgatcgcctggccgactacggcgatctcagacagtacccatactcgcccaagaagcaggtgatccggcggtggaaggagcgtggacactggaggcgggactccgaccgggttcaagcggtgacagcctggaagtggccgcatgaatctccctcgccagagcccgaggacctcacgcccattgcccacatccgagatacaccactggaagcggctgagactatgcattttaccccttccgagattgacgagctcgagacaatcgactcgcggcgctctgaagaacccggcgactcctggctcatcaagccggacaaccatcgtccaccctttccgggacaaatggcggatcccaggcggtgtcgggacgagagccccaagattccggcgtctacgtcccttgttggccgaaaggagacaagactgacatccttcccagaactccaagctgctgcatccgatgctcagtcaggcaaatcttgctcagcaccacgtagccaacgggtcttgcatcgtcgcccacttccaagtactaaaggcccccgaggcacgggccatcccgtctatccaccactccgacgcagtgcacggattgcggccatgaggcgtgctgctgacaactcgactccagctctggcaccaaccagaaaacgaaagagcagagatgacccgaaagctgcacccggtgtccctcaaccgcctgtacgcgagctgcgtcgcactagggcaacagtcgttgttgaacaagagccacagtcaaaggagagtcgtgcaaaaagggggaatagacggagcacccgctcttcttcgaacaagacggagacggaaaataaggccgcttcggctgtatctgccactcggttggctgcgaatgggagtgagtctgttgttcaaaagcgtagaagagggagaccgaggaagtatgaacaatcgtagaaggacgtgctgtagtgcaccgtcagctatgacggagcttcttacggaggtgagactggtgatcatggaa

SEQ ID NO: 20618 - DNA, 615 bp, Muscodor strobelii
  misc_feature: SGI cDNA ID NO. 566963
  misc_feature: Encodes the peptide sequence at SEQ ID NO 20619
atgatcctgatagatctcaccatgctaaccctctatatatcaagtatttcgatcacggttctagattggcatgaagttgccaaagaaattcgaccaaccagattcaatcgacccggacgactgcctcccaaagatgcacacattggcccaggacagtatggcataaactggcacatggacgaggcccagagtctgcgcaatgagcagaacatactcgaccgcatccttcgcatgctacccttcacgaagttctgcccgatgtcagcaactactacactgaactctataagggatctttgtgggcattgcgctatcttcttgaagttgtctaaacccgctgtcggctacgacctagatatcaacgaagtagctgatccgcacttcgaggtgtcggacccgcgcaagaaaaataacttctgggctgctgataaagctgcgggcgtcaaaacgccagcagaacagcgcaactatgacaaaaatctggcgaagcatggaaaagcatacgctgataaacggcatcaagtcgcgctgaatttgcaaatggctaacgccgataaactggagcggttgaaacagaagatggacgaaatgcctctggggatttctacaagctag

SEQ ID NO: 20619 - protein, 204 aa, Muscodor strobelii
  misc_feature: SGI Peptide ID NO. 566963
MILIDLTMLTLYISSISITVLDWHEVAKEIRPTRFNRPGRLPPKDAHIGPGQYGINWHMDEAQSLRNEQNILDRILRMLPFTKFCPMSATTTLNSIRDLCGHCAIFLKLSKPAVGYDLDINEVADPHFEVSDPRKKNNFWAADKAAGVKTPAEQRNYDKNLAKHGKAYADKRHQVALNLQMANADKLERLKQKMDEMPLGISTS

SEQ ID NO: 20620 - DNA, 846 bp, Muscodor strobelii
  misc_feature: SGI cDNA ID NO. 566964
  misc_feature: Encodes the peptide sequence at SEQ ID NO 20621
atgacagcgagcggcgatgattcggcggaagaacgcctagaaaacggtgttgccaagactgggaccatcggcgccgataagatactcaccgacgcgcaagtccacaatcactatctgcgggatgacgagattgaagcgggcctgcgaattgtcacatcaactctgaagaacgtctacgtcgccaacgctagctatatcaaaggcacgagcgacccgccgagcataggactcccgcaagcggttattcaaaacatcaaagcggagaaaatcatcaagatatactttccggtgtaccacgaggccgagtccagcatgagatatatgccgttgatgaaggttccaaacttcgaagcgatgaacaatggaggcatatcttggcgatggctgcaactgagtgctgaggcggaaacatggtctgcgagcaagttattgctctggcagtctgacaatggcctagagtcggccaacatggagagcgcaaaactagaaagcatattcgaagagttcctcgccagccagccgggtctagcaccaaatcagaccctaaacaacatcaacaacgatgtcgaaaagaaatttgagaagtttttcagagcgtacatcagaaaaaccatcgaacccaccaaaatcaagacgataataaccacgctccctcggccccgggggggggagactatctcgtctacacgaagcctatatatgcagctagcattcccctacttcatggagcccgagcccacttccaagcgtaccaaaagcaaactcggattcgtccatgcacaactggattcatttgtgatgatggccagtgtccctggtgagccggcgactctgccgtgcctgtga

SEQ ID NO: 20621 - protein, 281 aa, Muscodor strobelii
  misc_feature: SGI Peptide ID NO. 566964
MTASGDDSAEERLENGVAKTGTIGADKILTDAQVHNHYLRDDEIEAGLRIVTSTLKNVYVANASYIKGTSDPPSIGLPQAVIQNIKAEKIIKIYFPVYHEAESSMRYMPLMKVPNFEAMNNGGISWRWLQLSAEAETWSASKLLLWQSDNGLESANMESAKLESIFEEFLASQPGLAPNQTLNNINNDVEKKFEKFFRAYIRKTIEPTKIKTIITTLPRPRGGETISSTRSLYMQLAFPYFMEPEPTSKRTKSKLGFVHAQLDSFVMMASVPGEPATLPCL

SEQ ID NO: 20622 - DNA, 4785 bp, Muscodor strobelii
  misc_feature: SGI cDNA ID NO. 566965
  misc_feature: Encodes the peptide sequence at SEQ ID NO 20623
atgtccccgtcctctggagatggggcgcagtcatcccaggactccaagggcgtcggaggtcttgccagcgtcttcaagggcctcgccggggctgccaagctgaccaagtcctctcccacctctgcacagtcacccgctctgatgacgaaccacgctcacatcgccgagcagctcgatgcactcccggcccgccatgcgctgcccccgcaacatgccggattgttcgaccaactcaagaatggaccgttgccagagcgagtggccgctgcgagtgccctccggaccgtcgttagtgattatcccaggaatccggtactggatatctggtatgcagccaaggacttgattgcgcccactcactccaggccacatcgcactgtgggctgggacctgcttgccgagtgtgtcaagcatccgtcgtcctctgatctcgagcgtaaggaatacttccagaccattactgctcctgccaatccagatgacttccatttgcagcttgcatcgcttgtgaatctgaccaacaagggccgtgatgtctccggattcgactacgacctgtttccccttctgtccaaatggctagactcccagttcgaagtcgctaaggctgcgaggtctgccgccaagaagcaaggttccaggtccaaaggcaaagtcattgctaccaaggaggagagggattttgccgatctgttcgtctttgtggccgacgttatcaagttcaactcggtgattgctgatgacagtgcggccgaggcattggtggatacgctactggaagtctgcttgaaaaccagcaacccggaggatatgcgagcttgcatcagtatcttggatgccatcatcaccttcggagtacttcccggcagcaagctgcaaaaatgtgtccagatattgtcatcgatacattgcgtggttaaggatgcgcaaaaggaggcttggcatacgatgagcatcttgttccggtcacatgacggccaagctaccgtgagagtcctgctcgagatcttgagtggcggtaaaggacctggtgacaagaagaaggaagatgtgcgagaaattcgaggtgctctgtccgtcctcactaaactcgtgtcaaaaagctcggagaaaggctatccactcgttccctatgttgtattggtggatgggctttccaaggtgacagaggccgaatctccgtggaagatttatctggacatgctccgtctgatcaatgctttgttctctgatgcccgaggcagtattaatgcgatgctcacggatgaagactggatgccaatcttggacattgttgtgtcatgttccgctggtgttgtgacgtggttgtctagatccaacaacaccatcaacacgccggatgataccgaaagtcctgagtctttgattgccagagaactctccaagttagttgctcgtttggaagacatcaccaaggagccacagagtgcggtgattcagcgacaagactgcatgaggtttttcatcaaactaaaccctgccctccccgactcagccgctaccctagtactcagttattttcaagaattccgctgttgcttcccctctgatgcgcagtggagaacaaacttggatatggtcctcgacggtttcttcaaggacaggaaacgaaccacacacgtcaggttgcaagccttgcgagctgtcaccgaggtctatgacttactcgagcttgttgacgacgaggtggagcctgacttcgtgatctctcttgtgaaacgcttacttgtcagtgtagctgacgagacagatatcgccgttctgcaagaaatcgtttcatttgcggcaaatgtcgcaacaacgaccagctttcctctattctgtcatatcactgataccctgcaaaagatcgtaggaagcgatcaaacacgtgtagccgcagccgcctcactctctcgcaagtccagcctagcagcactcacggccttcaaactagcaaatactcagacaccagccaatgtggtgacgcggggttttgtacaaatattcctgcgcgtcatggacaacgacgttatcaaatccattcgcatgttcaactcccttgtctctatcgccaaattgaattccaacgagccagatgcccgtgtgtctgctatgagacttctgttccgcctgcgagccgattgggccaatcgcatatttgttaccacccatacagaaacagcccagttagcaactaccttatatcgtactgaagcctcattcacgcggaaagtgtccgaggatgcgtcacaacagagtcggtcgtcgagaagtgaaagcggtggtcgtccaatgcgtggtttgtcattcacgatgactcagacaccagaacgaacttccgcgagccgagtatcgagtggatcaaaggctgacactagtgcatcccctatgttgtggatgtgccctgatctcgacgccctgcctgagtcgccttcgaagtcagctagccccgtgctgtactcaagcctcgacacgtcgtctgaaaatatgggatcagaagggcaggaggctctcctgcctatgggtttttggcttgagactatctcacacttaattcaaaatgggtgcgattgggaggtctacagtttcatcctggttcatcttccatcacaattaagcaaccatgctgtgttcaatactgccgttccccaaattcaagagttacgacgactactctgtgagcagatcaggcagaacacttttcaagaaccaccagctgcatctgtattgcgcaaagctgacgtggcgatatgtctcttccattcacttacaatgatcttgagttaccaccgtcatttccagaagtcggatgaagacgagatcgtggcgacgtttgttcagggcatttcgacgtgggaacgatgtgctaagtgctgtatacacgccctaagcatctgctgccatgaactcccgggctccacaagcaaagccttgatagtcgtcttgcaacgcatggcgcaagtcatcacacaacctcaggtggctatgcatatcttagagtttctcgtaggcttaagtcggttgcccgctctctacatcaatttcagaagagaagaatatacaatggtttttggtatctgtttccgttatctacaatacgtcagaggcaagaagcagagccaaagcaatcggccgaactcgatgggcgacgcactccacggcagattgtcagttgtgccggatactgcgcactcagctactggggacgatcttcctcaatacgtctacacattagcatatcacgtcgtgatcttttggtacctggccttgaaacttccagaccgcgctggtcacgtatcgtggatcgcgaagaaccttttcactgatgtagacgggtctcaggtcgttgatgagcaggctcaaacatcactcgatctcatgcagcgagtgacctacgctgacattaacgagtctatgccagaccctcttttcactcccgagagatttggcgagatcctcaaaaggcattggttgattggtagcagtattgtgacagtcgagcaagccgtcatctcaggctgggcacagatcactaagcggcaaccttccggcacttcgtcttatacgattcgcgaactcgttcgagcccctccgccacatcagcaagctttcgatgtcggcggaagagataacaactctgcgtcgacgaattgcgtcttgccaaatcatctattcgtacaactattgggccctttaccacagtacaatgacatgagtaaaccggttcccctcccgaataatgatgcgatcgatatggccatcagagtctttgaccgcaactcaaccgtggatggacacaaggttggtgtcatctacattggcgaaaatcagaccgacgagttggaaatacttgccaatgtgtccgggagcagtgaatatgtagagtttgtcaacggtcttgggacactaacaaagctcaagggcgctaccttcaacacccagggtctagacagatatacagatcaggatggggaatacacgttctgttggagagacagagtatcggaactggtcttccatgtcacgacgcagatgccgacaaacttggaaactgatccacaatgcatagcgaagaagcgacatatcggtaatgatttcgtcaacataatattcaacgactctggcttccccttcaagttcgacacattcccatcggacttcaactacgtcaacattgtcatcacgccagaatcgcgcgcctcgttcatcgctacgagacagaggactcctaaagatgtacaggattcattctacaaagttcaagtcatgtccaagccaggctttcctgagatttcgccagcggcggagaccaagatcgtctctctaaaagccctgcccgactttactcgtctccttgctctgaacgcctccgtcttctcacacgtatgggccaaccgcgagagcggggagcatatttcttcgtggggcagcaggcttcgcgagatcaaccgcttgcgcgacaaatacgcaccgaagactggtccctcaccctcaccaccggggacgtcacacagccacaacaacggtggcatcgtcaatggtggtgggccacagatcgatgtctcgaggcctgggagtacggtgcgggatagtctaggtagcctgagtcttaggaggtcttcggtcgctacctttttctcgaactcgagcgagcagaattcgcatagtcatcgctcatctttactttcgacgaatacggcgcttactgagggcacggaggtccatgctccgactgctgttgaccatcttgttgagagtttggatttctcgagatgggcttga

SEQ ID NO: 20623 - protein, 1594 aa, Muscodor strobelii
  misc_feature: SGI Peptide ID NO. 566965
  misc_feature (1284)..(1486): Pfam Id: PF02145 Pfam Desc: Rap/ran-GAP
  misc_feature (1284)..(1398): Pfam Id: PF02145 Pfam Desc: Rap/ran-GAP
  misc_feature (1)..(1594): NCBI GI: 46125581 Blast Desc: FG07168.1 [Gibberella zeae PH-1]
  misc_feature (1)..(1594): NCBI GI: 256731333 Blast Desc: [Nectria haematococca mpVI 77-13-4]
  misc_feature (1)..(1594): NCBI GI: 261354837 Blast Desc: tuberin [Verticillium albo-atrum VaMs.102]
  misc_feature (1)..(1593): NCBI GI: 171694029 Blast Desc: protein product [Podospora anserina] gi|170946963|emb|CAP73767.1| protein product [Podospora anserina]
  misc_feature (1)..(1594): NCBI GI: 145607113 Blast Desc: MGG_03993 [Magnaporthe grisea 70-15] gi|145014712|gb|EDJ99280.1| MGG_03993 [Magnaporthe grisea 70-15]
  misc_feature (738)..(1593): NCBI GI: 85099898 Blast Desc: NCU04105 [Neurospora crassa OR74A] gi|21622325|emb|CAD36966.1| related to TUBERIN [Neurospora crassa] gi|28922396|gb|EAA31631.1| conserved [Neurospora crassa
  misc_feature (837)..(1594): NCBI GI: 156065115 Blast Desc: SS1G_00568 [Sclerotinia sclerotiorum 1980] gi|154691427|gb|EDN91165.1| SS1G_00568 [Sclerotinia sclerotiorum 1980]
  misc_feature (68)..(1491): NCBI GI: 189195344 Blast Desc: tuberin [Pyrenophora tritici-repentis Pt-1C-BFP] gi|187979889|gb|EDU46515.1| tuberin [Pyrenophora tritici-repentis Pt-1C-BFP]
  misc_feature (837)..(1594): NCBI GI: 154311501 Blast Desc: BC1G_06603 [Botryotinia fuckeliana B05.10] gi|150851000|gb|EDN26193.1| BC1G_06603 [Botryotinia fuckeliana B05.10]
  misc_feature (68)..(1491): NCBI GI: 169597775 Blast Desc: SNOG_01675 [Phaeosphaeria nodorum SN15] gi|160707585|gb|EAT91324.2| SNOG_01675 [Phaeosphaeria nodorum SN15]
MSPSSGDGAQSSQDSKGVGGLASVFKGLAGAAKLTKSSPTSAQSPALMTNHAHIAEQLDALPARHALPPQHAGLFDQLKNGPLPERVAAASALRTVVSDYPRNPVLDIWYAAKDLIAPTHSRPHRTVGWDLLAECVKHPSSSDLERKEYFQTITAPANPDDFHLQLASLVNLTNKGRDVSGFDYDLFPLLSKWLDSQFEVAKAARSAAKKQGSRSKGKVIATKEERDFADLFVFVADVIKFNSVIADDSAAEALVDTLLEVCLKTSNPEDMRACISILDAIITFGVLPGSKLQKCVQILSSIHCVVKDAQKEAWHTMSILFRSHDGQATVRVLLEILSGGKGPGDKKKEDVREIRGALSVLTKLVSKSSEKGYPLVPYVVLVDGLSKVTEAESPWKIYLDMLRLINALFSDARGSINAMLTDEDWMPILDIVVSCSAGVVTWLSRSNNTINTPDDTESPESLIARELSKLVARLEDITKEPQSAVIQRQDCMRFFIKLNPALPDSAATLVLSYFQEFRCCFPSDAQWRTNLDMVLDGFFKDRKRTTHVRLQALRAVTEVYDLLELVDDEVEPDFVISLVKRLLVSVADETDIAVLQEIVSFAANVATTTSFPLFCHITDTLQKIVGSDQTRVAAAASLSRKSSLAALTAFKLANTQTPANVVTRGFVQIFLRVMDNDVIKSIRMFNSLVSIAKLNSNEPDARVSAMRLLFRLRADWANRIFVTTHTETAQLATTLYRTEASFTRKVSEDASQQSRSSRSESGGRPMRGLSFTMTQTPERTSASRVSSGSKADTSASPMLWMCPDLDALPESPSKSASPVLYSSLDTSSENMGSEGQEALLPMGFWLETISHLIQNGCDWEVYSFILVHLPSQLSNHAVFNTAVPQIQELRRLLCEQIRQNTFQEPPAASVLRKADVAICLFHSLTMILSYHRHFQKSDEDEIVATFVQGISTWERCAKCCIHALSICCHELPGSTSKALIVVLQRMAQVITQPQVAMHILEFLVGLSRLPALYINFRREEYTMVFGICFRYLQYVRGKKQSQSNRPNSMGDALHGRLSVVPDTAHSATGDDLPQYVYTLAYHVVIFWYLALKLPDRAGHVSWIAKNLFTDVDGSQVVDEQAQTSLDLMQRVTYADINESMPDPLFTPERFGEILKRHWLIGSSIVTVEQAVISGWAQITKRQPSGTSSYTIRELVRAPPPHQQAFDVGGRDNNSASTNCVLPNHLFVQLLGPLPQYNDMSKPVPLPNNDAIDMAIRVFDRNSTVDGHKVGVIYIGENQTDELEILANVSGSSEYVEFVNGLGTLTKLKGATFNTQGLDRYTDQDGEYTFCWRDRVSELVFHVTTQMPTNLETDPQCIAKKRHIGNDFVNIIFNDSGFPFKFDTFPSDFNYVNIVITPESRASFIATRQRTPKDVQDSFYKVQVMSKPGFPEISPAAETKIVSLKALPDFTRLLALNASVFSHVWANRESGEHISSWGSRLREINRLRDKYAPKTGPSPSPPGTSHSHNNGGIVNGGGPQIDVSRPGSTVRDSLGSLSLRRSSVATFFSNSSEQNSHSHRSSLLSTNTALTEGTEVHAPTAVDHLVESLDFSRWA

SEQ ID NO: 20624 - DNA, 5519 bp, Muscodor strobelii
  misc_feature: SGI EST ID NO. CUFF.48820.0
  misc_feature: Variant of the nucleotide sequence at SEQ ID NO 20622
tgacacatcacgttgtgcagttatttcaggccagccggccgcagcaggccgttttgaacaagcagatatgtccccgtcctctggagatggggcgcagtcatcccaggactccaagggcgtcggaggtcttgccagcgtcttcaagggcctcgccggggctgccaagctgaccaagtcctctcccacctctgcacagtcacccgctctgatgacgaaccacgctcacatcgccgagcagctcgatgcactcccggcccgccatgcgctgcccccgcaacatgccggattgttcgaccaactcaagaatggaccgttgccagagcgagtggccgctgcgagtgccctccggaccgtcgttagtgattatcccaggaatccggtactggatatctggtatgcagccaaggacttgattgcgcccactcactccaggccacatcgcactgtgggctgggacctgcttgccgagtgtgtcaagcatccgtcgtcctctgatctcgagcgtaaggaatacttccagaccattactgctcctgccaatccagatgacttccatttgcagcttgcatcgcttgtgaatctgaccaacaagggccgtgatgtctccggattcgactacgacctgtttccccttctgtccaaatggctagactcccagttcgaagtcgctaaggctgcgaggtctgccgccaagaagcaaggttccaggtccaaaggcaaagtcattgctaccaaggaggagagggattttgccgatctgttcgtctttgtggccgacgttatcaagttcaactcggtgattgctgatgacagtgcggccgaggcattggtggatacgctactggaagtctgcttgaaaaccagcaacccggaggatatgcgagcttgcatcagtatcttggatgccatcatcaccttcggagtacttcccggcagcaagctgcaaaaatgtgtccagatattgtcatcgatacattgcgtggttaaggatgcgcaaaaggaggcttggcatacgatgagcatcttgttccggtcacatgacggccaagctaccgtgagagtcctgctcgagatcttgagtggcggtaaaggacctggtgacaagaagaaggaagatgtgcgagaaattcgaggtgctctgtccgtcctcactaaactcgtgtcaaaaagctcggagaaaggctatccactcgttccctatgttgtattggtggatgggctttccaaggtgacagaggccgaatctccgtggaagatttatctggacatgctccgtctgatcaatgctttgttctctgatgcccgaggcagtattaatgcgatgctcacggatgaagactggatgccaatcttggacattgttgtgtcatgttccgctggtgttgtgacgtggttgtctagatccaacaacaccatcaacacgccggatgataccgaaagtcctgagtctttgattgccagagaactctccaagttagttgctcgtttggaagacatcaccaaggagccacagagtgcggtgattcagcgacaagactgcatgaggtttttcatcaaactaaaccctgccctccccgactcagccgctaccctagtactcagttattttcaagaattccgctgttgcttcccctctgatgcgcagtggagaacaaacttggatatggtcctcgacggtttcttcaaggacaggaaacgaaccacacacgtcaggttgcaagccttgcgagctgtcaccgaggtctatgacttactcgagcttgttgacgacgaggtggagcctgacttcgtgatctctcttgtgaaacgcttacttgtcagtgtagctgacgagacagatatcgccgttctgcaagaaatcgtttcatttgcggcaaatgtcgcaacaacgaccagctttcctctattctgtcatatcactgataccctgcaaaagatcgtaggaagcgatcaaacacgtgtagccgcagccgcctcactctctcgcaagtccagcctagcagcactcacggccttcaaactagcaaatactcagacaccagccaatgtggtgacgcggggttttgtacaaatattcctgcgcgtcatggacaacgacgttatcaaatccattcgcatgttcaactcccttgtctctatcgccaaattgaattccaacgagccagatgcccgtgtgtctgctatgagacttctgttccgcctgcgagccgattgggccaatcgcatatttgttaccacccatacagaaacagcccagttagcaactaccttatatcgtactgaagcctcattcacgcggaaagtgtccgaggatgcgtcacaacagagtcggtcgtcgagaagtgaaagcggtggtcgtccaatgcgtggtttgtcattcacgatgactcagacaccagaacgaacttccgcgagccgagtatcgagtggatcaaaggctgacactagtgcatcccctatgttgtggatgtgccctgatctcgacgccctgcctgagtcgccttcgaagtcagctagccccgtgctgtactcaagcctcgacacgtcgtctgaaaatatgggatcagaagggcaggaggctctcctgcctatgggtttttggcttgagactatctcacacttaattcaaaatgggtgcgattgggaggtctacagtttcatcctggttcatcttccatcacaattaagcaaccatgctgtgttcaatactgccgttccccaaattcaagagttacgacgactactctgtgagcagatcaggcagaacacttttcaagaaccaccagctgcatctgtattgcgcaaagctgacgtggcgatatgtctcttccattcacttacaatgatcttgagttaccaccgtcatttccagaagtcggatgaagacgagatcgtggcgacgtttgttcagggcatttcgacgtgggaacgatgtgctaagtgctgtatacacgccctaagcatctgctgccatgaactcccgggctccacaagcaaagccttgatagtcgtcttgcaacgcatggcgcaagtcatcacacaacctcaggtggctatgcatatcttagagtttctcgtaggcttaagtcggttgcccgctctctacatcaatttcagaagagaagaatatacaatggtttttggtatctgtttccgttatctacaatacgtcagaggcaagaagcagagccaaagcaatcggccgaactcgatgggcgacgcactccacggcagattgtcagttgtgccggatactgcgcactcagctactggggacgatcttcctcaatacgtctacacattagcatatcacgtcgtgatcttttggtacctggccttgaaacttccagaccgcgctggtcacgtatcgtggatcgcgaagaaccttttcactgatgtagacgggtctcaggtcgttgatgagcaggctcaaacatcactcgatctcatgcagcgagtgacctacgctgacattaacgagtctatgccagaccctcttttcactcccgagagatttggcgagatcctcaaaaggcattggttgattggtagcagtattgtgacagtcgagcaagccgtcatctcaggctgggcacagatcactaagcggcaaccttccggcacttcgtcttatacgattcgcgaactcgttcgagcccctccgccacatcagcaagctttcgatgtcggcggaagagataacaactctgcgtcgacgaattgcgtcttgccaaatcatctattcgtacaactattgggccctttaccacagtacaatgacatgagtaaaccggttcccctcccgaataatgatgcgatcgatatggccatcagagtctttgaccgcaactcaaccgtggatggacacaaggttggtgtcatctacattggcgaaaatcagaccgacgagttggaaatacttgccaatgtgtccgggagcagtgaatatgtagagtttgtcaacggtcttgggacactaacaaagctcaagggcgctaccttcaacacccagggtctagacagatatacagatcaggatggggaatacacgttctgttggagagacagagtatcggaactggtcttccatgtcacgacgcagatgccgacaaacttggaaactgatccacaatgcatagcgaagaagcgacatatcggtaatgatttcgtcaacataatattcaacgactctggcttccccttcaagttcgacacattcccatcggacttcaactacgtcaacattgtcatcacgccagaatcgcgcgcctcgttcatcgctacgagacagaggactcctaaagatgtacaggattcattctacaaagttcaagtcatgtccaagccaggctttcctgagatttcgccagcggcggagaccaagatcgtctctctaaaagccctgcccgactttactcgtctccttgctctgaacgcctccgtcttctcacacgtatgggccaaccgcgagagcggggagcatatttcttcgtggggcagcaggcttcgcgagatcaaccgcttgcgcgacaaatacgcaccgaagactggtccctcaccctcaccaccggggacgtcacacagccacaacaacggtggcatcgtcaatggtggtgggccacagatcgatgtctcgaggcctgggagtacggtgcgggatagtctaggtagcctgagtcttaggaggtcttcggtcgctacctttttctcgaactcgagcgagcagaattcgcatagtcatcgctcatctttactttcgacgaatacggcgcttactgagggcacggaggtccatgctccgactgctgttgaccatcttgttgagagtttggatttctcgagatgggcttgagatcaggtattgggttatctgcatatgaaagatggactaagaggtgaagtagggggtggcataaggagttgtggtatatacctaaaaaatggcgagtgacgtgtatatgaaaaatgaaaaacttgatatttgggagcggggtttttaggatttggagtatgggggttttatcacaaaagttttttggtcgttcagcaagctaaaatccggtgtgagcgggtgttgtattttatgaggtttttgagagggtgcttgataagtgctgagtattggcatgggcgtctggatcgtggagtagatacctgccttgcaatggaattttggattggctggtataagtatacgtgcaggtgttttgcgggttgctgatgtgtgttcggtgatgaggtgtgatatgagcgcaaggggggtatatgagcgggtacgtgtgagtgtgtatgtgtgagtatggagttgaagagtgtgtttgagtatgagtgtacaagttttgagtatgctgttgtgagttgttggtgagtgggtgtgtatctcagcggttttgttatataggggtgttttgcatatattcgcatgtgtgctctagagttaatatgagagtactcgaggatgtgtattcggatgtcttcccctttaatcattcggatgggtagtgtcttgtctattcggg

SEQ ID NO: 20625 - DNA, 2874 bp, Muscodor strobelii
  misc_feature: SGI cDNA ID NO. 566966
  misc_feature: Encodes the peptide sequence at SEQ ID NO 20626
atggctttcgacatcaatcagctcgcccagcagttggatgcgactctaaacgcgacagggcgcaaaaaagccgaaaatgccttgaagcaggaggaaaccaagccacagttctctctatcgctccttaagatcgttgctacagagtcatacgagcccaagacccgcctagcaggtgctctctacttcaagaacttcattcgccacaactatgtcgacgaagatcgcaactacaaacttcccctcgaagaggtcagcacgataaaacaggagcttattgggctcatgatcgcctgccctcgcactatccagacacagctcggtgaggctatcagcatcatcgcagactcggacttctgggaccgatgggatactttggttcaggatctcgtctccagattcagtgccgacaactacaagattaacaacggagtcttagaagtcgcacactcgatattccagagatggcgccccttgtaccgatccgacgaactgtatgccgaaatcaaccacgtgctgaacaccttcgccgtgccattcctaaccctcctcgacgctacggacaaacagatcgaggctcacaagaacaacaaggacgccctaaagggttacttcgacaccatgagcctgttgatcaaggtcttttacgatctttcctgccaagatatgccccctcagttcgagtccaacttggagagcatttctacccttctgcacaaatatctcaactacgaaaatcccttactcgagaccgacgacgactccgaggccggcgtagtcgagattgtgaaagccgacatctgtgaggctctggagctgtacgtgcacaaatacgacgacgactttggtcgctacactggcgtgtttatatccaaggcctggaacttgctgtccagcattggtcctgagactaagtacgataacctcgtaactaaggctctgcacttcctcaagaccattgctggtacgacacaacattcaggtggcttcaacgatgagaacgtgttgaatgaggtcgtggagaaggtcgttctacccaacgttgccctcagagaatcagacattgagttattcgaggatgagccgatcgagttcattcgtcgcgatcttgaaggctcagattcagactcgcggagacgggccgctacagacttcctcaaacagctacaggagaagttcgaacagctggtgacgaatgtagcggggaagtacatcaaccactttctgaaccagggcaagaccaactggaaagacaaggatacagccatctcgctattcctctccatcgccgcaaagggcgccgtcactgcatcacacggtgtcaagacggtcaattcaatggtcaacgtggtcgagttcttccaacagcatgtagcaaatgacttggttggcgctgatgtcgagcccatcaacaaagtggccgcgatcaagtatctgtacacctttcgaagccagttgacgaaagagcagtggcagggtgctttccaacctctcatccagaacatgggctcttcaaactacgtcgtatacacgtacgcagccatcgccgttgagcggctgttgtttttgaccgatgactctggagcgcgtatttttggaagagccgatatcgagccgtttgctaaagacctgcttgagcatctcttcaagcttgtcgagaacgagagctctcccgccaagatgcaggagaacgagttcttgatgcgttgcatcatgcgtgtgcttatcgtcatgaacactggcatccagcctttcgtcgatatgatactcgatcacttggtggccattaccaatgtaatcaaggccaatccgagcaacccacggttctactattaccacttcgaagccctgggtgcagtagttagctgtggttcgccgactggtacctcgaaattggaggatcgtctttgggagccattcaatctcatcattaccgaggaggtcaatgagttcacgccatatgtgttccagctcttcgcaaagttgctagagcagaacccctcaggtgctcttcccaaccactaccaggcactcgtgcccccgttgatgctcggtgtcacgtgggagcagagaggcaatattcctgctcttaccagattactggccgccatcatccccagagcagcctcgtttattgtgtctgagaaccaagtacagcccatcctcggcattttccagggccttttgaacaacaagaggacggagtctaatgcctttgatttgctggaagccgtcgtcatgtccattccgagaaatgcgctggagccgtacttcaagagtatcttggagattcttttcactaaacttcagtccaatccatcagattcgttcaagttgcgctttgtgcggttctatcaccttgtatcggccaaggttgaggctgggctcggagctgactttttcatcagccaggttgatcttgtacagaataacctatttgtccagatctacctgactatcatcctgccagtctcagagcagctcgtcaagccagtggaccgtaaagcagccgtcatctcgtttgctaagtccatgggagacagccaggcctttgcacagcgatacgttaagggttggcgctttacgtgcgaggcgttgcttaagatgctcatgaacccgcccaaggttaccatgggcgctggtgacgacgtggtcaacgaggcggacgtcgatgacattggtttcggcttaggtttcacgcccttgaacacgtgtaagaagggcacgcgtgacgacttcgccgacgtccaggatatccagcaatgggtgcgccaatacctcaccgatgctaataaccggcaccaaggcgccgtcgctggatacatggatcgcttgacggacgagggcaagcaggccttggccatgtatgtttcataa

SEQ ID NO: 20626 - protein, 957 aa, Muscodor strobelii
  misc_feature: SGI Peptide ID NO. 566966
  misc_feature (517)..(955): Pfam Id: PF03378 Pfam Desc: CAS/CSE protein, C-terminus
  misc_feature (151)..(516): Pfam Id: PF08506 Pfam Desc: Cse1
  misc_feature (24)..(97): Pfam Id: PF03810 Pfam Desc: Importin-beta N-terminal domain
  misc_feature (1)..(956): NCBI GI: 46125583 Blast Desc: FG07169.1 [Gibberella zeae PH-1]
  misc_feature (1)..(956): NCBI GI: 256730960 Blast Desc: [Nectria haematococca mpVI 77-13-4]
  misc_feature (1)..(953): NCBI GI: 85099894 Blast Desc: NCU04104 [Neurospora crassa OR74A] gi|28922395|gb|EAA31630.1| NCU04104 [Neurospora crassa OR74A] gi|28950361|emb|CAD71016.1| mportin-alpha export receptor crassa]
  misc_feature (1)..(957): NCBI GI: 145607115 Blast Desc: MGG_03994 [Magnaporthe grisea 70-15] gi|145014713|gb|EDJ99281.1| MGG_03994 [Magnaporthe grisea 70-15]
  misc_feature (1)..(957): NCBI GI: 116198045 Blast Desc: CHGG_07178 [Chaetomium globosum CBS 148.51] gi|88178457|gb|EAQ85925.1| CHGG_07178 [Chaetomium globosum CBS 148.51]
  misc_feature (1)..(956): NCBI GI: 156065117 Blast Desc: SS1G_00569 [Sclerotinia sclerotiorum 1980] gi|154691428|gb|EDN91166.1| SS1G_00569 [Sclerotinia sclerotiorum 1980]
  misc_feature (1)..(957): NCBI GI: 171694031 Blast Desc: protein product [Podospora anserina] gi|170946964|emb|CAP73768.1| protein product [Podospora anserina]
  misc_feature (1)..(957): NCBI GI: 189195346 Blast Desc: PTRG_03678 [Pyrenophora tritici-repentis Pt-1C-BFP] gi|187979890|gb|EDU46516.1| PTRG_03678 [Pyrenophora tritici-repentis Pt-1C-BFP]
  misc_feature (1)..(956): NCBI GI: 154311497 Blast Desc: BC1G_06601 [Botryotinia fuckeliana B05.10] gi|150850998|gb|EDN26191.1| BC1G_06601 [Botryotinia fuckeliana B05.10]
  misc_feature (1)..(957): NCBI GI: 121703726 Blast Desc: chromosome segregation protein Cse1, [Aspergillus clavatus NRRL 1] gi|119398271|gb|EAW08701.1| chromosome segregation protein Cse1, [Aspergillus clavatus NRRL 1]
MAFDINQLAQQLDATLNATGRKKAENALKQEETKPQFSLSLLKIVATESYEPKTRLAGALYFKNFIRHNYVDEDRNYKLPLEEVSTIKQELIGLMIACPRTIQTQLGEAISIIADSDFWDRWDTLVQDLVSRFSADNYKINNGVLEVAHSIFQRWRPLYRSDELYAEINHVLNTFAVPFLTLLDATDKQIEAHKNNKDALKGYFDTMSLLIKVFYDLSCQDMPPQFESNLESISTLLHKYLNYENPLLETDDDSEAGVVEIVKADICEALELYVHKYDDDFGRYTGVFISKAWNLLSSIGPETKYDNLVTKALHFLKTIAGTTQHSGGFNDENVLNEVVEKVVLPNVALRESDIELFEDEPIEFIRRDLEGSDSDSRRRAATDFLKQLQEKFEQLVTNVAGKYINHFLNQGKTNWKDKDTAISLFLSIAAKGAVTASHGVKTVNSMVNVVEFFQQHVANDLVGADVEPINKVAAIKYLYTFRSQLTKEQWQGAFQPLIQNMGSSNYVVYTYAAIAVERLLFLTDDSGARIFGRADIEPFAKDLLEHLFKLVENESSPAKMQENEFLMRCIMRVLIVMNTGIQPFVDMILDHLVAITNVIKANPSNPRFYYYHFEALGAVVSCGSPTGTSKLEDRLWEPFNLIITEEVNEFTPYVFQLFAKLLEQNPSGALPNHYQALVPPLMLGVTWEQRGNIPALTRLLAAIIPRAASFIVSENQVQPILGIFQGLLNNKRTESNAFDLLEAVVMSIPRNALEPYFKSILEILFTKLQSNPSDSFKLRFVRFYHLVSAKVEAGLGADFFISQVDLVQNNLFVQIYLTIILPVSEQLVKPVDRKAAVISFAKSMGDSQAFAQRYVKGWRFTCEALLKMLMNPPKVTMGAGDDVVNEADVDDIGFGLGFTPLNTCKKGTRDDFADVQDIQQWVRQYLTDANNRHQGAVAGYMDRLTDEGKQALAMYVS

SEQ ID NO: 20627 - DNA, 3814 bp, Muscodor strobelii
  misc_feature: SGI EST ID NO. CUFF.48534.0
  misc_feature: Variant of the nucleotide sequence at SEQ ID NO 20625
acgggatgctgtaatgccaacaaccttaaagcaagctcgtctatctgactatgtagtagagctaactacaatttaggagttgagagcttgcccctcttcgccttgaagcttccatcgttggtggtggggtagacctgcgcatccccaggcactaatgagacctaacccagcctggagtatgagctgacgggccccatcttgtcgcctcgtcgcccggcccattccaatgtcaataaaaagttggatggtgtaacggagccaaacaacagctctactgcccctcaacggcgtctcaacctcccaacccgccgccgtcaccatcccaaccgcctccgcctcgcctctctcaccctctcacgcctgccgccatggctttcgacatcaatcagctcgcccagcagttggatgcgactctaaacgcgacagggcgcaaaaaagccgaaaatgccttgaagcaggaggaaaccaagccacagttctctctatcgctccttaagatcgttgctacagagtcatacgagcccaagacccgcctagcaggtgctctctacttcaagaacttcattcgccacaactatgtcgacgaagatcgcaactacaaacttcccctcgaagaggtcagcacgataaaacaggagcttattgggctcatgatcgcctgccctcgcactatccagacacagctcggtgaggctatcagcatcatcgcagactcggacttctgggaccgatgggatactttggttcaggatctcgtctccagattcagtgccgacaactacaagattaacaacggagtcttagaagtcgcacactcgatattccagagatggcgccccttgtaccgatccgacgaactgtatgccgaaatcaaccacgtgctgaacaccttcgccgtgccattcctaaccctcctcgacgctacggacaaacagatcgaggctcacaagaacaacaaggacgccctaaagggttacttcgacaccatgagcctgttgatcaaggtcttttacgatctttcctgccaagatatgccccctcagttcgagtccaacttggagagcatttctacccttctgcacaaatatctcaactacgaaaatcccttactcgagaccgacgacgactccgaggccggcgtagtcgagattgtgaaagccgacatctgtgaggctctggagctgtacgtgcacaaatacgacgacgactttggtcgctacactggcgtgtttatatccaaggcctggaacttgctgtccagcattggtcctgagactaagtacgataacctcgtaactaaggctctgcacttcctcaagaccattgctggtacgacacaacattcaggtggcttcaacgatgagaacgtgttgaatgaggtcgtggagaaggtcgttctacccaacgttgccctcagagaatcagacattgagttattcgaggatgagccgatcgagttcattcgtcgcgatcttgaaggctcagattcagactcgcggagacgggccgctacagacttcctcaaacagctacaggagaagttcgaacagctggtgacgaatgtagcggggaagtacatcaaccactttctgaaccagggcaagaccaactggaaagacaaggatacagccatctcgctattcctctccatcgccgcaaagggcgccgtcactgcatcacacggtgtcaagacggtcaattcaatggtcaacgtggtcgagttcttccaacagcatgtagcaaatgacttggttggcgctgatgtcgagcccatcaacaaagtggccgcgatcaagtatctgtacacctttcgaagccagttgacgaaagagcagtggcagggtgctttccaacctctcatccagaacatgggctcttcaaactacgtcgtatacacgtacgcagccatcgccgttgagcggctgttgtttttgaccgatgactctggagcgcgtatttttggaagagccgatatcgagccgtttgctaaagacctgcttgagcatctcttcaagcttgtcgagaacgagagctctcccgccaagatgcaggagaacgagttcttgatgcgttgcatcatgcgtgtgcttatcgtcatgaacactggcatccagcctttcgtcgatatgatactcgatcacttggtggccattaccaatgtaatcaaggccaatccgagcaacccacggttctactattaccacttcgaagccctgggtgcagtagttagctgtggttcgccgactggtacctcgaaattggaggatcgtctttgggagccattcaatctcatcattaccgaggaggtcaatgagttcacgccatatgtgttccagctcttcgcaaagttgctagagcagaacccctcaggtgctcttcccaaccactaccaggcactcgtgcccccgttgatgctcggtgtcacgtgggagcagagaggcaatattcctgctcttaccagattactggccgccatcatccccagagcagcctcgtttattgtgtctgagaaccaagtacagcccatcctcggcattttccagggccttttgaacaacaagaggacggagtctaatgcctttgatttgctggaagccgtcgtcatgtccattccgagaaatgcgctggagccgtacttcaagagtatcttggagattcttttcactaaacttcagtccaatccatcagattcgttcaagttgcgctttgtgcggttctatcaccttgtatcggccaaggttgaggctgggctcggagctgactttttcatcagccaggttgatcttgtacagaataacctatttgtccagatctacctgactatcatcctgccagtctcagagcagctcgtcaagccagtggaccgtaaagcagccgtcatctcgtttgctaagtccatgggagacagccaggcctttgcacagcgatacgttaagggttggcgctttacgtgcgaggcgttgcttaagatgctcatgaacccgcccaaggttaccatgggcgctggtgacgacgtggtcaacgaggcggacgtcgatgacattggtttcggcttaggtttcacgcccttgaacacgtgtaagaagggcacgcgtgacgacttcgccgacgtccaggatatccagcaatgggtgcgccaatacctcaccgatgctaataaccggcaccaaggcgccgtcgctggatacatggatcgcttgacggacgagggcaagcaggccttggccatgtatgtttcataagagaggcagcagccttgggaatggaagcgagtcgagagaaccaagcagaaaagagcacgggtgcatacatgcgtttggaacggagcgcaaacgggagcgacttaagctagaaaaagctatttggtcgagcagcgaccgatcgtatatgtgggctagactaggactgggcacaaaaaagaaggatccaggacgaggatatatgccatgctggacggtggacagggcctatttagataccgtaatgattgagcgaggaagggggccttatggggtggtcgttgctcatgcttctgagagctgtgcaaaaaagccaatgagatgaatgatgaacaagtacttcgatggtctctgtgctttgacgaccgtgacacatgttgagcctatgcctctcggttaagacagactattatatgcctgtagggctcgaataagctccctaaggcagctaccttagctacctaccttaccttgggcaatcgcgctggtaaaactccgggcaaggcagcagccttataaggttcaatatggagccactctttcacctaggggttgatggcttgagttggctggtt

SEQ ID NO: 20628 - DNA, 1356 bp, Muscodor strobelii
  misc_feature: SGI cDNA ID NO. 566967
  misc_feature: Reduced expression when VOC is produced
  misc_feature: Encodes the peptide sequence at SEQ ID NO 20629
atggagcccgacgcctccaaatcgacggcgctgacgctcaagcgctccgccgacctgtcgctgatgccgccgccaccagccccaaaacgcataaagcgaccgaagaaagtcatcgacgaagacagctacaccgaagccctctcccacataatagcccgcgacttcttcccggggcttctcgagtcagagacccagcaagaatacctcgacgccctcgagtccaaagacaccgcctggatatcctccgccagccgccgcctccaacatgtcatgactcccggccgccggaagacacgtcgcggtgtctctctgaccccggcattccagaccccgcgagactatcgaggagaaacacccatgtcagtagcggaatcgacgacagaaacctcagcagggacagagaaaccagacatcgacatgaacatgagtctctcggccttccagcaaaaatatacaagcgaagacaacgaatccttctacaagctgctcgacgcacagaactccaaacgcgcagagaaatacgcatggctatggacgggcaacaaactcccctccaaagctcaaatcgcccagaaacgggtcgagcagaaactcctcgattccgggcacagtcttaccgacgacggattcggaaagaaagacagattagccatcaaggataaagacgacaggccagcacagccagatacatggaaatccctccccaacaacgccctcatgttcgcgccggaaggaatcgaggacgatctccagaccgtagcgcagagagcagaggagacttcccgcgctccgcctaaaggcgtgaattacgccaatacacgacttcccgctccgaaaatcacagataatgagcttcctccctcgtctagagcgacatcgcccactctttccgcagtgcgcgacgcgatagcaggccgtcgccgcgcagacacagtctccacaacactcggttctgaaacaccgcgtgtgaacggttacgcattcgtcgacgacgaagagcccgagcctgaactcttaccatccataaacatcgatctcgggcccggcgattcaacgcccaatccttttgtgctacagcaacagagtcgtcgcgagacactacatcaccgcatggtggacaggatcgcagagtcgaaacgtagtgcttcgaaattcagttcggtgggcagtgtggcgggaactccagtcccgaaatttcctagtagtccgcgcgtggggaatatgacgcctgctgcgcagcggttgctgcgttctatgggtgggggtaggaccccgaagacaccgtttggtgtgtcgagagtaggtgctacgccgaagggaacgccgagacggttaaaacagatgggtttgaaatag

SEQ ID NO: 20629 - protein, 451 aa, Muscodor strobelii
  misc_feature: SGI Peptide ID NO. 566967
  misc_feature (1)..(451): NCBI GI: 171693687 Blast Desc: protein product [Podospora anserina] gi|170946792|emb|CAP73596.1| protein product [Podospora anserina]
  misc_feature (8)..(451): NCBI GI: 85101756 Blast Desc: NCU03822 [Neurospora crassa OR74A] gi|11595642|emb|CAC18262.1| conserved [Neurospora crassa] gi|28922752|gb|EAA31975.1| conserved [Neurospora crassa OR74A]
  misc_feature (37)..(431): NCBI GI: 156034553 Blast Desc: SS1G_13211 [Sclerotinia sclerotiorum 1980] gi|154698615|gb|EDN98353.1| SS1G_13211 [Sclerotinia sclerotiorum 1980]
  misc_feature (10)..(422): NCBI GI: 39978111 Blast Desc: MGG_06940 [Magnaporthe grisea 70-15] gi|145013486|gb|EDJ98127.1| MGG_06940 [Magnaporthe grisea 70-15]
  misc_feature (37)..(437): NCBI GI: 154291776 Blast Desc: BC1G_15047 [Botryotinia fuckeliana B05.10] gi|150846626|gb|EDN21819.1| BC1G_15047 [Botryotinia fuckeliana B05.10]
  misc_feature (1)..(441): NCBI GI: 256731297 Blast Desc: [Nectria haematococca mpVI 77-13-4]
  misc_feature (4)..(415): NCBI GI: 261351535 Blast Desc: conserved [Verticillium albo-atrum VaMs.102]
  misc_feature (10)..(441): NCBI GI: 46126037 Blast Desc: FG07396.1 [Gibberella zeae PH-1]
  misc_feature (1)..(442): NCBI GI: 116198251 Blast Desc: CHGG_07281 [Chaetomium globosum CBS 148.51] gi|88178560|gb|EAQ86028.1| CHGG_07281 [Chaetomium globosum CBS 148.51]
  misc_feature (8)..(420): NCBI GI: 258571662 Blast Desc: conserved [Uncinocarpus reesii 1704] gi|237904904|gb|EEP79305.1| conserved [Uncinocarpus reesii 1704]
  misc_feature: Useful for introducing or modulating the production of volatile compounds
MEPDASKSTALTLKRSADLSLMPPPPAPKRIKRPKKVIDEDSYTEALSHIIARDFFPGLLESETQQEYLDALESKDTAWISSASRRLQHVMTPGRRKTRRGVSLTPAFQTPRDYRGETPMSVAESTTETSAGTEKPDIDMNMSLSAFQQKYTSEDNESFYKLLDAQNSKRAEKYAWLWTGNKLPSKAQIAQKRVEQKLLDSGHSLTDDGFGKKDRLAIKDKDDRPAQPDTWKSLPNNALMFAPEGIEDDLQTVAQRAEETSRAPPKGVNYANTRLPAPKITDNELPPSSRATSPTLSAVRDAIAGRRRADTVSTTLGSETPRVNGYAFVDDEEPEPELLPSINIDLGPGDSTPNPFVLQQQSRRETLHHRMVDRIAESKRSASKFSSVGSVAGTPVPKFPSSPRVGNMTPAAQRLLRSMGGGRTPKTPFGVSRVGATPKGTPRRLKQMGLK

SEQ ID NO: 20630 - DNA, 2513 bp, Muscodor strobelii
  misc_feature: SGI EST ID NO. CUFF.48417.0
  misc_feature: Variant of the nucleotide sequence at SEQ ID NO 20628
gaaaaaatgagattcagaagcggatggattgaacgtgggaatgagcgattgaatgaataaaagaatgagttcacgaataatgctgagctgcgcgtgccagctcggtaagatctacggaatgaatacgttgaagttcgaagatgttggacgctttgacaagagactggggagagaagttctccgttgcgtagacgcatacctacctgcttcacgtgcatatccttttctgcatgctcctgacatcttctcttctttcaaaggtaagtaggaggtgaaaaagaagctgcagcgaagggccatggatacctcacggccgtggcagccaaagatggtgcgcggcaagtatcatgtcacctatgtacctaccatgatatgaacaacagactgattaaagcacccgaataaacttctgaggtgatagtgattagttgaggcttgttggttctgatcgactggcgaatacccaggcgaactgatttcggatcacttctgaggttggagggtgaggtgagtctcatggatacctgcggagagaagttggctccgctaatagggctgagtccgccggtactagcctgggtcgactatcgataagtatgacgcatccagatgttatggtggctcgggtggatcaagtaaaggcctaaggtgcttgctgattgtcactgcctacatgttctggacataacctcgtcttctaccgatcgcatcttctaattcctcaactaccgctacaaccctcgtctacgtccacgcacgtctcatcgaccgcatccacgccgtctccctctgcgcacgcctccacgatggagcccgacgcctccaaatcgacggcgctgacgctcaagcgctccgccgacctgtcgctgatgccgccgccaccagccccaaaacgcataaagcgaccgaagaaagtcatcgacgaagacagctacaccgaagccctctcccacataatagcccgcgacttcttcccggggcttctcgagtcagagacccagcaagaatacctcgacgccctcgagtccaaagacaccgcctggatatcctccgccagccgccgcctccaacatgtcatgactcccggccgccggaagacacgtcgcggtgtctctctgaccccggcattccagaccccgcgagactatcgaggagaaacacccatgtcagtagcggaatcgacgacagaaacctcagcagggacagagaaaccagacatcgacatgaacatgagtctctcggccttccagcaaaaatatacaagcgaagacaacgaatccttctacaagctgctcgacgcacagaactccaaacgcgcagagaaatacgcatggctatggacgggcaacaaactcccctccaaagctcaaatcgcccagaaacgggtcgagcagaaactcctcgattccgggcacagtcttaccgacgacggattcggaaagaaagacagattagccatcaaggataaagacgacaggccagcacagccagatacatggaaatccctccccaacaacgccctcatgttcgcgccggaaggaatcgaggacgatctccagaccgtagcgcagagagcagaggagacttcccgcgctccgcctaaaggcgtgaattacgccaatacacgacttcccgctccgaaaatcacagataatgagcttcctccctcgtctagagcgacatcgcccactctttccgcagtgcgcgacgcgatagcaggccgtcgccgcgcagacacagtctccacaacactcggttctgaaacaccgcgtgtgaacggttacgcattcgtcgacgacgaagagcccgagcctgaactcttaccatccataaacatcgatctcgggcccggcgattcaacgcccaatccttttgtgctacagcaacagagtcgtcgcgagacactacatcaccgcatggtggacaggatcgcagagtcgaaacgtagtgcttcgaaattcagttcggtgggcagtgtggcgggaactccagtcccgaaatttcctagtagtccgcgcgtggggaatatgacgcctgctgcgcagcggttgctgcgttctatgggtgggggtaggaccccgaagacaccgtttggtgtgtcgagagtaggtgctacgccgaagggaacgccgagacggttaaaacagatgggtttgaaatagagaatcgggtcgaaaaatgggttcaagacgttacccatatctatcgactaggacgttgatgaaacaacacaatgccaccagaaggagtcgaagaagatgcggacgacgactaaattgttgcatctcataacatatcagcacactgtgtcgcacgcgcatccttgtgaaggaggtcgcgcggctatgagagatagtacgatccgtgctatgtatgaagaatcgcaggcgcggttcaatgctgtatgcccgaaacagaagacatagaacagaattgtgataagatgatgagattatgagagtttatgatacccaatatagagaatgcacaaattttgagactataacaattct

SEQ ID NO: 20631 - DNA, 1773 bp, Muscodor strobelii
  misc_feature: SGI cDNA ID NO. 566968
  misc_feature: Encodes the peptide sequence at SEQ ID NO 20632
atggagcctagaaaagatgctggccccgattcggcggagcttcctactcacgattcgccccaatgtaataatcctagtcctgaaggttcgggtgatatggttgcgcgtcctcagtcgactcggtcaccacgctcgtctccaagcctacctttcgacctggcaagagacggtgcaagccctgcgagtcagcctgacagccggatcgacgaccgactagagcggcgttcaactcaggagtttcagtcagatacggatccaacttcagtagacatccatacagaagatgatccgggcgttgattcggcggccggggcgggcgtcaatataaaaactggcatcgagatcgatacggtagtgtatccggacgtcgacgcggaaatcaatttgagcggtgtaggctcacagtattcttgttggaaagtcgaccctacgtccttttggctcaaggaccgcaatggcacacaacttccggtgttgtcacaacaggagcttcttcaggcgtttccaaagttccagccaaaaacaccacagcaacatgggccacgcacggcacagaaggaaagcactccaatagtgatgcccacgagtcatagtgctggcggcaagcccatgaaaaatgcagggatgccaccctcgagtacttggcgagatctaaaggctcaattgaatcgcattcaggcaggtctgccgctggacttcgggcccccaatggctagtacccatgcgagacgcatctacgatgaggagagggcaaagaaatggtgggccatcgaggcccttgaacaaaaacaaacaaggctttacaccctcccggctcacaaattgtcccttgatgaaacaacatactggaacgttgcgccagaaccagaaccagatttgcgtccttttaccaaaaacaaaagcaatttggttcccccagcgtcgccacgtcccgcaccgttaccgttacctccggtattgccttcactcaaggatctagggatcaaggatttgttggatagcacaagagccaaagaatcgacaccctttccactagccaacatactcaaacgtaaagcggcagaaggtatcacaggacgaccaccgaataagaaaaacaatcgagccaagctagcccaggcaccgccaaagcctacgcatccatcccctcttatcgatccagcaagcttcggacacagagtagtcgacgatactttctcttttctgatgatatgtctagaggacctaccagtcccgtgcaagatcttgaatctggggtgccgcgatggggctaccagcttcgccatgtacgacgtgctatcacgcacaggagcaaaggtgatagggatcgacgccaattcaatgcgcatcgatgctgcgaaggatgtcctgcaaaattgcactcttcagggtgccaaagaaaatatgcgttttgagcttgtgaccgatatgaccaagactcccttcccggcgaacatgttcgatcttgtcttcgccgacgacatcatgtctcgtttatcaatcgtcaatgaaaaagctcgggaagattacgtaattcaaatcctcaaagaaatgatccgcgtcacgtcgtttggcggcaatattgcgacccgtgagcccattgcgcagcacttcataccaagctatgatctcgataacctatggacgggcaatatgtttaaggcatcaggcatgacgagagggttcatggggaaccgaatagcggcacttatgggccacgccggtatcgacgtggagaacgacatcgcagtctccacgtcggccacgagttag

SEQ ID NO: 20632 - protein, 590 aa, Muscodor strobelii
  misc_feature: SGI Peptide ID NO. 566968
  misc_feature (416)..(530): Pfam Id: PF08241 Pfam Desc: Methyltransferase domain
  misc_feature (415)..(561): NCBI GI: 258567272 Blast Desc: conserved [Uncinocarpus reesii 1704] gi|237905826|gb|EEP80227.1| conserved [Uncinocarpus reesii 1704]
  misc_feature (414)..(590): NCBI GI: 242814941 Blast Desc: arsenite methyltransferase, [Talaromyces stipitatus ATCC 10500] gi|218714811|gb|EED14234.1| arsenite methyltransferase, [Talaromyces stipitatus ATCC 10500]
  misc_feature (415)..(561): NCBI GI: 145241390 Blast Desc: An09g00160 [Aspergillus niger] gi|134077878|emb|CAK40104.1| protein product [Aspergillus niger]
  misc_feature (393)..(528): NCBI GI: 116785181 Blast Desc: [Picea sitchensis]
  misc_feature (414)..(589): NCBI GI: 261354027 Blast Desc: methyltransferase [Verticillium albo-atrum VaMs.102]
  misc_feature (378)..(528): NCBI GI: 116782947 Blast Desc: [Picea sitchensis]
  misc_feature (360)..(533): NCBI GI: 239931572 Blast Desc: glycosyl transferase [Streptomyces ghanaensis ATCC 14672]
MEPRKDAGPDSAELPTHDSPQCNNPSPEGSGDMVARPQSTRSPRSSPSLPFDLARDGASPASQPDSRIDDRLERRSTQEFQSDTDPTSVDIHTEDDPGVDSAAGAGVNIKTGIEIDTVVYPDVDAEINLSGVGSQYSCWKVDPTSFWLKDRNGTQLPVLSQQELLQAFPKFQPKTPQQHGPRTAQKESTPIVMPTSHSAGGKPMKNAGMPPSSTWRDLKAQLNRIQAGLPLDFGPPMASTHARRIYDEERAKKWWAIEALEQKQTRLYTLPAHKLSLDETTYWNVAPEPEPDLRPFTKNKSNLVPPASPRPAPLPLPPVLPSLKDLGIKDLLDSTRAKESTPFPLANILKRKAAEGITGRPPNKKNNRAKLAQAPPKPTHPSPLIDPASFGHRVVDDTFSFLMICLEDLPVPCKILNLGCRDGATSFAMYDVLSRTGAKVIGIDANSMRIDAAKDVLQNCTLQGAKENMRFELVTDMTKTPFPANMFDLVFADDIMSRLSIVNEKAREDYVIQILKEMIRVTSFGGNIATREPIAQHFIPSYDLDNLWTGNMFKASGMTRGFMGNRIAALMGHAGIDVENDIAVSTSATS

SEQ ID NO: 20633 - DNA, 1283 bp, Muscodor strobelii
  misc_feature: SGI EST ID NO. CUFF.48423.0
  misc_feature: Variant of the nucleotide sequence at SEQ ID NO 20631
cgagatctaaaggctcaattgaatcgcattcaggcaggtctgccgctggacttcgggcccccaatggctagtacccatgcgagacgcatctacgatgaggagagggcaaagaaatggtgggccatcgaggcccttgaacaaaaacaaacaaggctttacaccctcccggctcacaaattgtcccttgatgaaacaacatactggaacgttgcgccagaaccagaaccagatttgcgtccttttaccaaaaacaaaagcaatttggttcccccagcgtcgccacgtcccgcaccgttaccgttacctccggtattgccttcactcaaggatctagggatcaaggatttgttggatagcacaagagccaaagaatcgacaccctttccactagccaacatactcaaacgtaaagcggcagaaggtatcacaggacgaccaccgaataagaaaaacaatcgagccaagctagcccaggcaccgccaaagcctacgcatccatcccctcttatcgatccagcaagcttcggacacagagtagtcgacgatactttctcttttctgatgatatgtctagaggacctaccagtcccgtgcaagatcttgaatctggggtgccgcgatggggctaccagcttcgccatgtacgacgtgctatcacgcacaggagcaaaggtgatagggatcgacgccaattcaatgcgcatcgatgctgcgaaggatgtcctgcaaaattgcactcttcagggtgccaaagaaaatatgcgttttgagcttgtgaccgatatgaccaagactcccttcccggcgaacatgttcgatcttgtcttcgccgacgacatcatgtctcgtttatcaatcgtcaatgaaaaagctcgggaagattacgtaattcaaatcctcaaagaaatgatccgcgtcacgtcgtttggcggcaatattgcgacccgtgagcccattgcgcagcacttcataccaagctatgatctcgataacctatggacgggcaatatgtttaaggcatcaggcatgacgagagggttcatggggaaccgaatagcggcacttatgggccacgccggtatcgacgtggagaacgacatcgcagtctccacgtcggccacgagttagggaccgctggccggcacaaagctttggggacgacatcttatctcacgaatgagcccttttggccgtgcgagaaagtcttgggaaaaggcggacatccctccttccatctgcgatctcatcgtcgaaaggctaaagcagtggaactccaaccccgc

SEQ ID NO: 20634 - DNA, 624 bp, Muscodor strobelii
  misc_feature: SGI cDNA ID NO. 566969
  misc_feature: Encodes the peptide sequence at SEQ ID NO 20635
atggcagccaagtccgtcgcagtagtcatcatgggcgtccgtgcctctcgcatcggtcccaccgcggcgtcaatcgtgaagaacgtgatcgagaagcctctctcagccgacaacatcacgacatcagtcgtagacttgaaggacttcaacctacctctctacgatgaggaagtcgcgcctgcgatgatcccgacctacgcccaattcaagcacgatcactccaagaaatggagcgccgagatcgcaaaacacgacgcttacgtactcgtcatcaacgagtataactacggcgtatccggcgcaacgaaaaacgcagtagactacctattctccgaatggaaaggcaagcccgccacaatcgtatcctacggtggacacggcgggtccaaagcctccgcgcaactatcttccatcctatccgagatggggctccgcatcgccgagacaaaaccccagctcaagttcgaggcaggtcaacaagaaggaatgggcgctatcactaagggggtgatttccgatgagtcgaggaccgcttgggctgcgtccgaagatgtggggaagattgcggatgagttgaagagtctgctgttgcagcctaatgagactgttaatgtcgctgcttag

SEQ ID NO: 20635 - protein, 207 aa, Muscodor strobelii
  misc_feature: SGI Peptide ID NO. 566969
  misc_feature (8)..(198): Pfam Id: PF03358 Pfam Desc: NADPH-dependent FMN reductase
  misc_feature (8)..(134): Pfam Id: PF03358 Pfam Desc: NADPH-dependent FMN reductase
  misc_feature (2)..(196): NCBI GI: 256722554 Blast Desc: NECHADRAFT_49612 [Nectria haematococca mpVI 77-13-4]
  misc_feature (2)..(201): NCBI GI: 145602227 Blast Desc: MGG_05084 [Magnaporthe grisea 70-15] gi|145010662|gb|EDJ95318.1| MGG_05084 [Magnaporthe grisea 70-15]
  misc_feature (4)..(195): NCBI GI: 119188557 Blast Desc: CIMG_04326 [Coccidioides immitis RS] gi|240111565|gb|EER29718.1| NADPH-dependent FMN reductase family protein [Coccidioides posadasii C735 delta SOWgp]
  misc_feature (6)..(196): NCBI GI: 238488835 Blast Desc: NAD(P)H-dependent FMN reductase LOT6, [Aspergillus flavus NRRL3357] gi|220698043|gb|EED54383.1| NAD(P)H-dependent FMN reductase LOT6, [Aspergillus flavus NRRL3357]
  misc_feature (4)..(156): NCBI GI: 46115566 Blast Desc: FG03625.1 [Gibberella zeae PH-1]
  misc_feature (6)..(169): NCBI GI: 255710911 Blast Desc: KLTH0A06468p [Lachancea thermotolerans] gi|238933116|emb|CAR21297.1| KLTH0A06468p [Lachancea thermotolerans]
  misc_feature (1)..(191): NCBI GI: 119483166 Blast Desc: NADPH-dependent FMN reductase, [Neosartorya fischeri NRRL 181] gi|119409766|gb|EAW19714.1| NADPH-dependent FMN reductase, [Neosartorya fischeri NRRL 181]
  misc_feature (1)..(175): NCBI GI: 159123380 Blast Desc: NADPH-dependent FMN reductase Lot6, [Aspergillus fumigatus A1163]
  misc_feature (3)..(155): NCBI GI: 169770135 Blast Desc: [Aspergillus oryzae RIB40] gi|238487494|ref|XP_002374985.1| NADPH-dependent FMN reductase Lot6, [Aspergillus flavus NRRL3357] gi|83767396|dbj|BAE57535.1|
  misc_feature (1)..(175): NCBI GI: 70986723 Blast Desc: NADPH-dependent FMN reductase Lot6 [Aspergillus fumigatus Af293] gi|66846481|gb|EAL86813.1| NADPH-dependent FMN reductase Lot6, [Aspergillus fumigatus Af293]
  misc_feature (9)..(146): SWISSPROT Homolog: EC 1.5.1.29 FMN reductase
MAAKSVAVVIMGVRASRIGPTAASIVKNVIEKPLSADNITTSVVDLKDFNLPLYDEEVAPAMIPTYAQFKHDHSKKWSAEIAKHDAYVLVINEYNYGVSGATKNAVDYLFSEWKGKPATIVSYGGHGGSKASAQLSSILSEMGLRIAETKPQLKFEAGQQEGMGAITKGVISDESRTAWAASEDVGKIADELKSLLLQPNETVNVAA

SEQ ID NO: 20636 - DNA, 1113 bp, Muscodor strobelii
  misc_feature: SGI cDNA ID NO. 566971
  misc_feature: Encodes the peptide sequence at SEQ ID NO 20637
atgattccgtccatcttcgtcgaagttgcgcttgctgcttcgattgtcgcagcgcagacctttccatctccaaagggaccactacaagttcaatgggaaaatagagagttgatcgatgcgggccgtcctgacccgttcaatacgtcccatcaccggcggctaatgatctcgcaattctctccggttgcagacgggcgctgtacgaagacttgcagggtaccttatatgccaaaggagattgccacgatcgaagacgacatcatcgcctctttcttgtctgatatcggttggccgtcgggggtcattagtgggctagagctggatgtgtgctgtcaagtctcgtctgtaccatgctgtgcagccaagaagcacaaacccctaacactcttatttggaaccgggttcaataccacgaggctattctacacagcttatgcgcgtgagattgccagcctcggctatcgcgtcatcgtgattgatcacccgtacgaaactgacgtcgtgttgtttccgaatggcgagatcatttttggcggaagagtggatggcaacaatgaaacctcgatcgagttcggacttcaggtccggaatgatgatgttgcatttgtgttagatactctcaatgtcagcgagacagtctacctcggcgactcatttggcggcgcctcagcagctgcggcaacccttgtcgagccccgaatccgcgccggattcaacatggatggctttctttatggccctgttgtaaagtcgggagtttcgaagcctttcatcaatttgtccggcagcctcaattcctcaatcgatgagagctggaaggagttttacgctgcgcagaagcagctacatcccgatgtatggaagagagagctgcacttagataactcgatacatggtagtttttgggacatggcactcattggagatgtgacaggtctgagaagcaatgcggatcttgtcgaatactggtttggagaagtaacagggaccagagttctggaggtcctgcgggcatatctcgactcatttgtcaaatttgtgttgcttgggagcgacgaaggattacttgctaaagagagtcaagcattccccgatatacatttcgtgcaatga

SEQ ID NO: 20637 - protein, 370 aa, Muscodor strobelii
  misc_feature: SGI Peptide ID NO. 566971
  misc_feature (12)..(369): NCBI GI: 116198495 Blast Desc: CHGG_07403 [Chaetomium globosum CBS 148.51] gi|88178682|gb|EAQ86150.1| CHGG_07403 [Chaetomium globosum CBS 148.51]
  misc_feature (2)..(370): NCBI GI: 171690676 Blast Desc: protein product [Podospora anserina] gi|170945286|emb|CAP71398.1| protein product [Podospora anserina]
  misc_feature (5)..(370): NCBI GI: 169601946 Blast Desc: SNOG_03849 [Phaeosphaeria nodorum SN15] gi|111067934|gb|EAT89054.1| SNOG_03849 [Phaeosphaeria nodorum SN15]
  misc_feature (16)..(366): NCBI GI: 121704577 Blast Desc: PAF acetylhydrolase family protein [Aspergillus clavatus NRRL 1] gi|119398697|gb|EAW09126.1| PAF acetylhydrolase family protein [Aspergillus clavatus NRRL 1]
  misc_feature (21)..(369): NCBI GI: 238488837 Blast Desc: PAF acetylhydrolase family protein [Aspergillus flavus NRRL3357] gi|220698044|gb|EED54384.1| PAF acetylhydrolase family protein [Aspergillus flavus NRRL3357]
  misc_feature (21)..(369): NCBI GI: 169763002 Blast Desc: [Aspergillus oryzae RIB40] gi|83770429|dbj|BAE60562.1| protein product [Aspergillus oryzae]
  misc_feature (1)..(365): NCBI GI: 115396058 Blast Desc: [Aspergillus terreus NIH2624] gi|114193237|gb|EAU34937.1| [Aspergillus terreus NIH2624]
  misc_feature (1)..(366): NCBI GI: 119482435 Blast Desc: PAF acetylhydrolase family protein [Neosartorya fischeri NRRL 181] gi|119409400|gb|EAW19349.1| PAF acetylhydrolase family protein [Neosartorya fischeri NRRL 181]
  misc_feature (16)..(366): NCBI GI: 242805475 Blast Desc: PAF acetylhydrolase family protein [Talaromyces stipitatus ATCC 10500] gi|218715163|gb|EED14585.1| PAF acetylhydrolase family protein [Talaromyces stipitatus ATCC
  misc_feature (18)..(366): NCBI GI: 71002852 Blast Desc: PAF acetylhydrolase family protein [Aspergillus fumigatus Af293] gi|66853745|gb|EAL94069.1| PAF acetylhydrolase family protein [Aspergillus fumigatus Af293]
MIPSIFVEVALAASIVAAQTFPSPKGPLQVQWENRELIDAGRPDPFNTSHHRRLMISQFSPVADGRCTKTCRVPYMPKEIATIEDDIIASFLSDIGWPSGVISGLELDVCCQVSSVPCCAAKKHKPLTLLFGTGFNTTRLFYTAYAREIASLGYRVIVIDHPYETDVVLFPNGEIIFGGRVDGNNETSIEFGLQVRNDDVAFVLDTLNVSETVYLGDSFGGASAAAATLVEPRIRAGFNMDGFLYGPVVKSGVSKPFINLSGSLNSSIDESWKEFYAAQKQLHPDVWKRELHLDNSIHGSFWDMALIGDVTGLRSNADLVEYWFGEVTGTRVLEVLRAYLDSFVKFVLLGSDEGLLAKESQAFPDIHFVQ

SEQ ID NO: 20638 - DNA, 354 bp, Muscodor strobelii
  misc_feature: SGI EST ID NO. CUFF.48456.0
  misc_feature: Variant of the nucleotide sequence at SEQ ID NO 20636
ggaagagtggatggcaacaatgaaacctcgatcgagttcggacttcaggtccggaatgatgatgttgcatttgtgttagatactctcaatgtcagcgagacagtctacctcggcgactcatttggcggcgcctcagcagctgcggcaacccttgtcgagccccgaatccgcgccggattcaacatggatggctttctttatggccctgttgtaaagtcgggagtttcgaagcctttcatcaatttgtccggcagcctcaattcctcaatcgatgagagctggaaggagttttacgctgcgcagaagcagctacatcccgatgtatggaagagagagctgcacttagataactcg

SEQ ID NO: 20639 - DNA, 951 bp, Muscodor strobelii
  misc_feature: SGI cDNA ID NO. 566972
  misc_feature: Elevated expression when VOC is produced
  misc_feature: Encodes the peptide sequence at SEQ ID NO 20640
atgttgcattcttccataatcatcccatttttcctccttcgagcctgtcttgtagaagggcaagataatcgagcaccggatcccaacaaccactttctctatcctcccctaccaggacctcaagccactgtcgatccaacggtcttctggtttgacgaggaaattgtggccagtcgacctcttacacagccattcacatgggtaacgaacatgtcaagcgtgcgtatcatactcctgcaagagggaactaaaggccctaaagacagggttggaactctttacttgaccaattgcacgtcaagcacagataacttcttatactgggatggagacattggaaagattgatctgaataacggagctcaggcttaccttggagcgttcaattgctcagatcccggaaagccgccggtttccttctcacactactttaacctcacactacccgatccctcttcgaactctggctctaactcaacaatgaactccacaacaagctccacagcaatcgcagcaactactacgctgcctacatcaacttacagcagcgatccagaccacgcagaagctgccactcctctcaatgcagccgcgataggaggcggtatcgagagcggcatcgagagtgcaatcctcctagtcggtggaatctacgcaatagtaaatcatcggaggagaaaccggcaccgaagccagcgaattgagagggatgtctcggaatgcaccccggacgaattcgctgcacacggtcccggttcgtcctggacgaagcatcctgttcctgattatcataagccttcgacgaacgcgtatccgtgcgaagctcatccgcatctggaatctctgtatcgaccaccaaacccacaaacctcggtttatgctcatatctacgagcttcctgagtcccgtgcgagcgcccatgctagacccagcgagctctctacgtcatag

SEQ ID NO: 20640 - protein, 316 aa, Muscodor strobelii
  misc_feature: SGI Peptide ID NO. 566972
  misc_feature: Useful for introducing or modulating the production of volatile compounds
MLHSSIIIPFFLLRACLVEGQDNRAPDPNNHFLYPPLPGPQATVDPTVFWFDEEIVASRPLTQPFTWVTNMSSVRIILLQEGTKGPKDRVGTLYLTNCTSSTDNFLYWDGDIGKIDLNNGAQAYLGAFNCSDPGKPPVSFSHYFNLTLPDPSSNSGSNSTMNSTTSSTAIAATTTLPTSTYSSDPDHAEAATPLNAAAIGGGIESGIESAILLVGGIYAIVNHRRRNRHRSQRIERDVSECTPDEFAAHGPGSSWTKHPVPDYHKPSTNAYPCEAHPHLESLYRPPNPQTSVYAHIYELPESRASAHARPSELSTS

SEQ ID NO: 20641 - DNA, 1981 bp, Muscodor strobelii
  misc_feature: SGI EST ID NO. CUFF.48472.0
  misc_feature: Variant of the nucleotide sequence at SEQ ID NO 20639
aatgatagagacaaacaaactcaataaaagaatgtaaggccttcggccagccgaaagccccttcatagctaaaatggtcttcaactccatcgcaaggataacgaacaacgtgacataacaatggtcataaatgaggcgagtcaaagagaaaaggaagaaagacagcagcggctgtgaagaataacgtcaatggttttcggcccggtcaggggcggcgtgtgaagagacacacggcccgagataggaaggcacattaggacctctcacgaactcgtttatatgtgatgttggtggcttcgtttatgcgcggtgttggtggctgtcgtcccgacgcaatggttctgccaatgagcatacacagatgagcaggggtcgcagcacgatgcagcgtttgcagtccataacaaccagctgattggcgcaaccagcgtcagcccttcaaggcagcgcttgttgcatcttaattgcaacaagcagatagtttgggaacttcgttttgaaatttgccaatatggcattatggtcgccgaactggcggttttgtcgcggcagcagagatcgggatgatgaacaaatacaaccggcacgctaggttcagtctcaaaacttgccgcccgcagaagcaaatagaaatgttggctgttgtgagtacagactcgggcaaggcaaatctggtaagagaagagatgtcaaaaaccctctccaacccagtctactttgatggtgtattccttttttcttcgcgagttccgcggcatcattcgtttactgctctccttgctcggcgtagagttgcaccatctcgacgcgtatgaagccagctttctggcattcacatcctgttactatctacaaatactgtcatacgttgcccgagcccacctcatctctcactgcgaagtaatcctacaacgccgatgcaatgttgcattcttccataatcatcccatttttcctccttcgagcctgtcttgtagaagggcaagataatcgagcaccggatcccaacaaccactttctctatcctcccctaccaggacctcaagccactgtcgatccaacggtcttctggtttgacgaggaaattgtggccagtcgacctcttacacagccattcacatgggtaacgaacatgtcaagcgtgcgtatcatactcctgcaagagggaactaaaggccctaaagacagggttggaactctttacttgaccaattgcacgtcaagcacagataacttcttatactgggatggagacattggaaagattgatctgaataacggagctcaggcttaccttggagcgttcaattgctcagatcccggaaagccgccggtttccttctcacactactttaacctcacactacccgatccctcttcgaactctggctctaactcaacaatgaactccacaacaagctccacagcaatcgcagcaactactacgctgcctacatcaacttacagcagcgatccagaccacgcagaagctgccactcctctcaatgcagccgcgataggaggcggtatcgagagcggcatcgagagtgcaatcctcctagtcggtggaatctacgcaatagtaaatcatcggaggagaaaccggcaccgaagccagcgaattgagagggatgtctcggaatgcaccccggacgaattcgctgcacacggtcccggttcgtcctggacgaagcatcctgttcctgattatcataagccttcgacgaacgcgtatccgtgcgaagctcatccgcatctggaatctctgtatcgaccaccaaacccacaaacctcggtttatgctcatatctacgagcttcctgagtcccgtgcgagcgcccatgctagacccagcgagctctctacgtcatagcgaggctgttgggagtaatggacacgtggcaagagggatgagggatgcagattattatgttactactgtgcttcataatagccaattaatatgagaaacccctaaaag

SEQ ID NO: 20642 - DNA, 873 bp, Muscodor strobelii
  misc_feature: SGI cDNA ID NO. 566973
  misc_feature: Encodes the peptide sequence at SEQ ID NO 20643
atgcatttttcaacatctctctttgtagtctgcctgtcggcagcgatcgcggatgccgccatcgacaaacctgcgatctcgccagcctttcagatcaacgatcttcagtctgggttgagccaaaatctcccgcaagtcaaggtcacgatccaagaatgggcgaataaggaccagattccgcaaggatgcaaaaattctgctacgtataatggcttcgatccgaaagatatcaacgtgtttgatgcgcactatgaagactgtgatatgaaatgggtcatttgcgtacacaaggacgttgatcgctcgcatatggggacggcgatgacatttggcaaacttccccttggcatgagaaatttcgtcaagaacctcgttcttctccctcatctgaagggcggctttatcggcttgaccggtggaggtgtgagtagcattgtcggaggctcgtacggtctctatgtgctttctcacgaagtcgggcactcaattgacgcatatgcgcacggtggtggcttctccgccagcagcgagtttcacactgctgtggctaatgataaagcggttgtctctgcttatgggcagactaattatgcagaggactttgccgatggtacaattatggctctctacgatatcaacgtgcctggtggtcttgcaaagatcaatcctcacactgctcaaatctctcatcagatttcagctatcaagagcacgttcaaaaacaactacacgccggatgcatttggcgcctgtacgcgtccgcttggacagagtcccgttgtgccgaaggcatcgtctgcaaagttcgtcgcagatgagaatgggaaactggacatggttgctgatactgaggacatgatggttcaacactag

SEQ ID NO: 20643 - protein, 290 aa, Muscodor strobelii
  misc_feature: SGI Peptide ID NO. 566973
  misc_feature (11)..(289): NCBI GI: 39942846 Blast Desc: MGG_03503 [Magnaporthe grisea 70-15] gi|145009940|gb|EDJ94596.1| MGG_03503 [Magnaporthe grisea 70-15]
  misc_feature (12)..(267): NCBI GI: 67516241 Blast Desc: AN0402.2 [Aspergillus nidulans FGSC A4] gi|40747345|gb|EAA66501.1| AN0402.2 [Aspergillus nidulans FGSC A4] gi|259489355|tpe|CBF89557.1| TPA: [Aspergillus nidulans FGSC
  misc_feature (20)..(275): NCBI GI: 212531813 Blast Desc: conidiation-specific protein, [Penicillium marneffei ATCC 18224] gi|210071427|gb|EEA25516.1| conidiation-specific protein, [Penicillium marneffei ATCC 18224]
  misc_feature (23)..(263): NCBI GI: 39955613 Blast Desc: [Magnaporthe grisea 70-15] gi|149209387|ref|XP_001522068.1| MGCH7_ch7g185 [Magnaporthe grisea 70-15] gi|86196140|gb|EAQ70778.1| MGCH7_ch7g185 grisea
  misc_feature (20)..(268): NCBI GI: 67525891 Blast Desc: AN3403.2 [Aspergillus nidulans FGSC A4] gi|40744191|gb|EAA63371.1| AN3403.2 [Aspergillus nidulans FGSC A4] gi|259485609|tpe|CBF82777.1| TPA: conserved [Aspergillus FGSC
  misc_feature (9)..(223): NCBI GI: 145612001 Blast Desc: MGG_08013 [Magnaporthe grisea 70-15] gi|145019247|gb|EDK03475.1| MGG_08013 [Magnaporthe grisea 70-15]
  misc_feature (21)..(253): NCBI GI: 46115460 Blast Desc: FG03572.1 [Gibberella zeae PH-1]
  misc_feature (21)..(284): NCBI GI: 171684715 Blast Desc: protein product [Podospora anserina] gi|170942318|emb|CAP67970.1| protein product [Podospora anserina]
  misc_feature (21)..(252): NCBI GI: 171685348 Blast Desc: protein product [Podospora anserina] gi|170942635|emb|CAP68287.1| protein product [Podospora anserina]
  misc_feature (19)..(236): NCBI GI: 145606731 Blast Desc: MGG_09428 [Magnaporthe grisea 70-15] gi|145014397|gb|EDJ98965.1| MGG_09428 [Magnaporthe grisea 70-15]
MHFSTSLFVVCLSAAIADAAIDKPAISPAFQINDLQSGLSQNLPQVKVTIQEWANKDQIPQGCKNSATYNGFDPKDINVFDAHYEDCDMKWVICVHKDVDRSHMGTAMTFGKLPLGMRNFVKNLVLLPHLKGGFIGLTGGGVSSIVGGSYGLYVLSHEVGHSIDAYAHGGGFSASSEFHTAVANDKAVVSAYGQTNYAEDFADGTIMALYDINVPGGLAKINPHTAQISHQISAIKSTFKNNYTPDAFGACTRPLGQSPVVPKASSAKFVADENGKLDMVADTEDMMVQH

SEQ ID NO: 20644 - DNA, 891 bp, Muscodor strobelii
  misc_feature: SGI cDNA ID NO. 566974
  misc_feature: Encodes the peptide sequence at SEQ ID NO 20645
atggctcctaaactactcgcagtcgtagtcggagctctcgggctgctcatcctcacttctcccactctagcgcaatctcgctcagtaaaacgcggcctggtccatatcccaaattctcaatggccacaggacaacgctatttggtatcaagaaggctccgacataacctggtactataactacggggaaaagccgtcgcccgaattcgccggtgtctctcaggcacgacttgagttcgtacctcagaaatggggccagagcagcaaccctatagacacaagcttcagtaattacgtcggacaattgattgccaacggcacggcaattaaaaatgtcttggcgtacaatgaacctgagtacgggtttgactccggtggcgcacagctagatcccgccacagccgccaaaggttggattgccgacttcgtccctcttcagcagaagggtgttagaatcggtctccctgctgtgaatggtgacgacttcggattgaattggttgggccagttcatgcagagctgtagtgcacagcttaatggtcgaaaatgtccttatgacttcttgcctgtgcattggtacaatgatttctcggggctcacagacctcattggcaagatcgagtccatgtttcccggttcgaagatctggctcacggaattcacagatccgcatgtggatcttgcgactacacaggagttttataaagagagcatcccgtggcttgatgactcgagcttggtcgagaggtactcctggtttggcgcattccggtcttctgttagcaacgttggagccaacgcgactttcttgaacaacgctggcaaactcaccgatatcgggtcttggtacctcggaggagaggctactggtgttccacccacgtctggctga

SEQ ID NO: 20645 - protein, 296 aa, Muscodor strobelii
  misc_feature: SGI Peptide ID NO. 566974
  misc_feature (5)..(296): NCBI GI: 261360043 Blast Desc: conserved [Verticillium albo-atrum VaMs.102]
  misc_feature (1)..(296): NCBI GI: 156031221 Blast Desc: SS1G_14032 [Sclerotinia sclerotiorum 1980] gi|154699434|gb|EDN99172.1| SS1G_14032 [Sclerotinia sclerotiorum 1980]
  misc_feature (28)..(293): NCBI GI: 154309153 Blast Desc: BC1G_07471 [Botryotinia fuckeliana B05.10] gi|150852514|gb|EDN27706.1| BC1G_07471 [Botryotinia fuckeliana B05.10]
  misc_feature (30)..(290): NCBI GI: 46116804 Blast Desc: FG04244.1 [Gibberella zeae PH-1]
  misc_feature (6)..(295): NCBI GI: 116197304 Blast Desc: CHGG_05250 [Chaetomium globosum CBS 148.51] gi|88181163|gb|EAQ88631.1| CHGG_05250 [Chaetomium globosum CBS 148.51]
  misc_feature (8)..(296): NCBI GI: 85091052 Blast Desc: NCU09647 [Neurospora crassa OR74A] gi|28920095|gb|EAA29477.1| conserved [Neurospora crassa OR74A]
  misc_feature (1)..(288): NCBI GI: 242788360 Blast Desc: conserved [Talaromyces stipitatus ATCC 10500] gi|218721350|gb|EED20769.1| conserved [Talaromyces stipitatus ATCC 10500]
  misc_feature (30)..(290): NCBI GI: 256725972 Blast Desc: NECHADRAFT_94251 [Nectria haematococca mpVI 77-13-4]
  misc_feature (15)..(295): NCBI GI: 39971357 Blast Desc: MGG_10699 [Magnaporthe grisea 70-15] gi|145009411|gb|EDJ94111.1| MGG_10699 [Magnaporthe grisea 70-15]
  misc_feature (13)..(293): NCBI GI: 212544029 Blast Desc: conserved [Penicillium marneffei ATCC 18224] gi|210067076|gb|EEA21169.1| conserved [Penicillium marneffei ATCC 18224]
MAPKLLAVVVGALGLLILTSPTLAQSRSVKRGLVHIPNSQWPQDNAIWYQEGSDITWYYNYGEKPSPEFAGVSQARLEFVPQKWGQSSNPIDTSFSNYVGQLIANGTAIKNVLAYNEPEYGFDSGGAQLDPATAAKGWIADFVPLQQKGVRIGLPAVNGDDFGLNWLGQFMQSCSAQLNGRKCPYDFLPVHWYNDFSGLTDLIGKIESMFPGSKIWLTEFTDPHVDLATTQEFYKESIPWLDDSSLVERYSWFGAFRSSVSNVGANATFLNNAGKLTDIGSWYLGGEATGVPPTSG

SEQ ID NO: 20646 - DNA, 214 bp, Muscodor strobelii
  misc_feature: SGI EST ID NO. CUFF.48481.0
  misc_feature: Variant of the nucleotide sequence at SEQ ID NO 20644
ctcggggctcacagacctcattggcaagatcgagtccatgtttcccggttcgaagatctggctcacggaattcacagatccgcatgtggatcttgcgactacacaggagttttataaagagagcatcccgtggcttgatgactcgagcttggtcgagaggtactcctggtttggcgcattccggtcttctgttagcaacgttggagccaacgcg

SEQ ID NO: 20647 - DNA, 636 bp, Muscodor strobelii
  misc_feature: SGI cDNA ID NO. 566975
  misc_feature: Encodes the peptide sequence at SEQ ID NO 20648
atggggaactgccatagttcgccttcaggaagcaaaggcaagaaaacttcccatacgaactttgaattacatggcttagacccaataagctacattccagaagaaagcaaagacgagttacggtatcgcaaagtcacgctgatccattttgtcgcgtgtgacgtgttggagactggtggcaaccactgggacatattcttgcagactgggacagaatcatcagttcaaatcgaaatgcggcctggtgccttccctggacgcgaaggatatctcggtcgaatcgatataatggggcatcgttacggaataagtcgccatgctcacaagaactttactataaagccagcgcagtcgaaattcaccgtagccaatttcttagatgctattgtggaagccgataaccacagatatgagttcactcagtcggggcgagggtgtggtggatggatcagagaccagttccatcttttcgtaaaggcccgattgacatctcccggcttggaacgttcattcgagcaaactatcagcacattctgggccgaaggtcaatcccaaggtgaatggcctatcacttatggtacatatctacgcacgagagaaatcagccggaaagatgggaagagaagtaaaaagtaa

SEQ ID NO: 20648 - protein, 211 aa, Muscodor strobelii
  misc_feature: SGI Peptide ID NO. 566975
  misc_feature (27)..(195): NCBI GI: 240109465 Blast Desc: CPC735_029700 [Coccidioides posadasii C735 delta SOWgp]
  misc_feature (28)..(164): NCBI GI: 169782349 Blast Desc: [Aspergillus oryzae RIB40] gi|83774380|dbj|BAE64504.1| protein product [Aspergillus oryzae]
  misc_feature (45)..(195): NCBI GI: 145257211 Blast Desc: An04g02820 [Aspergillus niger] gi|134058562|emb|CAK96449.1| [Aspergillus niger]
  misc_feature (25)..(182): NCBI GI: 258569891 Blast Desc: [Uncinocarpus reesii 1704] gi|237904019|gb|EEP78420.1| [Uncinocarpus reesii 1704]
  misc_feature (28)..(182): NCBI GI: 238493639 Blast Desc: conserved [Aspergillus flavus NRRL3357] gi|220696550|gb|EED52892.1| conserved [Aspergillus flavus NRRL3357]
  misc_feature (28)..(182): NCBI GI: 169783816 Blast Desc: [Aspergillus oryzae RIB40] gi|83775114|dbj|BAE65237.1| protein product [Aspergillus oryzae]
  misc_feature (48)..(180): NCBI GI: 170118046 Blast Desc: [Laccaria bicolor S238N-H82] gi|164634823|gb|EDQ99143.1| [Laccaria bicolor S238N-H82]
  misc_feature (20)..(101): NCBI GI: 145246934 Blast Desc: An12g06600 [Aspergillus niger] gi|134080440|emb|CAK41189.1| [Aspergillus niger]
MGNCHSSPSGSKGKKTSHTNFELHGLDPISYIPEESKDELRYRKVTLIHFVACDVLETGGNHWDIFLQTGTESSVQIEMRPGAFPGREGYLGRIDIMGHRYGISRHAHKNFTIKPAQSKFTVANFLDAIVEADNHRYEFTQSGRGCGGWIRDQFHLFVKARLTSPGLERSFEQTISTFWAEGQSQGEWPITYGTYLRTREISRKDGKRSKK

SEQ ID NO: 20649 - DNA, 653 bp, Muscodor strobelii
  misc_feature: SGI EST ID NO. CUFF.48492.0
  misc_feature: Variant of the nucleotide sequence at SEQ ID NO 20647
caaagacgagttacggtatcgcaaagtcacgctgatccattttgtcgcgtgtgacgtgttggagactggtggcaaccactgggacatattcttgcagactgggacagaatcatcagttcaaatcgaaatgcggcctggtgccttccctggacgcgaaggatatctcggtcgaatcgatataatggggcatcgttacggaataagtcgccatgctcacaagaactttactataaagccagcgcagtcgaaattcaccgtagccaatttcttagatgctattgtggaagccgataaccacagatatgagttcactcagtcggggcgagggtgtggtggatggatcagagaccagttccatcttttcgtaaaggcccgattgacatctcccggcttggaacgttcattcgagcaaactatcagcacattctgggccgaaggtcaatcccaaggtgaatggcctatcacttatggtacatatctacgcacgagagaaatcagccggaaagatgggaagagaagtaaaaagtaagaaaggaagctttattcttcggctacatgtcgggcagatgttgcaaaggaaacttggataacaaatatgaagatgcagcccttagtggcgagactacatttcgaataactattgtttattctgc

SEQ ID NO: 20650 - DNA, 681 bp, Muscodor strobelii
  misc_feature: SGI cDNA ID NO. 566976
  misc_feature: Encodes the peptide sequence at SEQ ID NO 20651
atggtctcgttcacgtctctcctgcttgcggcgacgagcttggccagcacgactgttgctgtgcctattgcgctggcgactacgacggatctccaggttcttgataagcgcatcacgacgagccagacggggacgaacaatggatactattacagcttctggactgatggtgccggtactgttgactatgagaacgggtcgagcggtacttatagcataacctggtctggaaataacgggaattttgtcggtgggaagggttgggctactggctctactagaaacatcaacttctcaggtagctacaatcccaacggcaacagctatctctctgtctacggctggttccagaacccgctggttgagtactacatcgtcgagagctatgggacgtacaatcctagcacaggcttgacaaaacttggttccgtgacaagcgatggcgggacttacgatctgtacacggcaacgcgtaccaatgccccgtctatcgagggaacgtcgaccttcaagcagtactggtccgttcggcagagtaagaggacttctggaactgtgacaactgctaatcacttcaacgcttggaagaaccttggtctgactctgggtacttacaattaccagattgtggctactgagggctacttctctagtggatcggcaactattactgttagctag

SEQ ID NO: 20651 - protein, 226 aa, Muscodor strobelii
  misc_feature: SGI Peptide ID NO. 566976
  misc_feature (44)..(225): Pfam Id: PF00457 Pfam Desc: Glycosyl hydrolases family 11
  misc_feature (1)..(226): NCBI GI: 256731913 Blast Desc: NECHADRAFT_106153 [Nectria haematococca mpVI 77-13-4]
  misc_feature (20)..(226): NCBI GI: 69208489 Blast Desc: endo-beta-1,4-xylanase precursor [Botryotinia fuckeliana]
  misc_feature (1)..(225): NCBI GI: 67526311 Blast Desc: XYN1_EMENI Endo-1,4-beta-xylanase 1 precursor (Xylanase 1) (1,4-beta-D-xylan xylanohydrolase 1) [Aspergillus nidulans FGSC A4] gi|1722899|sp|P55332.1|XYNA_EMENI RecName: A; 1
  misc_feature (1)..(226): NCBI GI: 67904756 Blast Desc: XYN2_EMENI Endo-1,4-beta-xylanase 2 precursor (Xylanase 2) (1,4-beta-D-xylan xylanohydrolase 2) [Aspergillus nidulans FGSC A4] gi|146291103|sp|P55333.2|XYNB_EMENI RecName: B;
  misc_feature (1)..(225): NCBI GI: 28950192 Blast Desc: endo-1, 4-beta-xylanase B precursor [Neurospora crassa]
  misc_feature (1)..(225): NCBI GI: 164424328 Blast Desc: endo-1,4-beta-xylanase 2 precursor [Neurospora crassa OR74A] gi|157070468|gb|EAA28214.2| endo-1,4-beta-xylanase 2 precursor [Neurospora crassa OR74A]
  misc_feature (1)..(225): NCBI GI: 12006977 Blast Desc: AF301904_1 endo-1,4-B-xylanase B [Phanerochaete chrysosporium]
  misc_feature (1)..(225): NCBI GI: 167599626 Blast Desc: endo-1,4-beta-xylanase B precursor [Phanerochaete chrysosporium]
  misc_feature (1)..(225): NCBI GI: 12006979 Blast Desc: AF301905_1 endo-1,4-B-xylanase B [Phanerochaete chrysosporium]
  misc_feature (1)..(226): NCBI GI: 2959737 Blast Desc: xylanase [Emericella nidulans]
  misc_feature (34)..(225): SWISSPROT Homolog: EC 3.2.1.8 Endo-1,4-beta-xylanase
MVSFTSLLLAATSLASTTVAVPIALATTTDLQVLDKRITTSQTGTNNGYYYSFWTDGAGTVDYENGSSGTYSITWSGNNGNFVGGKGWATGSTRNINFSGSYNPNGNSYLSVYGWFQNPLVEYYIVESYGTYNPSTGLTKLGSVTSDGGTYDLYTATRTNAPSIEGTSTFKQYWSVRQSKRTSGTVTTANHFNAWKNLGLTLGTYNYQIVATEGYFSSGSATITVS

SEQ ID NO: 20652 - DNA, 333 bp, Muscodor strobelii
  misc_feature: SGI EST ID NO. CUFF.48501.0
  misc_feature: Variant of the nucleotide sequence at SEQ ID NO 20650
gcaaatcatcgccatttccaaatcctatgtcatgatactgatgttttgttataaggcttgacaaaacttggttccgtgacaagcgatggcgggacttacgatctgtacacggcaacgcgtaccaatgccccgtctatcgagggaacgtcgaccttcaagcagtactggtccgttcggcagagtaagaggacttctggaactgtgacaactgctaatcacttcaacgcttggaagaaccttggtctgactctgggtacttacaattaccagattgtggctactgagggctacttctctagtggatcggcaactattactgttagctagattgtg

SEQ ID NO: 20653 - DNA, 3696 bp, Muscodor strobelii
  misc_feature: SGI cDNA ID NO. 566977
  misc_feature: Encodes the peptide sequence at SEQ ID NO 20654
atgggtgtgaacggcctctggacggtcatccagccatgcgcccgaccgacgaatctcgctactctcaaccgaaagcgtctggctgttgatgcctctatctggatctaccagttcctcaaagcggtccgcgataaagaaggcaatgctctgcgcaactcccatgtcgttggattcttccgtcgcatatgcaaactgctgtggtttggcatccgccctgtctttgtcttcgatggaggtgctccagacctgaagcgccagaccatcaccggtcgcaagcgcagaagagagggccgtcgcgaagatgctgttcgaaccgccggcaaattgctggctgtgcagatgcagcgcatcgccgaagaacagggcgagaagcgtcaccgtagggctgaaatacagggtggaacggctagacccgagattgaagaacccgtcgaagaaattcccgatgtcgacaagctcgtttacgtcgatgaactgggcatgagccaaaaagaaagacagcagacaaggaagttcttcaaacaggatgcctaccatctcccagagatgagtggtagcattgagggcatgggccgaccggaagaccctcgcatcatgagtgtcgaagaactggaggactatgccagacagtttcaaagcggcgaggacatcaacctctatgactttagcaagatcgatttcgaaggtgaattcttcaagagtctgccacctgcagatagatacaatatccttaatgctgcaagattgcggagtcggttgagaatgggtttgagtaaagaccagcttgatggcatgttccccgatcgcatggccttttcaaggttccagatcgaaagagtcaaagaaagaaatcacctcactcagcgactgatgaaggaagctggaatgacgggaacagatctgactttaggtggcagcgcacggatcgcgggcgagaaagaccgcgagtatatcttagtcaagaatgatggagcagaaggtggatgggctcttggtgttgttagtagggaaaaagatcggggagagatacacaagcctatcgatgttgatgctattgatattcagtatcaagccaaagacgaagaattagagcaggacgaagatgactttgaagatgtcccaattcaaggcctcaatcgactacctaaaatcaacgccaccgcccacaatcagggcgcctcctctcacctcatcagtgtagaagaaaacgaggattctcttttcgttgacggagatgatgagggagacatggtgcagcttttcggcgctgaaagggagaatgctttgatcgaagacgaagaagaagacataaatcgagcaatcgccatgtcactaaaaaaccaacatggcgttggatccccttcaacacagctcatcgacgaggaagatgaggaagagttcgaagatgtgcccgcccccgaatggacgcagaaggctgcagaaaagccgaagcctgtagccaaggcgagtggcagcatgatagcccacatggttaacaatagagcgaatgccgctgttcccaaacgtcgacaaagcaatgccagtagcgacagcgaggatgatctgcgatcagcgctagctgccgcaaggaggaagaagcaaccgatatcgcagaaggtcgcccctcgccctgtgatgcccaatgtgaagaaccccttcgacgggcctctccccttcgaaaagctggactggaaatcaagcattttttctaagagcaaaccggaagcatcgtccaagcaacctttgacagctgaggatgatgaaggagagccagatgacgatgaagaactttcaggtgggtttgtacgagacgacgagctggacgacgataagcctaggccactacccccttggatgatggcggatgaaaccgatattcgacaaaagatgaaagagcaacaggaacgtgacaacgaggtaaatgaagctgagcgcgaggccgagctggaagaggagagacagcgacagaaagacgcaatcatcgagatcgagtcttcggagagtggcaatgattccgatattgagattgtcgaagctcccctcccgcgaatctcaagccctccgaagccaagtcagaatgttgaagaaggacgactatcacccgccactctgaccagagtcgaacctccgctaaatgccgatgccgccactgccgcggttgatacgcggcaggcgtcgaacttcccagaacaaaacgatgagatgaatatccctgaacgtccagggtctagctcccggcagtccagtaaatcgtcgtctccagatcctgagtttgaagaggttgagattgctcagggcccggagacgacaaatgaggacacgccaattaccgacacaccagtggcgccggaaccagactatgaacaagtgcctgacacagcaccaataggccctatcgaagcagactctgctggagccatagccgaaatcgtagacagtgcagcttttgccgatgccgaatttgatgacgacttcagtgaccctgaagaggaggagttactggctcagatggctgaagaggcagaagagcacgctcggtttgcaagccagctgaacaacaagtcgaccaaggagaatcaagaagcgtatgaaaaggagctaaaagcacttcgcacgcaacagaagaaggatcgcagagacgcagatgaagtaacgcagattatggtcactgaatgtcaagctctcctgaggtatttcggcatcccgtacatcacagcgcccatggaagcagaggctcaatgcgccgagcttgtcaatcttggacttgttgacggtattgtaaccgacgattcggatatcttccttttcggaggtacaagagtctacaagaacatgttcaatagcaacaaattcgtcgagtgctaccttggcaccgaccttgagagagagctgtcactttcccgcgaacagctcatttcaatagcccagctacttgggtctgattataccgaaggtcttcccggtgttggacctgtcaccgcagtcgaaattctctccgaattcccaggtcgagatgggctcagcgcgttccgtgaatggtggcaagacgttcaactaaacaatcgtccgaaagaagtagaccaaacgtcggggtttagaaagaaatttcgtaaatctcaaggcacaaagctctttctcccggccgggttcccaagcacggctgtctttgatgcctatcttcatcctgaggtcgagtccagtactgaacagtttcaatggggactgcctgatgtcgagggactcaggcaattcctcatggccactattggttggagccaagaacggactgatgaggttctcgttcccgtgatccgggacatgaatcgacgtgaagccgagggaacacagagtaatattacacgatatttcgaaggaggtgtaggtgttggagctaaagaagcttttgcaccgaggcagcgagtacagactagcaagcgtatgactgaagctgtgaataggctccgctctcaggctgttatcgacagcttagacgcgggtggtccggccgatgatgagagtttggcacctagctcagccgcgcgaaaacgcaaggccactaatggtgcagcgactgatgatgccgatgacaatgatcaagatggcgattataatgaagatgattctcagaatggtggcaagcgaaaaggtaaagggaaggctagaggcactgccaagaggaagaaggcttcttcgtga

SEQ ID NO: 20654 - protein, 1231 aa, Muscodor strobelii
  misc_feature: SGI Peptide ID NO. 566977
  misc_feature (431)..(448): Pfam Id: PF02809 Pfam Desc: Ubiquitin interaction motif
  misc_feature (897)..(985): Pfam Id: PF00867 Pfam Desc: XPG I-region
  misc_feature (1)..(98): Pfam Id: PF00752 Pfam Desc: XPG N-terminal domain
  misc_feature (1)..(1158): NCBI GI: 256735415 Blast Desc: NECHADRAFT_65808 [Nectria haematococca mpVI 77-13-4]
  misc_feature (1)..(1229): NCBI GI: 261355216 Blast Desc: DNA-repair protein rad13 [Verticillium albo-atrum VaMs.102]
  misc_feature (1)..(1157): NCBI GI: 171687395 Blast Desc: protein product [Podospora anserina] gi|170943659|emb|CAP69311.1| protein product [Podospora anserina]
  misc_feature (1)..(1157): NCBI GI: 85116383 Blast Desc: NCU07498 [Neurospora crassa OR74A] gi|28926846|gb|EAA35809.1| NCU07498 [Neurospora crassa OR74A]
  misc_feature (1)..(1157): NCBI GI: 116180814 Blast Desc: CHGG_01035 [Chaetomium globosum CBS 148.51] gi|88185332|gb|EAQ92800.1| CHGG_01035 [Chaetomium globosum CBS 148.51]
  misc_feature (1)..(1206): NCBI GI: 39975397 Blast Desc: MGG_00155 [Magnaporthe grisea 70-15] gi|145018994|gb|EDK03273.1| MGG_00155 [Magnaporthe grisea 70-15]
  misc_feature (1)..(1171): NCBI GI: 239609845 Blast Desc: DNA excision repair protein Rad2 [Ajellomyces dermatitidis ER-3]
  misc_feature (1)..(1215): NCBI GI: 226289636 Blast Desc: DNA-repair protein rad13 [Paracoccidioides brasiliensis Pb18]
  misc_feature (1)..(1215): NCBI GI: 225682262 Blast Desc: DNA-repair protein rad13 [Paracoccidioides brasiliensis Pb03]
  misc_feature (1)..(1215): NCBI GI: 226279758 Blast Desc: DNA-repair protein rad13 [Paracoccidioides brasiliensis Pb01]
MGVNGLWTVIQPCARPTNLATLNRKRLAVDASIWIYQFLKAVRDKEGNALRNSHVVGFFRRICKLLWFGIRPVFVFDGGAPDLKRQTITGRKRRREGRREDAVRTAGKLLAVQMQRIAEEQGEKRHRRAEIQGGTARPEIEEPVEEIPDVDKLVYVDELGMSQKERQQTRKFFKQDAYHLPEMSGSIEGMGRPEDPRIMSVEELEDYARQFQSGEDINLYDFSKIDFEGEFFKSLPPADRYNILNAARLRSRLRMGLSKDQLDGMFPDRMAFSRFQIERVKERNHLTQRLMKEAGMTGTDLTLGGSARIAGEKDREYILVKNDGAEGGWALGVVSREKDRGEIHKPIDVDAIDIQYQAKDEELEQDEDDFEDVPIQGLNRLPKINATAHNQGASSHLISVEENEDSLFVDGDDEGDMVQLFGAERENALIEDEEEDINRAIAMSLKNQHGVGSPSTQLIDEEDEEEFEDVPAPEWTQKAAEKPKPVAKASGSMIAHMVNNRANAAVPKRRQSNASSDSEDDLRSALAAARRKKQPISQKVAPRPVMPNVKNPFDGPLPFEKLDWKSSIFSKSKPEASSKQPLTAEDDEGEPDDDEELSGGFVRDDELDDDKPRPLPPWMMADETDIRQKMKEQQERDNEVNEAEREAELEEERQRQKDAIIEIESSESGNDSDIEIVEAPLPRISSPPKPSQNVEEGRLSPATLTRVEPPLNADAATAAVDTRQASNFPEQNDEMNIPERPGSSSRQSSKSSSPDPEFEEVEIAQGPETTNEDTPITDTPVAPEPDYEQVPDTAPIGPIEADSAGAIAEIVDSAAFADAEFDDDFSDPEEEELLAQMAEEAEEHARFASQLNNKSTKENQEAYEKELKALRTQQKKDRRDADEVTQIMVTECQALLRYFGIPYITAPMEAEAQCAELVNLGLVDGIVTDDSDIFLFGGTRVYKNMFNSNKFVECYLGTDLERELSLSREQLISIAQLLGSDYTEGLPGVGPVTAVEILSEFPGRDGLSAFREWWQDVQLNNRPKEVDQTSGFRKKFRKSQGTKLFLPAGFPSTAVFDAYLHPEVESSTEQFQWGLPDVEGLRQFLMATIGWSQERTDEVLVPVIRDMNRREAEGTQSNITRYFEGGVGVGAKEAFAPRQRVQTSKRMTEAVNRLRSQAVIDSLDAGGPADDESLAPSSAARKRKATNGAATDDADDNDQDGDYNEDDSQNGGKRKGKGKARGTAKRKKASS

SEQ ID NO: 20655 - DNA, 4242 bp, Muscodor strobelii
  misc_feature: SGI EST ID NO. CUFF.48507.0
  misc_feature: Variant of the nucleotide sequence at SEQ ID NO 20653
tcgaaatatcggcgccattcgtgtcaccagataccgatcttgactgatgttcgatcatctctccaatatgctctcaaaaataccaccctgagtctctgtccggtccagcgccttaccttgaggccgcttcatcatgggtgtgaacggcctctggacggtcatccagccatgcgcccgaccgacgaatctcgctactctcaaccgaaagcgtctggctgttgatgcctctatctggatctaccagttcctcaaagcggtccgcgataaagaaggcaatgctctgcgcaactcccatgtcgttggattcttccgtcgcatatgcaaactgctgtggtttggcatccgccctgtctttgtcttcgatggaggtgctccagacctgaagcgccagaccatcaccggtcgcaagcgcagaagagagggccgtcgcgaagatgctgttcgaaccgccggcaaattgctggctgtgcagatgcagcgcatcgccgaagaacagggcgagaagcgtcaccgtagggctgaaatacagggtggaacggctagacccgagattgaagaacccgtcgaagaaattcccgatgtcgacaagctcgtttacgtcgatgaactgggcatgagccaaaaagaaagacagcagacaaggaagttcttcaaacaggatgcctaccatctcccagagatgagtggtagcattgagggcatgggccgaccggaagaccctcgcatcatgagtgtcgaagaactggaggactatgccagacagtttcaaagcggcgaggacatcaacctctatgactttagcaagatcgatttcgaaggtgaattcttcaagagtctgccacctgcagatagatacaatatccttaatgctgcaagattgcggagtcggttgagaatgggtttgagtaaagaccagcttgatggcatgttccccgatcgcatggccttttcaaggttccagatcgaaagagtcaaagaaagaaatcacctcactcagcgactgatgaaggaagctggaatgacgggaacagatctgactttaggtggcagcgcacggatcgcgggcgagaaagaccgcgagtatatcttagtcaagaatgatggagcagaaggtggatgggctcttggtgttgttagtagggaaaaagatcggggagagatacacaagcctatcgatgttgatgctattgatattcagtatcaagccaaagacgaagaattagagcaggacgaagatgactttgaagatgtcccaattcaaggcctcaatcgactacctaaaatcaacgccaccgcccacaatcagggcgcctcctctcacctcatcagtgtagaagaaaacgaggattctcttttcgttgacggagatgatgagggagacatggtgcagcttttcggcgctgaaagggagaatgctttgatcgaagacgaagaagaagacataaatcgagcaatcgccatgtcactaaaaaaccaacatggcgttggatccccttcaacacagctcatcgacgaggaagatgaggaagagttcgaagatgtgcccgcccccgaatggacgcagaaggctgcagaaaagccgaagcctgtagccaaggcgagtggcagcatgatagcccacatggttaacaatagagcgaatgccgctgttcccaaacgtcgacaaagcaatgccagtagcgacagcgaggatgatctgcgatcagcgctagctgccgcaaggaggaagaagcaaccgatatcgcagaaggtcgcccctcgccctgtgatgcccaatgtgaagaaccccttcgacgggcctctccccttcgaaaagctggactggaaatcaagcattttttctaagagcaaaccggaagcatcgtccaagcaacctttgacagctgaggatgatgaaggagagccagatgacgatgaagaactttcaggtgggtttgtacgagacgacgagctggacgacgataagcctaggccactacccccttggatgatggcggatgaaaccgatattcgacaaaagatgaaagagcaacaggaacgtgacaacgaggtaaatgaagctgagcgcgaggccgagctggaagaggagagacagcgacagaaagacgcaatcatcgagatcgagtcttcggagagtggcaatgattccgatattgagattgtcgaagctcccctcccgcgaatctcaagccctccgaagccaagtcagaatgttgaagaaggacgactatcacccgccactctgaccagagtcgaacctccgctaaatgccgatgccgccactgccgcggttgatacgcggcaggcgtcgaacttcccagaacaaaacgatgagatgaatatccctgaacgtccagggtctagctcccggcagtccagtaaatcgtcgtctccagatcctgagtttgaagaggttgagattgctcagggcccggagacgacaaatgaggacacgccaattaccgacacaccagtggcgccggaaccagactatgaacaagtgcctgacacagcaccaataggccctatcgaagcagactctgctggagccatagccgaaatcgtagacagtgcagcttttgccgatgccgaatttgatgacgacttcagtgaccctgaagaggaggagttactggctcagatggctgaagaggcagaagagcacgctcggtttgcaagccagctgaacaacaagtcgaccaaggagaatcaagaagcgtatgaaaaggagctaaaagcacttcgcacgcaacagaagaaggatcgcagagacgcagatgaagtaacgcagattatggtcactgaatgtcaagctctcctgaggtatttcggcatcccgtacatcacagcgcccatggaagcagaggctcaatgcgccgagcttgtcaatcttggacttgttgacggtattgtaaccgacgattcggatatcttccttttcggaggtacaagagtctacaagaacatgttcaatagcaacaaattcgtcgagtgctaccttggcaccgaccttgagagagagctgtcactttcccgcgaacagctcatttcaatagcccagctacttgggtctgattataccgaaggtcttcccggtgttggacctgtcaccgcagtcgaaattctctccgaattcccaggtcgagatgggctcagcgcgttccgtgaatggtggcaagacgttcaactaaacaatcgtccgaaagaagtagaccaaacgtcggggtttagaaagaaatttcgtaaatctcaaggcacaaagctctttctcccggccgggttcccaagcacggctgtctttgatgcctatcttcatcctgaggtcgagtccagtactgaacagtttcaatggggactgcctgatgtcgagggactcaggcaattcctcatggccactattggttggagccaagaacggactgatgaggttctcgttcccgtgatccgggacatgaatcgacgtgaagccgagggaacacagagtaatattacacgatatttcgaaggaggtgtaggtgttggagctaaagaagcttttgcaccgaggcagcgagtacagactagcaagcgtatgactgaagctgtgaataggctccgctctcaggctgttatcgacagcttagacgcgggtggtccggccgatgatgagagtttggcacctagctcagccgcgcgaaaacgcaaggccactaatggtgcagcgactgatgatgccgatgacaatgatcaagatggcgattataatgaagatgattctcagaatggtggcaagcgaaaaggtaaagggaaggctagaggcactgccaagaggaagaaggcttcttcgtgatattaggtggcaatactaggtagttagaatgaggaaacctcatttctacggggatttcattcctacagtctaattcgtgaaaaccaacaacaagtcgccgtgaaatttcacgtttccttcactatcctcaagatagggcgatgccattacatttgttgtttgcgagctttgaatgaccaaccagccgttcatgatgtctcaatgctagcctttagacccttgactatcaatcgcccatgactatcactcatctaggagatgtctcaacactcgttttctaacaaatactccggaattgtttgatatgatctccagcgtgtcttcgctgttaacgcctcagcaccgatctagataaagtcccctctatgcaagcaatacgtgacgcaagctggagactttcgctacgaaacaag

SEQ ID NO: 20656 - DNA, 414 bp, Muscodor strobelii
  misc_feature: SGI cDNA ID NO. 566978
  misc_feature: Elevated expression when VOC is produced
  misc_feature: Encodes the peptide sequence at SEQ ID NO 20657
atggaggctgtgaccgatggcatacagcgagccagcatgagtgaatcccaagacaaggccgatgctgaggcttacctcaaatcacttcttaacaagaacttgcgtgttcatactaccgacggccggatgttcataggagcattcaaatgcactgaccctgaccgcaatgtcattctatcattgacatacgagtatcgccagccatctcaacagaagcttgctgaggcagctgtcaccgcacaaagcgcaggctccgaaacagtgcttgcggacatgacctcgagatatcttggccttgtcgtcattcctggagaacacattgtcaagatggaagtcgaagaattcatttctcaggtcaagagtcgctccatctgggaaagacgagatttatacggcagccagcaaatcatctga

SEQ ID NO: 20657 - protein, 137 aa, Muscodor strobelii
  misc_feature: SGI Peptide ID NO. 566978
  misc_feature (24)..(112): Pfam Id: PF01423 Pfam Desc: LSM domain
  misc_feature (18)..(125): NCBI GI: 261355215 Blast Desc: LSM domain-containing protein [Verticillium albo-atrum VaMs.102]
  misc_feature (22)..(120): NCBI GI: 46108038 Blast Desc: FG00901.1 [Gibberella zeae PH-1]
  misc_feature (21)..(114): NCBI GI: 258577265 Blast Desc: conserved [Uncinocarpus reesii 1704] gi|237903080|gb|EEP77481.1| conserved [Uncinocarpus reesii 1704]
  misc_feature (18)..(114): NCBI GI: 119178424 Blast Desc: CIMG_08048 [Coccidioides immitis RS] gi|240104859|gb|EER23054.1| LSM domain containing protein [Coccidioides posadasii C735 delta SOWgp]
  misc_feature (18)..(127): NCBI GI: 169767932 Blast Desc: [Aspergillus oryzae RIB40] gi|238484861|ref|XP_002373669.1| conserved [Aspergillus flavus NRRL3357] gi|83766292|dbj|BAE56435.1| protein product oryzae]
  misc_feature (18)..(125): NCBI GI: 145611740 Blast Desc: [Magnaporthe grisea 70-15] gi|145018995|gb|EDK03274.1| [Magnaporthe grisea 70-15]
  misc_feature (22)..(115): NCBI GI: 240279161 Blast Desc: conserved [Ajellomyces capsulatus H143]
  misc_feature (22)..(115): NCBI GI: 225555023 Blast Desc: LSM domain-containing protein [Ajellomyces capsulatus G186AR]
  misc_feature (18)..(115): NCBI GI: 226279798 Blast Desc: conserved [Paracoccidioides brasiliensis Pb01]
  misc_feature (18)..(122): NCBI GI: 121710344 Blast Desc: LSM domain protein [Aspergillus clavatus NRRL 1] gi|119400938|gb|EAW11362.1| LSM domain protein [Aspergillus clavatus NRRL 1]
  misc_feature: Useful for introducing or modulating the production of volatile compounds
MEAVTDGIQRASMSESQDKADAEAYLKSLLNKNLRVHTTDGRMFIGAFKCTDPDRNVILSLTYEYRQPSQQKLAEAAVTAQSAGSETVLADMTSRYLGLVVIPGEHIVKMEVEEFISQVKSRSIWERRDLYGSQQII

SEQ ID NO: 20658 - DNA, 1690 bp, Muscodor strobelii
  misc_feature: SGI EST ID NO. CUFF.48513.0
  misc_feature: Variant of the nucleotide sequence at SEQ ID NO 20656
tgtaaataagcacttacaggggtcccaaacagctgtacatgtagcttccaattgccagcatatcgataatgccctagtttacagctaaggcacgttaaggcttttagaaagcgcaccctgttcacccaactctacctgtccattgcaccatgaatgaataaagtttctttcacttgctttgggcctcagtttggctcgcaaaggaggatcatacaggcttgaagtggaacatggaggctgtgaccgatggcatacagcgagccagcatgagtgaatcccaagacaaggccgatgctgaggcttacctcaaatcacttcttaacaagaacttgcgtgttcatactaccgacggccggatgttcataggagcattcaaatgcactgaccctgaccgcaatgtcattctatcattgacatacgagtatcgccagccatctcaacagaagcttgctgaggcagctgtcaccgcacaaagcgcaggctccgaaacagtgcttgcggacatgacctcgagatatcttggccttgtcgtcattcctggagaacacattgtcaagatggaagtcgaagaattcatttctcaggtcaagagtcgctccatctgggaaagacgagatttatacggcagccagcaaatcatctgatcagaactcaagtgatccaatatcttcatccatcactgagtttagtactgttgaggctgttattatcgagcatcgaaaaggcgaagggtcgacactatcggggcagggacttgactagccatgcagacactgtcagtcctgcttcagctaaacagcaatcagtcacacttgctacaagccgccggggcgtcatcacgagactcgaaactacctaaagaggcggagttccttgatggcggcgtcaaccgtgcctggagcgaagaacgtgtaccagtgtaaagtgcaacagatcctatgctaccaacaccgacgaggaccatcttgcaaagccaaatgccaaaagtctacgtcactaacttatgttctgcaaaataagttcaattgcacagaagaacatcgcaaggctctagtatttcttcatacacatctctattggcatctgaaatctagagtggatcacgctgcacgcaacataattgaggggaaatctatcaccgaccgccggtcgtgataagtatacagtcgcatcctatgagcttgaatacaacatagccttacctcacttctttatgattacagtccataaatggtgttatactatatatgaagctcaaagtgcagatttatcattggcgacgaaaaatagtaacacggctccctggacttcaccaccttgcatttgtcataaaattgttaacctacagcatactacgacatggcagacgacacgcctacctttcggaaccccatcataaggggcttcaatccagacccgaccatttgcgtagtgcctgcaacgcagtcgaacccgactacctattttctttgcacctcaacgtttgaatattttccgggctgtcccatttacacctcaaccgatttgatcaactggaaattgattggccatgcccttagacgtcggagccagattgaaatgcggactgttgaaactggcgcaggcagctgggctagcacactgagatatcggccctcgcagaaacgttggtttctagcgaacggagtgtttcagagatatagaccgggat

SEQ ID NO: 20659 - DNA, 1719 bp, Muscodor strobelii
  misc_feature: SGI cDNA ID NO. 566979
  misc_feature: Encodes the peptide sequence at SEQ ID NO 20660
atggcagacgacacgcctacctttcggaaccccatcataaggggcttcaatccagacccgaccatttgcgtagtgcctgcaacgcagtcgaacccgactacctattttctttgcacctcaacgtttgaatattttccgggctgtcccatttacacctcaaccgatttgatcaactggaaattgattggccatgcccttagacgtcggagccagattgaaatgcggactgttgaaactggcgcaggcagctgggctagcacactgagatatcggccctcgcagaaacgttggtttctagcgaacggagtgtttcagagatatagaccgggatcagatacctattcgactgactttatcaaggaacggatattcccaagaggcttctacgtctacacggataacatctgggacgattctgcgtggtcggatccgatatattttgacaaccccggattcgaccaagaccttttctgggactatgatgacaaagtatacttatcaactactatgcgcttcgctgaccgtcatcccgactctaagttgaaggattttggtattcacatatcagagattgaactcactacaggacgaacattgacgcccccaaaagtcattcgcaaatctccccatggtatcgccgaaggctcacacattctgcgccgcggagcttactattatctcttcacagccgaaggtggtacagaggctggacatcaagaatgggtattcaggagtcgtgaaggtgtgtacggcccttgggaggcacagggcaaagcattgtggtacaatggaccggacgaggatgtgcagcgtacggggcacgctgacgtctttgaggatgggaaggggaattggtgggccgtccttttaggtgttcgccccctaagaggaccacacggcagatttctagagcctcagatgggtcgtgaaactttcctagtaaaggttgattgggtagatgactggccggtcttcaatgagggacgcaacatcacccttacaacgaacggccgtcaaatcactaagcagtcaatcttcaatccagggcaattgaagtgggaagctgatctggatagggaggatctagagcttggttggtatcagaaaaatactccattgaaatcatgtcatagtctgactcagaagcctgggtgcttacgcttgtacggcaattgttacaacttaagtagccccgaggcgcccgcgatgcttttgcggaagcaatcttcgtattcggaggtctttgaagcgaagatgcgcttcgatcctaggtcagagagctatgaagccggcgtcgtcctttggtggagtcaatattcgtacgcaacatgctccctcttcctcaaagagcttccaaacggccgactcgtgcggaccataaaatggcaactaccggcaggtacaccaggagaatctcactcacaatgtccgttttttgacgggcaggaagacgaagatgtagacacaatcgctcctgaagaagtgatcactatgcggattcaaacagcccttgataggtatcgaatggatgtttcgacagaaaaccatagagatactataatgattccttcttcgaaactcactgtcatgcctcccatcggcggtaccttctgcggagcaatgttcggtatctactctttcgggcaaggagagccagtacttgatccggcggaattctttgatatctcaatagcggaaacctcgaaggacttttggtga

SEQ ID NO: 20660 - protein, 572 aa, Muscodor strobelii
  misc_feature: SGI Peptide ID NO. 566979
  misc_feature (8)..(323): Pfam Id: PF04616 Pfam Desc: Glycosyl hydrolases family 43
  misc_feature (141)..(323): Pfam Id: PF04616 Pfam Desc: Glycosyl hydrolases family 43
  misc_feature (8)..(91): Pfam Id: PF04616 Pfam Desc: Glycosyl hydrolases family 43
  misc_feature (1)..(567): NCBI GI: 256724532 Blast Desc: NECHADRAFT_54713 [Nectria haematococca mpVI 77-13-4]
  misc_feature (2)..(568): NCBI GI: 261355405 Blast Desc: beta-xylosidase [Verticillium albo-atrum VaMs.102]
  misc_feature (8)..(569): NCBI GI: 116201327 Blast Desc: CHGG_08548 [Chaetomium globosum CBS 148.51] gi|88177066|gb|EAQ84534.1| CHGG_08548 [Chaetomium globosum CBS 148.51]
  misc_feature (8)..(559): NCBI GI: 238482775 Blast Desc: glycosyl hydrolase, [Aspergillus flavus NRRL3357] gi|220700676|gb|EED57014.1| glycosyl hydrolase, [Aspergillus flavus NRRL3357]
  misc_feature (8)..(559): NCBI GI: 115399790 Blast Desc: conserved [Aspergillus terreus NIH2624] gi|114191150|gb|EAU32850.1| conserved [Aspergillus terreus NIH2624]
  misc_feature (8)..(559): NCBI GI: 145231335 Blast Desc: An02g00140 [Aspergillus niger] gi|134056054|emb|CAK96229.1| protein product [Aspergillus niger]
  misc_feature (8)..(559): NCBI GI: 159123332 Blast Desc: glycosyl hydrolase, [Aspergillus fumigatus A1163]
  misc_feature (8)..(559): NCBI GI: 70986823 Blast Desc: glycosyl hydrolase [Aspergillus fumigatus Af293] gi|66846529|gb|EAL86861.1| glycosyl hydrolase, [Aspergillus fumigatus Af293]
  misc_feature (8)..(559): NCBI GI: 119483060 Blast Desc: beta-xylosidase [Neosartorya fischeri NRRL 181] gi|119409713|gb|EAW19661.1| beta-xylosidase [Neosartorya fischeri NRRL 181]
  misc_feature (7)..(559): NCBI GI: 255943947 Blast Desc: Pc20g01820 [Penicillium chrysogenum Wisconsin 54-1255] gi|211587476|emb|CAP85511.1| Pc20g01820 [Penicillium chrysogenum Wisconsin 54-1255]
  misc_feature (10)..(461): SWISSPROT Homolog: EC 3.2.1.37 Xylan 1,4-beta-xylosidase
MADDTPTFRNPIIRGFNPDPTICVVPATQSNPTTYFLCTSTFEYFPGCPIYTSTDLINWKLIGHALRRRSQIEMRTVETGAGSWASTLRYRPSQKRWFLANGVFQRYRPGSDTYSTDFIKERIFPRGFYVYTDNIWDDSAWSDPIYFDNPGFDQDLFWDYDDKVYLSTTMRFADRHPDSKLKDFGIHISEIELTTGRTLTPPKVIRKSPHGIAEGSHILRRGAYYYLFTAEGGTEAGHQEWVFRSREGVYGPWEAQGKALWYNGPDEDVQRTGHADVFEDGKGNWWAVLLGVRPLRGPHGRFLEPQMGRETFLVKVDWVDDWPVFNEGRNITLTTNGRQITKQSIFNPGQLKWEADLDREDLELGWYQKNTPLKSCHSLTQKPGCLRLYGNCYNLSSPEAPAMLLRKQSSYSEVFEAKMRFDPRSESYEAGVVLWWSQYSYATCSLFLKELPNGRLVRTIKWQLPAGTPGESHSQCPFFDGQEDEDVDTIAPEEVITMRIQTALDRYRMDVSTENHRDTIMIPSSKLTVMPPIGGTFCGAMFGIYSFGQGEPVLDPAEFFDISIAETSKDFW

SEQ ID NO: 20661 - DNA, 1990 bp, Muscodor strobelii
  misc_feature: SGI EST ID NO. CUFF.48510.0
  misc_feature: Variant of the nucleotide sequence at SEQ ID NO 20659
tacgtctacacggataacatctgggacgattctgcgtggtcggatccgatatattttgacaaccccggattcgaccaagacgtgagcgtcattcctggcattgtgcaattgattagttagtatttgtattaacgatggattgtgtagcttttctgggactatgatgacaaagtatacttatcaactactatgcgcttcgctgaccgtcatcccgactctaagttgaaggattttggtattcacatatcagagattgaactcactacaggacgaacattgacgcccccaaaagtcattcgcaaatctccccatggtatcgccgaaggctcacacattctgcgccgcggagcttactattatctcttcacagccgaaggtggtacagaggctggacatcaagaatgggtattcaggagtcgtgaaggtgtgtacggcccttgggaggcacagggcaaagcattgtggtacaatggaccggacgaggatgtgcagcgtacggggcacgctgacgtctttgaggatgggaaggggaattggtgggccgtccttttaggtgttcgccccctaagaggaccacacggcagatttctagagcctcagatgggtcgtgaaactttcctagtaaaggttgattgggtagatgactggccggtcttcaatgagggacgcaacatcacccttacaacgaacggccgtcaaatcactaagcagtcaatcttcaatccagggcaattgaagtgggaagctgatctggatagggaggatctagagcttggttggtatcagaaaaatactccattgaaatcatgtcatagtctgactcagaagcctgggtgcttacgcttgtacggcaattgttacaacttaagtagccccgaggcgcccgcgatgcttttgcggaagcaatcttcgtattcggaggtctttgaagcgaagatgcgcttcgatcctaggtcagagagctatgaagccggcgtcgtcctttggtggagtcaatattcgtacgcaacatgctccctcttcctcaaagagcttccaaacggccgactcgtgcggaccataaaatggcaactaccggcaggtacaccaggagaatctcactcacaatgtccgttttttgacgggcaggaagacgaagatgtagacacaatcgctcctgaagaagtgatcactatgcggattcaaacagcccttgataggtatcgaatggatgtttcgacagaaaaccatagagatactataatgattccttcttcgaaactcactgtcatgcctcccatcggcggtaccttctgcggagcaatgttcggtatctactctttcgggcaaggagagccagtacttgatccggcggaattctttgatatctcaatagcggaaacctcgaaggacttttggtgaaggcaacagatgttaggatagtgtaggtagtgattaaggagcaagtgttgagatagagatcacaggcttgacacgatacgttcagcattaagcacgtactaaaaccggcactcagaagaaaaggaactgctttggtcgggaagtagtgtcacagcagacctagatgacgaagtcgcaattgggtcaaacattatgcgagatgcactactccgagcccctattatcacgtatcaggtgccttagttacaaagcaagctaattgagcaaagtcgttacgctaactgaatgagcgacgaatctgtttgcattgcgcagtggagagtgttgggaagagtctgagtctttggtaaagacgcgagagttattcgaggcactcgcgactcctcgacctctttcatgagtgcggttcgagtcaatagctccatcatgagactaatcacaatggcaatgatactgaacaacgaggttttgtggtgcaaactgggtcatcgtcacaatgttctaagcttcgcttgtctctcatcaacatcaagatgtcaataattacttgcgagatcacaatagatggaaggcgagaatgcaaattttc

SEQ ID NO: 20662 - DNA, 1695 bp, Muscodor strobelii
  misc_feature: SGI cDNA ID NO. 566980
  misc_feature: Encodes the peptide sequence at SEQ ID NO 20663
atggcagacgacacgcctacctttcggaaccccatcataaggggcttcaatccagacccgaccatttgcgtagtgcctgcaacgcagtcgaacccgactacctattttctttgcacctcaacgtttgaatattttccgggctgtcccatttacacctcaaccgatttgatcaactggaaattgattggccatgcccttagacgtcggagccagattgaaatgcggactgttgaaactggcgcaggcagctgggctagcacactgagatatcggccctcgcagaaacgttggtttctagcgaacggagtgtttcagagatatagaccgggatcagatgaacggatattcccaagaggcttctacgtctacacggataacatctgggacgattctgcgtggtcggatccgatatattttgacaaccccggattcgaccaagaccttttctgggactatgatgacaaagtatacttatcaactactatgcgcttcgctgaccgtcatcccgactctaagttgaaggattttggtattcacatatcagagattgaactcactacaggacgaacattgacgcccccaaaagtcattcgcaaatctccccatggtatcgccgaaggctcacacattctgcgccgcggagcttactattatctcttcacagccgaaggtggtacagaggctggacatcaagaatgggtattcaggagtcgtgaaggtgtgtacggcccttgggaggcacagggcaaagcattgtggtacaatggaccggacgaggatgtgcagcgtacggggcacgctgacgtctttgaggatgggaaggggaattggtgggccgtccttttaggtgttcgccccctaagaggaccacacggcagatttctagagcctcagatgggtcgtgaaactttcctagtaaaggttgattgggtagatgactggccggtcttcaatgagggacgcaacatcacccttacaacgaacggccgtcaaatcactaagcagtcaatcttcaatccagggcaattgaagtgggaagctgatctggatagggaggatctagagcttggttggtatcagaaaaatactccattgaaatcatgtcatagtctgactcagaagcctgggtgcttacgcttgtacggcaattgttacaacttaagtagccccgaggcgcccgcgatgcttttgcggaagcaatcttcgtattcggaggtctttgaagcgaagatgcgcttcgatcctaggtcagagagctatgaagccggcgtcgtcctttggtggagtcaatattcgtacgcaacatgctccctcttcctcaaagagcttccaaacggccgactcgtgcggaccataaaatggcaactaccggcaggtacaccaggagaatctcactcacaatgtccgttttttgacgggcaggaagacgaagatgtagacacaatcgctcctgaagaagtgatcactatgcggattcaaacagcccttgataggtatcgaatggatgtttcgacagaaaaccatagagatactataatgattccttcttcgaaactcactgtcatgcctcccatcggcggtaccttctgcggagcaatgttcggtatctactctttcgggcaaggagagccagtacttgatccggcggaattctttgatatctcaatagcggaaacctcgaaggacttttggtga

SEQ ID NO: 20663 - protein, 564 aa, Muscodor strobelii
  misc_feature: SGI Peptide ID NO. 566980
  misc_feature (8)..(315): Pfam Id: PF04616 Pfam Desc: Glycosyl hydrolases family 43
  misc_feature (133)..(315): Pfam Id: PF04616 Pfam Desc: Glycosyl hydrolases family 43
  misc_feature (8)..(91): Pfam Id: PF04616 Pfam Desc: Glycosyl hydrolases family 43
  misc_feature (1)..(559): NCBI GI: 256724532 Blast Desc: NECHADRAFT_54713 [Nectria haematococca mpVI 77-13-4]
  misc_feature (2)..(560): NCBI GI: 261355405 Blast Desc: beta-xylosidase [Verticillium albo-atrum VaMs.102]
  misc_feature (8)..(561): NCBI GI: 116201327 Blast Desc: CHGG_08548 [Chaetomium globosum CBS 148.51] gi|88177066|gb|EAQ84534.1| CHGG_08548 [Chaetomium globosum CBS 148.51]
  misc_feature (8)..(551): NCBI GI: 238482775 Blast Desc: glycosyl hydrolase, [Aspergillus flavus NRRL3357] gi|220700676|gb|EED57014.1| glycosyl hydrolase, [Aspergillus flavus NRRL3357]
  misc_feature (8)..(551): NCBI GI: 145231335 Blast Desc: An02g00140 [Aspergillus niger] gi|134056054|emb|CAK96229.1| protein product [Aspergillus niger]
  misc_feature (8)..(551): NCBI GI: 115399790 Blast Desc: conserved [Aspergillus terreus NIH2624] gi|114191150|gb|EAU32850.1| conserved [Aspergillus terreus NIH2624]
  misc_feature (8)..(551): NCBI GI: 159123332 Blast Desc: glycosyl hydrolase, [Aspergillus fumigatus A1163]
  misc_feature (8)..(551): NCBI GI: 70986823 Blast Desc: glycosyl hydrolase [Aspergillus fumigatus Af293] gi|66846529|gb|EAL86861.1| glycosyl hydrolase, [Aspergillus fumigatus Af293]
  misc_feature (8)..(551): NCBI GI: 119483060 Blast Desc: beta-xylosidase [Neosartorya fischeri NRRL 181] gi|119409713|gb|EAW19661.1| beta-xylosidase [Neosartorya fischeri NRRL 181]
  misc_feature (7)..(551): NCBI GI: 255943947 Blast Desc: Pc20g01820 [Penicillium chrysogenum Wisconsin 54-1255] gi|211587476|emb|CAP85511.1| Pc20g01820 [Penicillium chrysogenum Wisconsin 54-1255]
  misc_feature (10)..(453): SWISSPROT Homolog: EC 3.2.1.37 Xylan 1,4-beta-xylosidase
MADDTPTFRNPIIRGFNPDPTICVVPATQSNPTTYFLCTSTFEYFPGCPIYTSTDLINWKLIGHALRRRSQIEMRTVETGAGSWASTLRYRPSQKRWFLANGVFQRYRPGSDERIFPRGFYVYTDNIWDDSAWSDPIYFDNPGFDQDLFWDYDDKVYLSTTMRFADRHPDSKLKDFGIHISEIELTTGRTLTPPKVIRKSPHGIAEGSHILRRGAYYYLFTAEGGTEAGHQEWVFRSREGVYGPWEAQGKALWYNGPDEDVQRTGHADVFEDGKGNWWAVLLGVRPLRGPHGRFLEPQMGRETFLVKVDWVDDWPVFNEGRNITLTTNGRQITKQSIFNPGQLKWEADLDREDLELGWYQKNTPLKSCHSLTQKPGCLRLYGNCYNLSSPEAPAMLLRKQSSYSEVFEAKMRFDPRSESYEAGVVLWWSQYSYATCSLFLKELPNGRLVRTIKWQLPAGTPGESHSQCPFFDGQEDEDVDTIAPEEVITMRIQTALDRYRMDVSTENHRDTIMIPSSKLTVMPPIGGTFCGAMFGIYSFGQGEPVLDPAEFFDISIAETSKDFW

SEQ ID NO: 20664 - DNA, 1990 bp, Muscodor strobelii; identical to SEQ ID NO: 20661
  misc_feature: SGI EST ID NO. CUFF.48510.0
  misc_feature: Variant of the nucleotide sequence at SEQ ID NO 20662

SEQ ID NO: 20665 - DNA, 282 bp, Muscodor strobelii
  misc_feature: SGI cDNA ID NO. 566981
  misc_feature: Encodes the peptide sequence at SEQ ID NO 20666
atgtgcgtctcttacaccacccgtcacgtatgcccctgcggccgaaccattcgcggcagctacgacgagaccaagtgcactgacgcgaaggagaaaggcctgtctgtccaagactgttccggtcattgtcaccggaaacaagactacttcttcgaccagtgcgactcttgcaagggtagcaataacttcagccagatcaccgctaagatgaccaagcctagcggtgatcatgtgagcctcgtcaccgagtttcgtccctctgagctcaaaaaattcgattga

SEQ ID NO: 20666 - protein, 93 aa, Muscodor strobelii
  misc_feature: SGI Peptide ID NO. 566981
MCVSYTTRHVCPCGRTIRGSYDETKCTDAKEKGLSVQDCSGHCHRKQDYFFDQCDSCKGSNNFSQITAKMTKPSGDHVSLVTEFRPSELKKFD

SEQ ID NO: 20667 - DNA, 555 bp, Muscodor strobelii
  misc_feature: SGI cDNA ID NO. 566982
  misc_feature: Encodes the peptide sequence at SEQ ID NO 20668
atggcatgccccttcaaacctggccaagatgctccaagagagtatgtggacaaaaaaattacggaaagctctgagaagccagcgctgaaagtcaatgatggtgctcttctacccattcctcagcctccggctcactggtttgtcggaaatctcctggagatggagccggcattcccatcgaaggcaatctggcgtctgcgatctatttacggtgatatcttcaaactcgacattgtttcggcacagatgatcgtcgtgtcctcctatgaactcatcaacgaggttctggataccagccgcttcatcaaacaaccttctggagggttgatacagacaagagcacttataggagacggcttgttcactgcatatgctggggaagagaattggggtatcgctcaccgactcttgatgcccatcttcgggccattggcgatcaagaagatgtttcctgaaatgcaggacatcatttcgcagatgattttgaaatgggacaggctcggtgccaataatgagatccttgccgcggatgacttcactataagtcttccctaa

SEQ ID NO: 20668 - protein, 184 aa, Muscodor strobelii
  misc_feature: SGI Peptide ID NO. 566982
  misc_feature (40)..(96): Pfam Id: PF00067 Pfam Desc: Cytochrome P450
  misc_feature (1)..(180): NCBI GI: 171687609 Blast Desc: protein product [Podospora anserina] gi|170943766|emb|CAP69418.1| protein product [Podospora anserina]
  misc_feature (37)..(180): NCBI GI: 189208193 Blast Desc: bifunctional P-450/NADPH-P450 reductase [Pyrenophora tritici-repentis Pt-1C-BFP] gi|187976523|gb|EDU43149.1| bifunctional P-450/NADPH-P450 reductase [Pyrenophora Pt-1C-BFP]
  misc_feature (36)..(180): NCBI GI: 238484449 Blast Desc: P450 family fatty acid hydroxylase, [Aspergillus flavus NRRL3357] gi|220701513|gb|EED57851.1| P450 family fatty acid hydroxylase, [Aspergillus flavus NRRL3357]
  misc_feature (38)..(180): NCBI GI: 261356990 Blast Desc: bifunctional P-450:NADPH-P450 reductase [Verticillium albo-atrum VaMs.102]
  misc_feature (36)..(180): NCBI GI: 169767552 Blast Desc: [Aspergillus oryzae RIB40] gi|83766102|dbj|BAE56245.1| protein product [Aspergillus oryzae]
  misc_feature (39)..(180): NCBI GI: 121703331 Blast Desc: NADPH cytochrome P450 [Aspergillus clavatus NRRL 1] gi|119398073|gb|EAW08504.1| NADPH cytochrome P450 [Aspergillus clavatus NRRL 1]
  misc_feature (36)..(180): NCBI GI: 154298449 Blast Desc: BC1G_11409 [Botryotinia fuckeliana B05.10] gi|150858005|gb|EDN33197.1| BC1G_11409 [Botryotinia fuckeliana B05.10]
  misc_feature (29)..(180): NCBI GI: 39942060 Blast Desc: MGG_10879 [Magnaporthe grisea 70-15] gi|145009612|gb|EDJ94268.1| MGG_10879 [Magnaporthe grisea 70-15] gi|194338881|gb|ACF49357.1| Pmc2 [Magnaporthe oryzae]
  misc_feature (37)..(180): NCBI GI: 255944421 Blast Desc: Pc20g04310 [Penicillium chrysogenum Wisconsin 54-1255] gi|211587713|emb|CAP85760.1| Pc20g04310 [Penicillium chrysogenum Wisconsin 54-1255]
  misc_feature (36)..(180): NCBI GI: 256724530 Blast Desc: NECHADRAFT_98004 [Nectria haematococca mpVI 77-13-4]
  misc_feature (37)..(180): SWISSPROT Homolog: EC 1.6.2.4 NADPH--hemoprotein reductase
  misc_feature (37)..(180): SWISSPROT Homolog: EC 1.14.14.1 Unspecific monooxygenase
MACPFKPGQDAPREYVDKKITESSEKPALKVNDGALLPIPQPPAHWFVGNLLEMEPAFPSKAIWRLRSIYGDIFKLDIVSAQMIVVSSYELINEVLDTSRFIKQPSGGLIQTRALIGDGLFTAYAGEENWGIAHRLLMPIFGPLAIKKMFPEMQDIISQMILKWDRLGANNEILAADDFTISLP

SEQ ID NO: 20669 - DNA, 5554 bp, Muscodor strobelii
  misc_feature: SGI EST ID NO. CUFF.48674.0
  misc_feature: Variant of the nucleotide sequence at SEQ ID NO 20667
cttgatacgacgatgaaactggtttcaacatgaggtgttctcttgtacacattttggaccaccgaagacttctgttctatcctcaacattgctgactaaacctgcagtctaccatatgctcaaacccacatagctccctacaggcaatcacaaaaactcacagacgcttattcagaattacccgttgttgtttatccgcagacacctcccattgcttatgccgaacatcatcgtcaatgatcaatagtaggcggcttggatatgtccacggtttgtcagatggcgacttgatcctgcctcgactgaatcgtctcccccgctgaattaaaattaatatgatgaagcctaagtttccctatgctcacagtttgcgcttgtctactctctaattcagaggcgggagttaagacagcgcttctgagcgatctctacagccgtctcctctcagaacacaacctggtgttttggaaagacgaatttgatactaataggatccctatcacccgcgtagatcgatcaattgtacttggataaagtatagttgagcgacaagtcggtagtaaagatgtgtcttttttcttgatctgctcgatattcctgcgaggatgtaaggtggcttccgtaaagcggtgagtagggaggtgagccccaggcaagactctgtacggcaagtacttttgcgagggctctgatttcgtgtagtgtctcaattgaaagatcagacaaatgtctgggtgagggttcgatttagctggcgtgcaggtctcctcgtgatatatcacaattcatgaatgaaatagtattacgcgcaaagttctgcacggtcattcgattttccgtacatgatcatgattgcaatcttataatatcgcttccgccgattcgttgccctggagaatgcgtcgcagattctatagcgataatagcagaccgcggttgtgatttcatctgtagcgtaccgtacgcgttgtcgctctttagtgaacagggcgagcctccaactggctgacgtattttagatatcgcataactcatacgcgaggatgacggacgttgaagttttgacggacgatccgataaatgcaaggcgagggttgcgtacaatgtgcatgcatgcgcggacggtcggagggtgacaaccaattggcaaagttgggacatgtccacttgatgacaacacgcaaggatccgactgcctttgcccactctgacatcaaaattgcgactgctctctattaccatttcaggtttatcagatcgtacttcaatagcgagctgcatgcggcatactcaagataccgtgtaggggcggcctgatcgtattgagaaaaatggatgccttgagcggatggaccgaggtctcgcgccttcgtccgtttcgaaagaaacgtcgcatgtagcatggcaagatataaagatggtgaagtatggcaacgacgaagctgatcggatcatcagatcattttccatatatcgtgatatctggatacaacaattgtcagcactatttagacatctgtcaactctgaaaaacgctcatcaagaatggcatgccccttcaaacctggccaagatgctccaagagagtatgtggacaaaaaaattacggaaagctctgagaagccagcgctgaaagtcaatgatggtgctcttctacccattcctcagcctccggctcactggtttgtcggaaatctcctggagatggagccggcattcccatcgaaggcaatctggcgtctgcgatctatttacggtgatatcttcaaactcgacattgtttcggcacagatgatcgtcgtgtcctcctatgaactcatcaacgaggttctggataccagccgcttcatcaaacaaccttctggagggttgatacagacaagagcacttataggagacggcttgttcactgcatatgctggggaagagaattggggtatcgctcaccgactcttgatgcccatcttcgggccattggcgatcaagaagatgtttcctgaaatgcaggacatcatttcgcagatgattttgaaatgggacaggctcggtgccaataatgagatccttgccgcggatgacttcactaggatggcatttgatgtgatcgggctatgcgcattctcgtaccgattcaacagcttctaccgagatgagattcattctttcgcgcgacaaatggctgaagtacttatcgagtgcgggaaacggacaatgcggacctcggtcgagacatatcttcgatacaagtctgcagagcagttccaaaacaacatcaatgctatgtggcaactaacagatgaaatgattgccgagcgcaaagcaaatcctgagcctgactcgaaggatatacttaacgcaatgttgaacggcagagaccccgtgactggtaagaaaatgacggacgagaatatccgctataatatggttacattcctggccgctggacatgagaccacgagtgcaactctgtctttcttgttctatcatctgcttaagaaccctgcgacatatcataaagcgcaggctgaggtcgataaggtggtgggtgatgctgtgctgcgagtggatcatctaccacagctcaaatatatcgaagcttgtatacgtgagacgcttcgagtacaaggcccggttgcaaatcacttctgcaaaccactagaggacactgtgattgggggcaaataccgtgtcaaggccgatcaaagcatctgggtcaatttgacgggcttgcatcatgacccaaaggtgtggggagatgatcatgatgtgttccgccccgagcgacttatggacggaggctgggaagcgttaccgcccaatgcctggaagccgttcggaaatggagacagagcttgtatcggacgcgcattggcggaacaggagatgataatgggtgtgaccatgatgtaagttatctgagctataagatatcagaaataagttctttgttttaaaacccgcggccccgcaaaaagtcgtaaaaaataactaacccaatacctttctggctaccagacttcagcggttccaggtgactatggctgaccctggctacgatctacgtgggcattttgcttcgttccaaatgggggattgttcctaatgatcttcatagggctgaagagcacgctgacagtcaaacctgatgagttcaaattcaaggtcgcccgacggtcggggcgaggaacaacacttgggcttcctggaaatctatcttcggtttcgaatcagcttccacatgctagtcatggaacccacgatgtggcaacagggaagggaagttccgggacgaaactgctgatcctctatgggtcgaacgcaggaacctgcaaattcatggccgaggaccttgagacggaagctaaagctcgtggatttactgcaatcgtgaaaacaatggacgagggcactgaatatcttccacatgactacccagttgtcatcatcacaccatcatatgaaggcaagccagctgacaatgctaggaagtttgtttcttggctcgagactggcaagcaagacgggctcagaggcgtttcttacgcagtattcggtgttggtaacagcgagtggatgaatactttccacaaggttcccaagctcgtggacagtcaaatgagcgaattgggcgccaaaagactgattgcggctcagtttgtggatgttaaagaggacctcgttggttcatgggaagattggcgcgatgaacttctcaccgcttctgggttcaaagctacgaaagctaactccgccgagctcgatgtcatcgttgacaaacctggaactgtagacctccttgctggcgagaagacttctaccggacttgtgagaatcaacaaacaaattgctggaactgaatctggccctgcgaaaagacacatagaaattcagctacctgagggcgcgacgtacgaacctggagactatcttgtggtcttgcccaccaatcctccggatcttgttaatcgggtttgcgctcattttggactgaacatggatgacgttgtgacgatcaaaggcactaccaaagggtttctgaccggcaatggtccaagtacggtagctgagatcatcggtgctcgcgtcgaactgacaacccctgctactaagcgccaaatcgaatctatcgcaaatatagcggaaggagaggaacagatggagcttcagaatcttgttgcttccgacctaagcttcaaggaagtgatggtcaagcgtatttcggtgcttgacatccttgaagaccatcctacggcaaagctttcttttggagcattcctcgatatgctccgcccgttgacaccgcgtcaatactcaatctcttcatctccctttgtaattggagagggccaagcacaggagagcacaattacttcgctcacgttcgacgttcactcggctcctgctcgtagtggtcacgggcgtcaattccaaggtgtagcttcaacatacctcgcgactcgaatgcccgggtcaagcatacgatgcttcatacgccgatcgaataccggatttcatctaccaaatgatgcagctacacctatcattctaattgctgcgggtaccggaattgcgcctatgcgaggcttcattcagcaacgggccatcctagcgcagaacaaatcgaacgaagtcgggcgcacgattctgtacttcgggtgtcgagacgccgagcatgatttcctgtacgcagatgagctgcgacaatgggaagctcaaggcgtattggacttgcggcctacattttcacgggcttcgaaagaagtcgagggatgtaagtacacgtatgaacgaatgtggcaagagagggaagagcttcgagagctgttccgacaaggagccaaggtgtttgtctgtggctcggcgagtaagcttgcgaaaagtactaatgacgtcgcgaagaaaatttaccttgatgggaagcctggaagaactgaacaggaagccgaggcgtggctggacgagatccgggaagttagatatgtgagcgatgtgtttgactaagcttggtgaatggggtttgacattttgtccaaatggaagtctcgccgatttcgcccgtcacttgtagttagatttgaatattacaatcgcggaactgttggtcgcctacgaaaatgcaattaacactcgtgtagaaagagtaatagtaggatgactttctaactggcttccgctggtatatgtacacgactaaactcccgtatcatgttcctagacgcgtaccgtaccgcatcgtttgcttggactattgattgtttttccctccttgtagtgtgctattctggcatcaagagtttttctgataccggccagcgcgttataaggacgacggctacatgtagcatttcagcctactggaaatcgcggatgatagtcgcagtcttgttcagtatgcagttccgccgaatgatgggtcgtaacccgaatatggcgggattgagggttttcgatcatcatacaggcgggaggttagttgggcagcgcattgcgcaatatgaagcctgaatcgcagattcccatatcctcacctattcttggatcaccgagacttgag

SEQ ID NO: 20670 - DNA, 2598 bp, Muscodor strobelii
  misc_feature: SGI cDNA ID NO. 566983
  misc_feature: Encodes the peptide sequence at SEQ ID NO 20671
atgcggacctcggtcgagacatatcttcgatacaagtctgcagagcagttccaaaacaacatcaatgctatgtggcaactaacagatgaaatgattgccgagcgcaaagcaaatcctgagcctgactcgaaggatatacttaacgcaatgttgaacggcagagaccccgtgactggtaagaaaatgacggacgagaatatccgctataatatggttacattcctggccgctggacatgagaccacgagtgcaactctgtctttcttgttctatcatctgcttaagaaccctgcgacatatcataaagcgcaggctgaggtcgataaggtggtgggtgatgctgtgctgcgagtggatcatctaccacagctcaaatatatcgaagcttgtatacgtgagacgcttcgagtacaaggcccggttgcaaatcacttctgcaaaccactagaggacactgtgattgggggcaaataccgtgtcaaggccgatcaaagcatctgggtcaatttgacgggcttgcatcatgacccaaaggtgtggggagatgatcatgatgtgttccgccccgagcgacttatggacggaggctgggaagcgttaccgcccaatgcctggaagccgttcggaaatggagacagagcttgtatcggacgcgcattggcggaacaggagatgataatgggtgtgaccatgatgacttcagcggttccagggctgaagagcacgctgacagtcaaacctgatgagttcaaattcaaggtcgcccgacggtcggggcgaggaacaacacttgggcttcctggaaatctatcttcggtttcgaatcagcttccacatgctagtcatggaacccacgatgtggcaacagggaagggaagttccgggacgaaactgctgatcctctatgggtcgaacgcaggaacctgcaaattcatggccgaggaccttgagacggaagctaaagctcgtggatttactgcaatcgtgaaaacaatggacgagggcactgaatatcttccacatgactacccagttgtcatcatcacaccatcatatgaaggcaagccagctgacaatgctaggaagtttgtttcttggctcgagactggcaagcaagacgggctcagaggcgtttcttacgcagtattcggtgttggtaacagcgagtggatgaatactttccacaaggttcccaagctcgtggacagtcaaatgagcgaattgggcgccaaaagactgattgcggctcagtttgtggatgttaaagaggacctcgttggttcatgggaagattggcgcgatgaacttctcaccgcttctgggttcaaagctacgaaagctaactccgccgagctcgatgtcatcgttgacaaacctggaactgtagacctccttgctggcgagaagacttctaccggacttgtgagaatcaacaaacaaattgctggaactgaatctggccctgcgaaaagacacatagaaattcagctacctgagggcgcgacgtacgaacctggagactatcttgtggtcttgcccaccaatcctccggatcttgttaatcgggtttgcgctcattttggactgaacatggatgacgttgtgacgatcaaaggcactaccaaagggtttctgaccggcaatggtccaagtacggtagctgagatcatcggtgctcgcgtcgaactgacaacccctgctactaagcgccaaatcgaatctatcgcaaatatagcggaaggagaggaacagatggagcttcagaatcttgttgcttccgacctaagcttcaaggaagtgatggtcaagcgtatttcggtgcttgacatccttgaagaccatcctacggcaaagctttcttttggagcattcctcgatatgctccgcccgttgacaccgcgtcaatactcaatctcttcatctccctttgtaattggagagggccaagcacaggagagcacaattacttcgctcacgttcgacgttcactcggctcctgctcgtagtggtcacgggcgtcaattccaaggtgtagcttcaacatacctcgcgactcgaatgcccgggtcaagcatacgatgcttcatacgccgatcgaataccggatttcatctaccaaatgatgcagctacacctatcattctaattgctgcgggtaccggaattgcgcctatgcgaggcttcattcagcaacgggccatcctagcgcagaacaaatcgaacgaagtcgggcgcacgattctgtacttcgggtgtcgagacgccgagcatgatttcctgtacgcagatgagctgcgacaatgggaagctcaaggcgtattggacttgcggcctacattttcacgggcttcgaaagaagtcgagggatgtaagtacacgtatgaacgaatgtggcaagagagggaagagcttcgagagctgttccgacaaggagccaaggtgtttgtctgtggctcggcgagtaagcttgcgaaaagtactaatgacgtcgcgaagaaaatttaccttgatgggaagcctggaagaactgaacaggaagccgaggcgtggctggacgagatccgggaagttagatatgtgagcgatgtgtttgactaa

SEQ ID NO: 20671 - protein, 865 aa, Muscodor strobelii
  misc_feature: SGI Peptide ID NO. 566983
  misc_feature (468)..(682): Pfam Id: PF00667 Pfam Desc: FAD binding domain
  misc_feature (300)..(432): Pfam Id: PF00258 Pfam Desc: Flavodoxin
  misc_feature (714)..(829): Pfam Id: PF00175 Pfam Desc: Oxidoreductase NAD-binding domain
  misc_feature (1)..(254): Pfam Id: PF00067 Pfam Desc: Cytochrome P450
  misc_feature (491)..(682): Pfam Id: PF00667 Pfam Desc: FAD binding domain
  misc_feature (26)..(225): Pfam Id: PF00067 Pfam Desc: Cytochrome P450
  misc_feature (2)..(865): NCBI GI: 189208193 Blast Desc: bifunctional P-450/NADPH-P450 reductase [Pyrenophora tritici-repentis Pt-1C-BFP] gi|187976523|gb|EDU43149.1| bifunctional P-450/NADPH-P450 reductase [Pyrenophora Pt-1C-BFP]
  misc_feature (2)..(864): NCBI GI: 171687609 Blast Desc: protein product [Podospora anserina] gi|170943766|emb|CAP69418.1| protein product [Podospora anserina]
  misc_feature (2)..(864): NCBI GI: 171680480 Blast Desc: protein product [Podospora anserina] gi|170939867|emb|CAP65093.1| protein product [Podospora anserina]
  misc_feature (8)..(865): NCBI GI: 46110180 Blast Desc: C505_FUSOX Bifunctional P-450:NADPH-P450 reductase (Fatty acid omega-hydroxylase) (P450foxy) [Gibberella zeae PH-1]
  misc_feature (8)..(865): NCBI GI: 22653677 Blast Desc: C505_FUSOX RecName: Full=Bifunctional P-450:NADPH-P450 reductase; AltName: Full=Fatty acid omega-hydroxylase; AltName: Full=Cytochrome P450foxy; Includes: RecName: Full=Cytochrome P450
  misc_feature (15)..(865): NCBI GI: 189210762 Blast Desc: bifunctional P-450/NADPH-P450 reductase [Pyrenophora tritici-repentis Pt-1C-BFP] gi|187977805|gb|EDU44431.1| bifunctional P-450/NADPH-P450 reductase [Pyrenophora Pt-1C-BFP]
  misc_feature (6)..(864): NCBI GI: 169623638 Blast Desc: SNOG_15063 [Phaeosphaeria nodorum SN15] gi|160705015|gb|EAT77606.2| SNOG_15063 [Phaeosphaeria nodorum SN15]
  misc_feature (16)..(865): NCBI GI: 256721578 Blast Desc: NECHADRAFT_37323 [Nectria haematococca mpVI 77-13-4]
  misc_feature (9)..(865): NCBI GI: 261356990 Blast Desc: bifunctional P-450:NADPH-P450 reductase [Verticillium albo-atrum VaMs.102]
  misc_feature (2)..(864): NCBI GI: 238842369 Blast Desc: fatty acid hydroxylase [Microsporum canis CBS 113480]
  misc_feature (8)..(865): SWISSPROT Homolog: EC 1.6.2.4 NADPH--hemoprotein reductase
  misc_feature (8)..(865): SWISSPROT Homolog: EC 1.14.14.1 Unspecific monooxygenase
MRTSVETYLRYKSAEQFQNNINAMWQLTDEMIAERKANPEPDSKDILNAMLNGRDPVTGKKMTDENIRYNMVTFLAAGHETTSATLSFLFYHLLKNPATYHKAQAEVDKVVGDAVLRVDHLPQLKYIEACIRETLRVQGPVANHFCKPLEDTVIGGKYRVKADQSIWVNLTGLHHDPKVWGDDHDVFRPERLMDGGWEALPPNAWKPFGNGDRACIGRALAEQEMIMGVTMMTSAVPGLKSTLTVKPDEFKFKVARRSGRGTTLGLPGNLSSVSNQLPHASHGTHDVATGKGSSGTKLLILYGSNAGTCKFMAEDLETEAKARGFTAIVKTMDEGTEYLPHDYPVVIITPSYEGKPADNARKFVSWLETGKQDGLRGVSYAVFGVGNSEWMNTFHKVPKLVDSQMSELGAKRLIAAQFVDVKEDLVGSWEDWRDELLTASGFKATKANSAELDVIVDKPGTVDLLAGEKTSTGLVRINKQIAGTESGPAKRHIEIQLPEGATYEPGDYLVVLPTNPPDLVNRVCAHFGLNMDDVVTIKGTTKGFLTGNGPSTVAEIIGARVELTTPATKRQIESIANIAEGEEQMELQNLVASDLSFKEVMVKRISVLDILEDHPTAKLSFGAFLDMLRPLTPRQYSISSSPFVIGEGQAQESTITSLTFDVHSAPARSGHGRQFQGVASTYLATRMPGSSIRCFIRRSNTGFHLPNDAATPIILIAAGTGIAPMRGFIQQRAILAQNKSNEVGRTILYFGCRDAEHDFLYADELRQWEAQGVLDLRPTFSRASKEVEGCKYTYERMWQEREELRELFRQGAKVFVCGSASKLAKSTNDVAKKIYLDGKPGRTEQEAEAWLDEIREVRYVSDVFD

SEQ ID NO: 20672 - DNA, 5554 bp, Muscodor strobelii; identical to SEQ ID NO: 20669
  misc_feature: SGI EST ID NO. CUFF.48674.0
  misc_feature: Variant of the nucleotide sequence at SEQ ID NO 20670

SEQ ID NO: 20673 - DNA, 1563 bp, Muscodor strobelii
  misc_feature: SGI cDNA ID NO. 566984
  misc_feature: Encodes the peptide sequence at SEQ ID NO 20674
atggatccaaggtcggtgaaccactcacctgagtactattacgagagtcctcagtaccaaccccgagatccctttgacaacaagcatcagtcgacgagtcatcagtacagtgaaccccagggttacggtccagtccaaggatcttatccgccagagacaccgatcgtacaatggcgtacagggacagattcaccaggtcaagacccaactggcaagcctcgggaagagacctacttccttgacagatttcgaatgtcctggatatttgagattatctgcgaggtcttcagtttagcgtctttgttggctctgatcatccttctcacccgtcttgatggccgacctttgtcaacatggaccatcgccgtatctcctaatgctgtaatcgctatcctctcgatcgctaccagggcttctcttgtgtatgccctaggtcaagtcgtcagtcagctcaaatggctgcatctcgtgaggaagccagacagtcttgcagaccttcaacattatgatgatgcatcgcgcggccctctcggcgcagccagaatattttggactgtgcggtctgcgtcctttatcacttatattgcttgtttggcaatactcctttccctggcgtttgaacctttctctcaacaattgcttcattatgccgagcgtaacatcactgtcgacggtgtccagtcatcggtatcatattctacagcgtatgactatggaaatgaaggcgttgatggagcctcagctgtcataattcgccccagagacaatggcatgacggccgcggtcgtaaatggcttatacggcgtcgcgcgagacccgccgtttacgtgttctggtgcatcctgttcatatccagatttcactacgtttggcgtctgtagcgagtgcttggatgttacttcgaccacagtcaagaaacatgttaacatatcgtttggagaagcatacagcttcacaacacctaataacttatcaatgatagcctctgcgttcgtggatgcgcattctggctttgcccatacgacaatcaacgcaacctcgagaattttgaatggcgcattcgctgggctcggaatgccgatgaacgcatcgattatccgatttccagacgagaatggcgagcagcagatcatcaagctgaacaactccgatgttcctgcttacgatacaccgttacaccgcgtgcttgcacccctcgatcctgccgactcgttggatactggtactgccaataattctttcaagatcaattatctggacggggagaatctggcacaaattctttcatcagtcttcttggtcagtaatgaggtatctgcggcccagcaagtcggtgctggcgcgtttaacttaccacatgatgtcgagccccagcaactcaacaacaacgcacggagacacatttgcgacggagacttatatgcgggtgcgctggccatggatagcactcttagtgattattgcactttccgctgcattttgcttggtcactgtgatcatcctgacttcacaggagagacaagtgacgtggaagtcttccttaactccattgttgatgagtga

SEQ ID NO: 20674 - protein, 520 aa, Muscodor strobelii
  misc_feature: SGI Peptide ID NO. 566984
  misc_feature (87)..(305): NCBI GI: 238844770 Blast Desc: conserved [Microsporum canis CBS 113480]
  misc_feature (57)..(305): NCBI GI: 238495102 Blast Desc: conserved [Aspergillus flavus NRRL3357] gi|220695437|gb|EED51780.1| conserved [Aspergillus flavus NRRL3357]
  misc_feature (87)..(349): NCBI GI: 67525657 Blast Desc: AN3286.2 [Aspergillus nidulans FGSC A4] gi|40744074|gb|EAA63254.1| AN3286.2 [Aspergillus nidulans FGSC A4] gi|259485747|tpe|CBF83029.1| TPA: conserved [Aspergillus FGSC
  misc_feature (65)..(349): NCBI GI: 256729615 Blast Desc: NECHADRAFT_95402 [Nectria haematococca mpVI 77-13-4]
  misc_feature (85)..(334): NCBI GI: 145243784 Blast Desc: An11g04090 [Aspergillus niger] gi|134079085|emb|CAK48394.1| protein product [Aspergillus niger]
  misc_feature (87)..(305): NCBI GI: 159122061 Blast Desc: AFUB_101770 [Aspergillus fumigatus A1163]
  misc_feature (45)..(347): NCBI GI: 145612273 Blast Desc: MGG_08207 [Magnaporthe grisea 70-15] gi|145019468|gb|EDK03696.1| MGG_08207 [Magnaporthe grisea 70-15]
  misc_feature (87)..(305): NCBI GI: 119501445 Blast Desc: NFIA_044010 [Neosartorya fischeri NRRL 181] gi|119415645|gb|EAW25582.1| conserved [Neosartorya fischeri NRRL 181]
  misc_feature (38)..(380): NCBI GI: 255931863 Blast Desc: Pc12g06460 [Penicillium chrysogenum Wisconsin 54-1255] gi|211582107|emb|CAP80273.1| Pc12g06460 [Penicillium chrysogenum Wisconsin 54-1255]
  misc_feature (86)..(300): NCBI GI: 164425452 Blast Desc: NCU05801 [Neurospora crassa OR74A] gi|157070931|gb|EAA30825.2| NCU05801 [Neurospora crassa OR74A]
MDPRSVNHSPEYYYESPQYQPRDPFDNKHQSTSHQYSEPQGYGPVQGSYPPETPIVQWRTGTDSPGQDPTGKPREETYFLDRFRMSWIFEIICEVFSLASLLALIILLTRLDGRPLSTWTIAVSPNAVIAILSIATRASLVYALGQVVSQLKWLHLVRKPDSLADLQHYDDASRGPLGAARIFWTVRSASFITYIACLAILLSLAFEPFSQQLLHYAERNITVDGVQSSVSYSTAYDYGNEGVDGASAVIIRPRDNGMTAAVVNGLYGVARDPPFTCSGASCSYPDFTTFGVCSECLDVTSTTVKKHVNISFGEAYSFTTPNNLSMIASAFVDAHSGFAHTTINATSRILNGAFAGLGMPMNASIIRFPDENGEQQIIKLNNSDVPAYDTPLHRVLAPLDPADSLDTGTANNSFKINYLDGENLAQILSSVFLVSNEVSAAQQVGAGAFNLPHDVEPQQLNNNARRHICDGDLYAGALAMDSTLSDYCTFRCILLGHCDHPDFTGETSDVEVFLNSIVDE

SEQ ID NO: 20675 - DNA, 2424 bp, Muscodor strobelii
  misc_feature: SGI EST ID NO. CUFF.48519.0
  misc_feature: Variant of the nucleotide sequence at SEQ ID NO 20673
gttgcgcttgtcttgctggttttcaccatataattgaagctattgcccctgggtatcgatgctgccaagggctaggcaccagggcctcggcttctttccatcgtctatctgagctccggcagagtggcgaggagtagctaataataatattctagcggaccttagctggcaaagcttggttgaatgaagttaaagcaatggcgaaccatcgtctactgtctcacgcgggtgggtctcataatgtcatcgtccaccaatgtccacgattcaggcgcggagcttcaacctgattgccacatgtaggcagtcgcagaacgctagcaggcaaattaatatggcattggttatcagccctacagggggagatgcggccgcttggcgatacaagtcgtagggctaggacgtgagacaaattaagaaaaactcatcgcgtctttcttctgcttctggaagacttgtcttgaagctgccaagtgttggtaagtcttgatatgttacgagtggaatcccaggcttctcgagcacatcgtgatggatccaaggtcggtgaaccactcacctgagtactattacgagagtcctcagtaccaaccccgagatccctttgacaacaagcatcagtcgacgagtcatcagtacagtgaaccccagggttacggtccagtccaaggatcttatccgccagagacaccgatcgtacaatggcgtacagggacagattcaccaggtcaagacccaactggcaagcctcgggaagagacctacttccttgacagatttcgaatgtcctggatatttgagattatctgcgaggtcttcagtttagcgtctttgttggctctgatcatccttctcacccgtcttgatggccgacctttgtcaacatggaccatcgccgtatctcctaatgctgtaatcgctatcctctcgatcgctaccagggcttctcttgtgtatgccctaggtcaagtcgtcagtcagctcaaatggctgcatctcgtgaggaagccagacagtcttgcagaccttcaacattatgatgatgcatcgcgcggccctctcggcgcagccagaatattttggactgtgcggtctgcgtcctttatcacttatattgcttgtttggcaatactcctttccctggcgtttgaacctttctctcaacaattgcttcattatgccgagcgtaacatcactgtcgacggtgtccagtcatcggtatcatattctacagcgtatgactatggaaatgaaggcgttgatggagcctcagctgtcataattcgccccagagacaatggcatgacggccgcggtcgtaaatggcttatacggcgtcgcgcgagacccgccgtttacgtgttctggtgcatcctgttcatatccagatttcactacgtttggcgtctgtagcgagtgcttggatgttacttcgaccacagtcaagaaacatgttaacatatcgtttggagaagcatacagcttcacaacacctaataacttatcaatgatagcctctgcgttcgtggatgcgcattctggctttgcccatacgacaatcaacgcaacctcgagaattttgaatggcgcattcgctgggctcggaatgccgatgaacgcatcgattatccgatttccagacgagaatggtacgacaatttcaaactggacaaagacaatggaggcatatcaatgcgaaatcacgtactgcgggcgacgatttgtgaattggaaaactgttggttcaaatacgacaggcgagcagcagatcatcaagctgaacaactccgatgttcctgcttacgatacaccgttacaccgcgtgcttgcacccctcgatcctgccgactcgttggatactggtactgccaataattctttcaagatcaattatctggacggggagaatctggcacaaattctttcatcagtcttcttggtcagtaatgaggtatctgcggcccagcaagtcggtgctggcgcgttgtatacaagcagcgacatcattggaaacgtggatactatggcaaaagatataacttaccacatgatgtcgagccccagcaactcaacaacaacgcacggagacacatttgcgacggagacttatatgcgggtgcgctggccatggatagcactcttagtgattattgcactttccgctgcattttgcttggtcactgtgatcatcctgacttcacaggagagacaagtgacgtggaagtcttccttaactccattgttgatgagtgatattgcatatccactgaccacgggagctgagagggctagtggtggcgattacatgcagctccagtctcggacaaggaccattgcgagccatttgacgagacgatagcgtatatggtcttctacgatagttaaatattaaaatcaacaccttctaagagattgcgaaggcgga

SEQ ID NO: 20676 - DNA, 1419 bp, Muscodor strobelii
  misc_feature: SGI cDNA ID NO. 566985
  misc_feature: Encodes the peptide sequence at SEQ ID NO 20677
atgtcgccccacaccgttccattctttatcaatggcgaagagcgcatccccgagaagacctttgagttgaaatctccaactgacggctcggtcatctctcattcgggtatcgccacagtttcggacgccaatgcagcgatagaggcggccgccgcagcacttccagcatggcgggacatggatgtaggggcgaggagagacattttcctcaaggcagcagaggttatgacaaaacgccggtcagaactcgctgattacatggcagatgagcttggaactgggtcggactggggtggtttttgcgtagggcttggcatagggctgttcaaagatgttgccgggcgtataagctccatcgagggctctgtgcctaagttagaagacccaactcaatcggcaatggtgtggcgcgagccttttggagttgtcttcgctatggcgccatggaacgcgtcgtacccactcgggacacgcgctgtgctgtatccacttgcggccggttgtaccgtagtattcaaggggtcagagctttcgcctcgagccatgcatggcatcgtatcagtcttgcatgaagctggactaccaccaggagtacttaacttcattacgaccgaccacgcgaacgccgcggcagtaactgagtccatcatcgctaatccgcatatcaagaaagtcaatttcacaggcagcacggctgttggcagaatcattgctaaagtcgctggccaacacctgaagccccttgtattagagctgggaggcaaggcgccggctatcatttgggaggatgctgatttagataatgctgcgcatcactgcacgataggagcatttatcaacgccggccaggtgtgcatgagtacagaaaaactcatcgttcataaagcagtaagtgggaaatttgcagagacactacgcgagaaggcatcagcgatatggtctaaaccatgtgtgctcatcacggagcaagctgtcgcgaagaataagaagctactgtccgatgcgactagcaaaggtgcatcggttgtcctgggcgatatcgacgccgaagaatcggcgaagaaccacatgcgaccagtgatcatctcccaggtcacctctgagatggatatctaccagcaagagtcttttgggccaactgtcagtatgatcgaagttgagagcgaagaagaagcaatacgcatcgccaacgacacggagtatggtctcacttcagctgtattcaccgaggatctgagaagaggcttccggttggcaaagggtattgaatcgggtgcggttcacattaatggtatgacaatacacgatgagactgctttgccgcacggtggtgcgaaagcctccggctatgggcgcttcaacgctttggttggcattgaggaatatctcaggacgaagaacgtgacttggaagaactag

SEQ ID NO: 20677 - protein, 472 aa, Muscodor strobelii
  misc_feature: SGI Peptide ID NO. 566985
  misc_feature (9)..(468): Pfam Id: PF00171 Pfam Desc: Aldehyde dehydrogenase family
  misc_feature (4)..(472): NCBI GI: 46107670 Blast Desc: FG00718.1 [Gibberella zeae PH-1]
  misc_feature (6)..(471): NCBI GI: 116180754 Blast Desc: CHGG_01005 [Chaetomium globosum CBS 148.51] gi|88185302|gb|EAQ92770.1| CHGG_01005 [Chaetomium globosum CBS 148.51]
  misc_feature (4)..(471): NCBI GI: 85111596 Blast Desc: NCU02056 [Neurospora crassa OR74A] gi|28925770|gb|EAA34776.1| NCU02056 [Neurospora crassa OR74A]
  misc_feature (6)..(471): NCBI GI: 39974403 Blast Desc: MGG_00652 [Magnaporthe grisea 70-15] gi|145018433|gb|EDK02712.1| MGG_00652 [Magnaporthe grisea 70-15]
  misc_feature (4)..(472): NCBI GI: 256735478 Blast Desc: NECHADRAFT_90385 [Nectria haematococca mpVI 77-13-4]
  misc_feature (4)..(471): NCBI GI: 171687467 Blast Desc: protein product [Podospora anserina] gi|170943695|emb|CAP69347.1| protein product [Podospora anserina]
  misc_feature (1)..(472): NCBI GI: 119189097 Blast Desc: CIMG_04596 [Coccidioides immitis RS]
  misc_feature (5)..(470): NCBI GI: 256724737 Blast Desc: NECHADRAFT_47996 [Nectria haematococca mpVI 77-13-4]
  misc_feature (1)..(472): NCBI GI: 240111367 Blast Desc: aldehyde dehydrogenase, [Coccidioides posadasii C735 delta SOWgp]
  misc_feature (2)..(470): NCBI GI: 169771249 Blast Desc: [Aspergillus oryzae RIB40] gi|238486208|ref|XP_002374342.1| vanillin dehydrogenase, [Aspergillus flavus NRRL3357] gi|83767953|dbj|BAE58092.1| protein
  misc_feature (8)..(469): SWISSPROT Homolog: EC 1.2.1.65 Salicylaldehyde dehydrogenase
  misc_feature: Useful for introducing or modulating the production of volatile compounds
  misc_feature: Useful for fungicidal and/or biocontrol applications
MSPHTVPFFINGEERIPEKTFELKSPTDGSVISHSGIATVSDANAAIEAAAAALPAWRDMDVGARRDIFLKAAEVMTKRRSELADYMADELGTGSDWGGFCVGLGIGLFKDVAGRISSIEGSVPKLEDPTQSAMVWREPFGVVFAMAPWNASYPLGTRAVLYPLAAGCTVVFKGSELSPRAMHGIVSVLHEAGLPPGVLNFITTDHANAAAVTESIIANPHIKKVNFTGSTAVGRIIAKVAGQHLKPLVLELGGKAPAIIWEDADLDNAAHHCTIGAFINAGQVCMSTEKLIVHKAVSGKFAETLREKASAIWSKPCVLITEQAVAKNKKLLSDATSKGASVVLGDIDAEESAKNHMRPVIISQVTSEMDIYQQESFGPTVSMIEVESEEEAIRIANDTEYGLTSAVFTEDLRRGFRLAKGIESGAVHINGMTIHDETALPHGGAKASGYGRFNALVGIEEYLRTKNVTWKN

SEQ ID NO: 20678 - DNA, 2807 bp, Muscodor strobelii
  misc_feature: SGI EST ID NO. CUFF.48664.1
  misc_feature: Variant of the nucleotide sequence at SEQ ID NO 20676
gacgattgaaccgttcataagacttgctcaggtgaatatccgttccaagctttagtggcagcgctcagtgtcccgacgtgctgggcgtgcatatttagctgcaggttttagcgcttattctcggattccaaacggtcggcaacaaccatgtgggcgctgaacgtgaaacctcactggcatggatcacttaaaatatcaaatgtcatacagtctgagattacggccaccgcaatggcattctggagcaagcgaacgacgatgaccatctccctctggacagcaccggatccatttgagacggatcgagtcggaatagtcacgaaagaaatattgtagacggattagaaggatgtggtgtttgtcgaaagctggggtatatgcaggtcatcgcctcgtggcgtagaccgtgacgtctgagtgtatgcgggcacattggcgtatcgccacagcgcatgtttggtaatgtcgcgcggaattgcagcgtagtaaagcggacaattaacatatttcttgacgaacttcaaggctctcacgcggctccgcgctcatatgaattgtaagattaatttattaaaggcaataagcttgaggactaattccgtctcgccctgacaacttctctaatggcaatgtcctaggattaaggaggggtagagaagtttagttgttgttaacccaccatttcaaattgccggtccaccatccgggaggggtagaaagttatcccatcatcgtgttatattgtccggcttgttggtttctttgatctatggttaacaatgctttgcaatcgctatctcttcctaatttgatatagtcaagttcaggatttacatggtctatcacgaatagaatctctctggagtagtagtccgccgtcgcacggggcggatgatgagaataaatattttttatcttctccaggtatagatgacatcccaagaatcgaattgctatcgacacaatcaatactccgccatacgatttctacccagaataccacggttcagcaagatgtcgccccacaccgttccattctttatcaatggcgaagagcgcatccccgagaagacctttgagttgaaatctccaactgacggctcggtcatctctcattcgggtatcgccacagtttcggacgccaatgcagcgatagaggcggccgccgcagcacttccagcatggcgggacatggatgtaggggcgaggagagacattttcctcaaggcagcagaggttatgacaaaacgccggtcagaactcgctgattacatggcagatgagcttggaactgggtcggactggggtggtttttgcgtagggcttggcatagggctgttcaaagatgttgccgggcgtataagctccatcgagggctctgtgcctaagttagaagacccaactcaatcggcaatggtgtggcgcgagccttttggagttgtcttcgctatggcgccatggaacgcgtcgtacccactcgggacacgcgctgtgctgtatccacttgcggccggttgtaccgtagtattcaaggggtcagagctttcgcctcgagccatgcatggcatcgtatcagtcttgcatgaagctggactaccaccaggagtacttaacttcattacgaccgaccacgcgaacgccgcggcagtaactgagtccatcatcgctaatccgcatatcaagaaagtcaatttcacaggcagcacggctgttggcagaatcattgctaaagtcgctggccaacacctgaagccccttgtattagagctgggaggcaaggcgccggctatcatttgggaggatgctgatttagataatgctgcgcatcactgcacgataggagcatttatcaacgccggccaggtgtgcatgagtacagaaaaactcatcgttcataaagcagtaagtgggaaatttgcagagacactacgcgagaaggcatcagcgatatggtctaaaccatgtgtgctcatcacggagcaagctgtcgcgaagaataagaagctactgtccgatgcgactagcaaaggtgcatcggttgtcctgggcgatatcgacgccgaagaatcggcgaagaaccacatgcgaccagtgatcatctcccaggtcacctctgagatggatatctaccagcaagagtcttttgggccaactgtcagtatgatcgaagttgagagcgaagaagaagcaatacgcatcgccaacgacacggagtatggtctcacttcagctgtattcaccgaggatctgagaagaggcttccggttggcaaagggtattgaatcgggtgcggttcacattaatggtatgacaatacacgatgagactgctttgccgcacggtggtgcgaaagcctccggctatgggcgcttcaacgctttggttggcattgaggaatatctcaggacgaagaacgtgacttggaagaactagccgttaggtgattgtattcgtaaagacttgggagtgatgtgggttccagggccaacgtattggaagcaatgcagttcggaattggaatacctatcattttgttagtacaatgcgtcatcaatcatcaatccatttcacactattcagtttgggtttatactcaaggtgtggcatcgagttggaaatgtagctaggatctagactgatgaagaacctgatatttgacttggcgcacctgttgcaggctgccaatgatttcgggccaataatttcaacaacagcgaaatgaggctcttgttgatctacgtactggccttgcaatggctagaacacatgtgctactgtatcagatataggtagagactgaattcgga

SEQ ID NO: 20679 - DNA, 1026 bp, Muscodor strobelii
  misc_feature: SGI cDNA ID NO. 566986
  misc_feature: Elevated expression when VOC is produced
  misc_feature: Encodes the peptide sequence at SEQ ID NO 20680
atggcaagtatcgcacctagagtatcgagggctacaacggccagattgtgcaaattctctcgcactacacctcgcactatttctgggagtatcatagcctctcgaagagcagccgtcgtatccccaaaagctccttttcaaaacacaaatcagacaagatgcgtatcttcaaaaacctacccaagtctaaagaacgaaattgcccctactcctagaacacctcctaagggcgttcttccggagttcgacttgaagggcaaagtcatagttgtttccggaggtgcccagggtcttggtcttgtgcaagctgaagcattactagaagctggagccatagtgcatgtatttgaccgccagccagagcctcctctaggctccaactaccagaaagtagctcaacgtgccaaggatgagctgaacacttctctgttctaccaccaggttgacgtccgaacgggtgttgatgagctgaataagctcgctgaggaaattgccgagaagcatggaaagcttaatggtctgattgctgccgccggcatccaacaggagacccctgcgcttgactacacggctgctgacgcggatcgcatgctcggtgtaaatgtgactggtgttctgatgacgtctcaagcagttgctcggcagatggtccgtctcaaccagccgggcagcattgtgatgattgctagtatgagcggcaccattgccaacaagggattaatctgccccgtctacaatgcttccaaagccgccgtcattcaacttggccgaaatctggcaatggagtggggcgtcaagggcatccgcgtcaacaccatctcgcccggctacatcgtcaccgagatggtagagaagctatttatcgagtacccggagcgcgagaaggagtggcccacgcacaacatgcttaacatgctcagcaagcccgaggactaccgcggtgccgccgtcttcttgctgagtgatgccagccgcttcatgacaggtgccgatttgcgaattgacggtggccacgcagcgtggtag

SEQ ID NO: 20680 - protein, 341 aa, Muscodor strobelii
  misc_feature: SGI Peptide ID NO. 566986
  misc_feature (87)..(264): Pfam Id: PF00106 Pfam Desc: short chain dehydrogenase
  misc_feature (37)..(341): NCBI GI: 261355400 Blast Desc: sorbitol-6-phosphate 2-dehydrogenase [Verticillium albo-atrum VaMs.102]
  misc_feature (20)..(341): NCBI GI: 116182222 Blast Desc: CHGG_01739 [Chaetomium globosum CBS 148.51] gi|88186036|gb|EAQ93504.1| CHGG_01739 [Chaetomium globosum CBS 148.51]
  misc_feature (79)..(341): NCBI GI: 240104744 Blast Desc: 5-keto-D-gluconate 5-reductase, [Coccidioides posadasii C735 delta SOWgp]
  misc_feature (78)..(341): NCBI GI: 256730868 Blast Desc: NECHADRAFT_29814 [Nectria haematococca mpVI 77-13-4]
  misc_feature (76)..(341): NCBI GI: 70994214 Blast Desc: short chain dehydrogenase [Aspergillus fumigatus Af293] gi|66849588|gb|EAL89916.1| short chain dehydrogenase, [Aspergillus fumigatus Af293] gi|159125131|gb|EDP50248.1| short
  misc_feature (76)..(341): NCBI GI: 119500786 Blast Desc: short chain dehydrogenase, [Neosartorya fischeri NRRL 181] gi|119415315|gb|EAW25253.1| short chain dehydrogenase, [Neosartorya fischeri NRRL 181]
  misc_feature (79)..(341): NCBI GI: 156056739 Blast Desc: SS1G_04100 [Sclerotinia sclerotiorum 1980] gi|154701886|gb|EDO01625.1| SS1G_04100 [Sclerotinia sclerotiorum 1980]
  misc_feature (56)..(341): NCBI GI: 225554230 Blast Desc: oxidoreductase [Ajellomyces capsulatus G186AR]
  misc_feature (84)..(341): NCBI GI: 169595850 Blast Desc: SNOG_00670 [Phaeosphaeria nodorum SN15] gi|160701171|gb|EAT92165.2| SNOG_00670 [Phaeosphaeria nodorum SN15]
  misc_feature (56)..(341): NCBI GI: 240281746 Blast Desc: oxidoreductase [Ajellomyces capsulatus H143]
  misc_feature (78)..(341): SWISSPROT Homolog: EC 1.1.1.250 D-arabinitol 2-dehydrogenase
  misc_feature: Useful for introducing or modulating the production of volatile compounds
MASIAPRVSRATTARLCKFSRTTPRTISGSIIASRRAAVVSPKAPFQNTNQTRCVSSKTYPSLKNEIAPTPRTPPKGVLPEFDLKGKVIVVSGGAQGLGLVQAEALLEAGAIVHVFDRQPEPPLGSNYQKVAQRAKDELNTSLFYHQVDVRTGVDELNKLAEEIAEKHGKLNGLIAAAGIQQETPALDYTAADADRMLGVNVTGVLMTSQAVARQMVRLNQPGSIVMIASMSGTIANKGLICPVYNASKAAVIQLGRNLAMEWGVKGIRVNTISPGYIVTEMVEKLFIEYPEREKEWPTHNMLNMLSKPEDYRGAAVFLLSDASRFMTGADLRIDGGHAAW

SEQ ID NO: 20681 - DNA, 2010 bp, Muscodor strobelii
  misc_feature: SGI EST ID NO. CUFF.48531.0
  misc_feature: Variant of the nucleotide sequence at SEQ ID NO 20679
ctgatggcaggggcagtcttttcatatcacaatgagtaggtaattatagatagagacccgtcataagaagcttggaaactgacatgtgagatatgattgtgtctttgcacctcagataaacgtatctccagttgctacggtacgttcaagacttgggaaacatcgcgcaacggtggtgatggtgtgataggttggatctagattagtgtcccggttttatgacctccgacaattcaacgccaaactcgtatgtttgctctccaaaaccttccacgataggagcattctagcctatggagactagcttcaaacttcttgtgtgatacctaatgtgagatgccgcagcggggagttggacgacagtcttctttactggcggggcaatttgatacgggcctagtagtgttcttacaccgtacagattggcattctctaggcagacggccaaggcattgaatacaatttcgacttgatcttctgacgagccgaattaatccatcggcttggttacggggcctgttctgagtaattgtagcgagaaacggtcttggtcacgtctgctttcttcggttgtacattccccggtcgtacattctccccttgttctagcaggcatatagaggaaagtataaatgcgaaccctgccttctgtcagagagcacttcgctctcatctgaaccgatctcccacgtttcaatcgctgacctactaagtctctccttgacgccacctccttcgaccaactcaattgcaataggacccttgcccctaccaaaatccaggactttggctacaatggcaagtatcgcacctagagtatcgagggctacaacggccagattgtgcaaattctctcgcactacacctcgcactatttctgggagtatcatagcctctcgaagagcagccgtcgtatccccaaaagctccttttcaaaacacaaatcagacaagatgcgtatcttcaaaaacctacccaagtctaaagaacgaaattgcccctactcctagaacacctcctaagggcgttcttccggagttcgacttgaagggcaaagtcatagttgtttccggaggtgcccagggtcttggtcttgtgcaagctgaagcattactagaagctggagccatagtgcatgtatttgaccgccagccagagcctcctctaggctccaactaccagaaagtagctcaacgtgccaaggatgagctgaacacttctctgttctaccaccaggttgacgtccgaacgggtgttgatgagctgaataagctcgctgaggaaattgccgagaagcatggaaagcttaatggtctgattgctgccgccggcatccaacaggagacccctgcgcttgactacacggctgctgacgcggatcgcatgctcggtgtaaatgtgactggtgttctgatgacgtctcaagcagttgctcggcagatggtccgtctcaaccagccgggcagcattgtgatgattgctagtatgagcggcaccattgccaacaagggattaatctgccccgtctacaatgcttccaaagccgccgtcattcaacttggccgaaatctggcaatggagtggggcgtcaagggcatccgcgtcaacaccatctcgcccggctacatcgtcaccgagatggtagagaagctatttatcgagtacccggagcgcgagaaggagtggcccacgcacaacatgcttaacatgctcagcaagcccgaggactaccgcggtgccgccgtcttcttgctgagtgatgccagccgcttcatgacaggtgccgatttgcgaattgacggtggccacgcagcgtggtagtgttgctgacgtctagtaataaagtgggatctggtacttaagaggaagggaatttctcgtggcgatggagttacagggcgcatggagtctgggaagaactcggtaatcatcacgccttatttgctagctaccttatgttttagcatcttctagacagttataaagagtgattatctcaatgaactttcc

SEQ ID NO: 20682 - DNA, 666 bp, Muscodor strobelii
  misc_feature: SGI cDNA ID NO. 566987
  misc_feature: Reduced expression when VOC is produced
  misc_feature: Encodes the peptide sequence at SEQ ID NO 20683
atgggcgcaaaggcatccaagccggcgcaaacagcagcgcgccgctatccaagcagaacaccaggcagcgtaccgccctctaccacagctcaaagaccaaccgcaagaccagcagcgcaatcacaatctagacaaacacaaccaggctcagcatcgttaagtaaagatgaggcaatcaaagccgacggcagagatcccgacttcgacgcctcaacaaacgccgccttctcccagcgcctgcgacaaatgggcgtagcgaatccgaacccgaccctctccaactcatcaaccgtcagcacctcaccaacatacatccaaacatccaaatccgcctccccatcatctccatcgtatccgtcacgcccgcccacatcccaaacctcctctccaccgtctcaaaacagaacactcaacgccctacaagcccgcgcagctctccaagctgccgcagacgcagaattcgaggatccatcgcacgggcggtcattcctcgatgccaatatgttgaagcagattttggtgctacaggataggggagtagcagcaagagatatcgaggcgagatttaagttaaagagcggtgttgtggctagacttggaccacctggcgttgcgttccctgtgcagggtacggcaaaacagacttggggagggcttgcggaataa

SEQ ID NO: 20683 - protein, 221 aa, Muscodor strobelii
  misc_feature: SGI Peptide ID NO. 566987
  misc_feature (1)..(200): NCBI GI: 46109002 Blast Desc: FG01383.1 [Gibberella zeae PH-1]
  misc_feature (1)..(205): NCBI GI: 225679825 Blast Desc: conserved [Paracoccidioides brasiliensis Pb03]
  misc_feature (71)..(205): NCBI GI: 39943028 Blast Desc: MGG_03594 [Magnaporthe grisea 70-15] gi|145009837|gb|EDJ94493.1| MGG_03594 [Magnaporthe grisea 70-15]
  misc_feature (1)..(207): NCBI GI: 116182220 Blast Desc: CHGG_01738 [Chaetomium globosum CBS 148.51] gi|88186035|gb|EAQ93503.1| CHGG_01738 [Chaetomium globosum CBS 148.51]
  misc_feature (1)..(205): NCBI GI: 242801041 Blast Desc: conserved [Talaromyces stipitatus ATCC 10500] gi|218717032|gb|EED16453.1| conserved [Talaromyces stipitatus ATCC 10500]
  misc_feature (1)..(205): NCBI GI: 226286101 Blast Desc: [Paracoccidioides brasiliensis Pb01]
  misc_feature (1)..(205): NCBI GI: 226291581 Blast Desc: [Paracoccidioides brasiliensis Pb18]
  misc_feature (1)..(200): NCBI GI: 171695234 Blast Desc: protein product [Podospora anserina] gi|170947859|emb|CAP60023.1| protein product [Podospora anserina]
  misc_feature (1)..(206): NCBI GI: 145257401 Blast Desc: An04g03500 [Aspergillus niger] gi|134058632|emb|CAK38616.1| protein product [Aspergillus niger]
  misc_feature (51)..(200): NCBI GI: 255942711 Blast Desc: Pc18g02830 [Penicillium chrysogenum Wisconsin 54-1255] gi|211586857|emb|CAP94507.1| Pc18g02830 [Penicillium chrysogenum Wisconsin 54-1255]
  misc_feature: Useful for introducing or modulating the production of volatile compounds
MGAKASKPAQTAARRYPSRTPGSVPPSTTAQRPTARPAAQSQSRQTQPGSASLSKDEAIKADGRDPDFDASTNAAFSQRLRQMGVANPNPTLSNSSTVSTSPTYIQTSKSASPSSPSYPSRPPTSQTSSPPSQNRTLNALQARAALQAAADAEFEDPSHGRSFLDANMLKQILVLQDRGVAARDIEARFKLKSGVVARLGPPGVAFPVQGTAKQTWGGLAE

SEQ ID NO: 20684 - DNA, 1147 bp, Muscodor strobelii
  misc_feature: SGI EST ID NO. CUFF.48668.1
  misc_feature: Variant of the nucleotide sequence at SEQ ID NO 20682
attctgggttggtcacagcgggtcacaacccggtcacaatcttatcgtcgcgacctttttgaattgacgttttgcagcacgtcattatgatttgcgaccggcatcccgacgatacaaatttccgcacatcagactgcgcaacgcactaccgagcaaccaattagctcctagactgcacatagaccttcttgaagcgagcgacccaagcttaccatcccaatgggcgcaaaggcatccaagccggcgcaaacagcagcgcgccgctatccaagcagaacaccaggcagcgtaccgccctctaccacagctcaaagaccaaccgcaagaccagcagcgcaatcacaatctagacaaacacaaccaggctcagcatcgttaagtaaagatgaggcaatcaaagccgacggcagagatcccgacttcgacgcctcaacaaacgccgccttctcccagcgcctgcgacaaatgggcgtagcgaatccgaacccgaccctctccaactcatcaaccgtcagcacctcaccaacatacatccaaacatccaaatccgcctccccatcatctccatcgtatccgtcacgcccgcccacatcccaaacctcctctccaccgtctcaaaacagaacactcaacgccctacaagcccgcgcagctctccaagctgccgcagacgcagaattcgaggatccatcgcacgggcggtcattcctcgatgccaatatgttgaagcagattttggtgctacaggataggggagtagcagcaagagatatcgaggcgagatttaagttaaagagcggtgttgtggctagacttggaccacctggcgttgcgttccctgtgcagggtacggcaaaacagacttggggagggcttgcggaataagattgcaggtgcggatgaagagtaaattgtaagaataagttgtaaatgtttgctgtattttacacaacttcacgatgagtagatggatgcattgctaagccgaacctacttgaaattgatcactagatggtatatctggacacccggataatggtgatgctgagcaggatttaatagacattacttaagccttatgatttaatgagtttaatctagtgaagctatagaaggatgtaaagatcggaagccaacttgaaattat

SEQ ID NO: 20685 - DNA, 1875 bp, Muscodor strobelii
  misc_feature: SGI cDNA ID NO. 566988
  misc_feature: Encodes the peptide sequence at SEQ ID NO 20686
atgtcactgagaaagctgcggcatctaccctctttcaccttcactcttacaccaccatgcacttcagctcgtgcggctcgtgcggaaccaaatgtcttcttcaccgagcgcttcgaaatccaatccacaacgtacgaaacggcgcaaggcgagtcttgcctgtcagtggtgccgggcccagaaaagaagatgcgatggagcacggccagtccagcatgcggaaattgtcaaaagaaagagtttttgaaagccaactgtaaatacagtcgcatagccacgcatctcggccgcggcggggtcgcgaagaccacaccgtctccaacaccttcatcaacggtcgctgtcgttgatgatatcccaaagaacggcatagagccagccctcctagcgaatgagatcaactcggtggtaaactccaagctaggtcttgacgatgttgggcaacatgaagaccccagctatttcccactcatcaatgcccctatcttcgggtctttgaatgatttgcccataataaataacctgactctacacgcatctaacgttctccctccgcggagacaggccgatgagctcgtggacctctatcttcaacagatccaaccaaccgatccgttaattgatgaggaacggttttgcctacagtacaaagctctatttgcgggcaatctgcatggcatcgaggaacagatttttactagcactttaaacatcgtctttgcccttgcgacgcaattgcaggtatctatcgagtttgaacaaagacagcaaattggaaatacttattttcgtcgcgcatggacgctactacggccagaggccctcctttgggagccgagctctgttgaggctgtccaatgccttctattaatgagcaggttcttacagtgtacgaataatgaaaccaagaaacgcaagcacgtatggcaagcctgcgtcatgattgatagacaaatctcgatgctcttgggccgcattcctgtagttgcgccgaatgtctcgattcttaagctggacgcacctggtagcgaagatgagtttgctcgggaatactggactaagaccatggatttgttggagctgaggagccaagtcggcatttcacaaatggcaatcatggacggctggactcaaaaacacaattcctatcgctttctagtcaaagaagatcagcttgattctattctgcaacttagcggggttctgcgtcgatgggaatccagtctctcccctcgtttccattggaatggtgtgcaaaacgatccgattgctgccaatagcaccgcttataagcagtcaatggtgctttacgtaaggctgcatcatgcaaggatcttcatgttccgacacgtgttatggcactactgtttgtcacaaacacctgaaaatccgaaccagtcaattgaggacggtatgatcagaggctgcgctgcactctctgtcgaaagcgcaaagaacatgattgctgctatctatggtaacgaacaatggagctcccatacggccaacaagacaataccgtggtggaacaagttcttctatgtctacatcgcctcgacaatactcacagccgctatgctacgaactgacctgtgcacgcctgaggtcactgttgcatgggatcaagctatgtcttttttggcgaggtacgagagcttgagtccgttcattcgacagagtcgcgccgcatttctagcacttaaccgaaagatattgaccttcaatgccggaggtacacaaatctgcccgttgcagacgatggcgctgcctagcaattcacaagagccgttccaagtgagactggacaacgagaccggtctctttgacgtggatgatctcagttggctcatcaattttgacatccctggcttatag

SEQ ID NO: 20686 - protein, 624 aa, Muscodor strobelii
  misc_feature: SGI Peptide ID NO. 566988
  misc_feature (63)..(615): NCBI GI: 116199971 Blast Desc: CHGG_08141 [Chaetomium globosum CBS 148.51] gi|88179420|gb|EAQ86888.1| CHGG_08141 [Chaetomium globosum CBS 148.51]
  misc_feature (87)..(620): NCBI GI: 119482475 Blast Desc: fungal specific transcription factor domain protein, [Neosartorya fischeri NRRL 181] gi|119409420|gb|EAW19369.1| fungal specific transcription factor domain protein, [Neosartorya
  misc_feature (101)..(620): NCBI GI: 71002890 Blast Desc: C6 transcription factor [Aspergillus fumigatus Af293] gi|66853764|gb|EAL94088.1| C6 transcription factor, [Aspergillus fumigatus Af293]
  misc_feature (101)..(620): NCBI GI: 159130178 Blast Desc: C6 transcription factor, [Aspergillus fumigatus A1163]
  misc_feature (129)..(614): NCBI GI: 159128360 Blast Desc: fungal specific transcription factor, [Aspergillus fumigatus A1163]
  misc_feature (129)..(580): NCBI GI: 70986010 Blast Desc: fungal specific transcription factor [Aspergillus fumigatus Af293] gi|66846137|gb|EAL86470.1| fungal specific transcription factor, [Aspergillus fumigatus Af293]
  misc_feature (129)..(614): NCBI GI: 119473929 Blast Desc: fungal specific transcription factor, [Neosartorya fischeri NRRL 181] gi|119406993|gb|EAW16943.1| fungal specific transcription factor, [Neosartorya fischeri NRRL 181]
  misc_feature (62)..(572): NCBI GI: 121699155 Blast Desc: fungal specific transcription factor, [Aspergillus clavatus NRRL 1] gi|119396070|gb|EAW06502.1| fungal specific transcription factor, [Aspergillus clavatus NRRL 1]
  misc_feature (129)..(621): NCBI GI: 255953605 Blast Desc: Pc21g05090 [Penicillium chrysogenum Wisconsin 54-1255] gi|211589266|emb|CAP95406.1| Pc21g05090 [Penicillium chrysogenum Wisconsin 54-1255]
  misc_feature (96)..(578): NCBI GI: 256722958 Blast Desc: NECHADRAFT_52658 [Nectria haematococca mpVI 77-13-4]
MSLRKLRHLPSFTFTLTPPCTSARAARAEPNVFFTERFEIQSTTYETAQGESCLSVVPGPEKKMRWSTASPACGNCQKKEFLKANCKYSRIATHLGRGGVAKTTPSPTPSSTVAVVDDIPKNGIEPALLANEINSVVNSKLGLDDVGQHEDPSYFPLINAPIFGSLNDLPIINNLTLHASNVLPPRRQADELVDLYLQQIQPTDPLIDEERFCLQYKALFAGNLHGIEEQIFTSTLNIVFALATQLQVSIEFEQRQQIGNTYFRRAWTLLRPEALLWEPSSVEAVQCLLLMSRFLQCTNNETKKRKHVWQACVMIDRQISMLLGRIPVVAPNVSILKLDAPGSEDEFAREYWTKTMDLLELRSQVGISQMAIMDGWTQKHNSYRFLVKEDQLDSILQLSGVLRRWESSLSPRFHWNGVQNDPIAANSTAYKQSMVLYVRLHHARIFMFRHVLWHYCLSQTPENPNQSIEDGMIRGCAALSVESAKNMIAAIYGNEQWSSHTANKTIPWWNKFFYVYIASTILTAAMLRTDLCTPEVTVAWDQAMSFLARYESLSPFIRQSRAAFLALNRKILTFNAGGTQICPLQTMALPSNSQEPFQVRLDNETGLFDVDDLSWLINFDIPGL

SEQ ID NO: 20687 - DNA, 1170 bp, Muscodor strobelii
  misc_feature: SGI EST ID NO. CUFF.48538.0
  misc_feature: Variant of the nucleotide sequence at SEQ ID NO 20685
aaacatggatggtagtcggatgcgctgtccgaatggctcagagcctagggcttcacattattcacgtagcctcatcagctaaagactcaccagaaaccaagaaacgcaagcacgtatggcaagcctgcgtcatgattgatagacaaatctcgatgctcttgggccgcattcctgtagttgcgccgaatgtctcgattcttaagctggacgcacctggtagcgaagatgagtttgctcgggaatactggactaagaccatggatttgttggagctgaggagccaagtcggcatttcacaaatggcaatcatggacggctggactcaaaaacacaattcctatcgctttctagtcaaagaagatcagcttgattctattctgcaacttagcggggttctgcgtcgatgggaatccagtctctcccctcgtttccattggaatggtgtgcaaaacgatccgattgctgccaatagcaccgcttataagcagtcaatggtgctttacgtaaggctgcatcatgcaaggatcttcatgttccgacacgtgttatggcactactgtttgtcacaaacacctgaaaatccgaaccagtcaattgaggacggtatgatcagaggctgcgctgcactctctgtcgaaagcgcaaagaacatgattgctgctatctatggtaacgaacaatggagctcccatacggccaacaagacaataccgtggtggaacaagttcttctatgtctacatcgcctcgacaatactcacagccgctatgctacgaactgacctgtgcacgcctgaggtcactgttgcatgggatcaagctatgtcttttttggcgaggtacgagagcttgagtccgttcattcgacagagtcgcgccgcatttctagcacttaaccgaaagatattgaccttcaatgccggaggtacacaaatctgcccgttgcagacgatggcgctgcctagcaattcacaagagccgttccaagtgagactggacaacgagaccggtctctttgacgtggatgatctcagttggctcatcaattttgacatccctggcttatagcgtggactttgataaacaatcttaagctcaatggagacagttcatgtgagattataagattatcaagtgtattctaagtatgaaatcatacggtttctcaacg

SEQ ID NO: 20688 - DNA, 1542 bp, Muscodor strobelii
  misc_feature: SGI cDNA ID NO. 566989
  misc_feature: Encodes the peptide sequence at SEQ ID NO 20689
atgttagaggaaaaagaaacatcatacgacgcatcgggcgaccggcagtcttcattccatcctcagtattctggaagtggtacagaaacggatccctatgttgtcgagtttgtcgcgaatgatccgaataatcctcaaaattggtctggcgcgagaaaatgggcgattgcttcactggcgacaatcgcagtgtttgccgtgacattaacatcagcagcttactcatcctctcgaaaagagatcgtgaccgaactacatgccaacaatgaagagttcgcggcaggtatttcgctgttcgttgttggctttgcgataggtccggcgctttggggaccattatctgagctgtatgggcgtcggatcttgttccatgtcactgtgggagtggttgttgttttcgtcgctgcaacggcgggctgtcactcgatcgcacagctcttggtgtttcgactattcagtggcacattcggagcctcaccattgacaaactcgggtggcattctatcggatttgtttaactccagagaacgtggcttggcttatgcgttcttctcaacagcaccgtttttgggaccgatcttaggtccaatcctcggaggttttgttactattaccattggttggcgttgggttcaaggcattctcagcatattcattggactcgtatggattaccgggctcattatactgcctgaaacgtacgcgccagttgtcttacgaagagtagcaagtgatcttgcaaagaaggatggcaagtcgtacatcagcatactcgaaaagaataatgttggagctcgagcgtctgaggttttcagcaaggcactcaaaagaccatgggtcctgcttttccgcgaacctatcgtacttgtcgcggctatatatctggctatcatttatgcgacgacgtacatgttcatccccgcatttccgatcgtgtatcagcagcatcgaggatggaatgctggaatcggcggtctcgcgtttcttggtatagctgtcggtatgatcgtagggctgatatatgccatattcgatgatcgtcgatatttgaggctccaaggtaatattacgccggagtctcgtctcccaggctcccttcccggcgctattgctctgccgatcggtctcttcgcatttgcatggacgaactcacccaacattcactggtccgccagcattattctctcagcacctttcggcttcggatctgtaatggtgttcttacctgttcttaactatttggtcgacacatacactatatataccgcttccgtcctctcagcagctgccatgcttagagctctgatcggtgcagcatttcctttattcacaacacaagtattcaataacttgggcatccactgggccagttcaattcctggattcctaacgttagcctgtctgcctttccctttcgttatgtataaatacggaccgaaattgaggatgaagtgcaagtacgccgctgaagccgctctcatgctacagcagctcaatcaaaaatcacagcagagaagtgaacaggaatcagactctgtgtga

SEQ ID NO: 20689 - protein, 513 aa, Muscodor strobelii
  misc_feature: SGI Peptide ID NO. 566989
  misc_feature (60)..(441): Pfam Id: PF07690 Pfam Desc: Major Facilitator Superfamily
  misc_feature (24)..(507): NCBI GI: 116199973 Blast Desc: CHGG_08142 [Chaetomium globosum CBS 148.51] gi|88179421|gb|EAQ86889.1| CHGG_08142 [Chaetomium globosum CBS 148.51]
  misc_feature (1)..(512): NCBI GI: 70986014 Blast Desc: MFS multidrug transporter [Aspergillus fumigatus Af293] gi|66846138|gb|EAL86471.1| MFS multidrug transporter, [Aspergillus fumigatus Af293]
  misc_feature (23)..(512): NCBI GI: 255953607 Blast Desc: Pc21g05100 [Penicillium chrysogenum Wisconsin 54-1255] gi|211589267|emb|CAP95407.1| Pc21g05100 [Penicillium chrysogenum Wisconsin 54-1255]
  misc_feature (3)..(512): NCBI GI: 242816082 Blast Desc: MFS multidrug transporter, [Talaromyces stipitatus ATCC 10500] gi|218715038|gb|EED14461.1| MFS multidrug transporter, [Talaromyces stipitatus ATCC 10500]
  misc_feature (23)..(512): NCBI GI: 121699158 Blast Desc: MFS transporter, [Aspergillus clavatus NRRL 1] gi|119396071|gb|EAW06503.1| MFS transporter, [Aspergillus clavatus NRRL 1]
  misc_feature (23)..(512): NCBI GI: 67525625 Blast Desc: AN3270.2 [Aspergillus nidulans FGSC A4] gi|40743989|gb|EAA63171.1| AN3270.2 [Aspergillus nidulans FGSC A4] gi|259485764|tpe|CBF83060.1| TPA: MFS multidrug transporter,
  misc_feature (1)..(512): NCBI GI: 119473931 Blast Desc: MFS transporter, [Neosartorya fischeri NRRL 181] gi|119406994|gb|EAW16944.1| MFS transporter, [Neosartorya fischeri NRRL 181]
  misc_feature (1)..(512): NCBI GI: 159128359 Blast Desc: MFS multidrug transporter, [Aspergillus fumigatus A1163]
  misc_feature (12)..(512): NCBI GI: 116203407 Blast Desc: CHGG_09587 [Chaetomium globosum CBS 148.51] gi|88175715|gb|EAQ83183.1| CHGG_09587 [Chaetomium globosum CBS 148.51]
  misc_feature (22)..(512): NCBI GI: 226501004 Blast Desc: LOC100272831 [Zea mays] gi|194700944|gb|ACF84556.1| [Zea mays]
MLEEKETSYDASGDRQSSFHPQYSGSGTETDPYVVEFVANDPNNPQNWSGARKWAIASLATIAVFAVTLTSAAYSSSRKEIVTELHANNEEFAAGISLFVVGFAIGPALWGPLSELYGRRILFHVTVGVVVVFVAATAGCHSIAQLLVFRLFSGTFGASPLTNSGGILSDLFNSRERGLAYAFFSTAPFLGPILGPILGGFVTITIGWRWVQGILSIFIGLVWITGLIILPETYAPVVLRRVASDLAKKDGKSYISILEKNNVGARASEVFSKALKRPWVLLFREPIVLVAAIYLAIIYATTYMFIPAFPIVYQQHRGWNAGIGGLAFLGIAVGMIVGLIYAIFDDRRYLRLQGNITPESRLPGSLPGAIALPIGLFAFAWTNSPNIHWSASIILSAPFGFGSVMVFLPVLNYLVDTYTIYTASVLSAAAMLRALIGAAFPLFTTQVFNNLGIHWASSIPGFLTLACLPFPFVMYKYGPKLRMKCKYAAEAALMLQQLNQKSQQRSEQESDSV

SEQ ID NO: 20690 - DNA, 1916 bp, Muscodor strobelii
  misc_feature: SGI EST ID NO. CUFF.48543.0
  misc_feature: Variant of the nucleotide sequence at SEQ ID NO 20688
aagtggtacagaaacggatccctatgttgtcgagtttgtcgcgaatgatccgaataatcctcaaaattggtctggcgcgagaaaatgggcgattgcttcactggcgacaatcgcagtgtttgccgtgacattaacatcagcagcttactcatcctctcgaaaagagatcgtgaccgaactacatgccaacaatgaagagttcgcggcaggtatttcgctgttcgttgttggctttgcgataggtccggcgctttggggaccattatctgagctgtatgggcgtcggatcttgttccatgtcactgtgggagtggttgttgttttcgtcgctgcaacggcgggctgtcactcgatcgcacagctcttggtgtttcgactattcagtggcacattcggagcctcaccattgacaaactcgggtggcattctatcggatttgtttaactccagagaacgtggcttggcttatgcgttcttctcaacagcaccgtttttgggaccgatcttaggtccaatcctcggaggttttgttactattaccattggttggcgttgggttcaaggcattctcagcatattcattggactcgtatggattaccgggctcattatactgcctgaaacgtacgcgccagttgtcttacgaagagtagcaagtgatcttgcaaagaaggatggcaagtcgtacatcagcatactcgaaaagaataatgttggagctcgagcgtctgaggttttcagcaaggcactcaaaagaccatgggtcctgcttttccgcgaacctatcgtacttgtcgcggctatatatctggctatcatttatgcgacgacgtacatgttcatccccgcatttccgatcgtgtatcagcagcatcgaggatggaatgctggaatcggcggtctcgcgtttcttggtatagctgtcggtatgatcgtagggctgatatatgccatattcgatgatcgtcgatatttgaggctccaaggtaatattacgccggagtctcgtctcccaggctcccttcccggcgctattgctctgccgatcggtctcttcgcatttgcatggacgaactcacccaacattcactggtccgccagcattattctctcagcacctttcggcttcggatctgtaatggtgttcttacctgttcttaactatttggtcgacacatacactatatataccgcttccgtcctctcagcagctgccatgcttagagctctgatcggtgcagcatttcctttattcacaacacaagtattcaataacttgggcatccactgggccagttcaattcctggattcctaacgttagcctgtctgcctttccctttcgttatgtataaatacggaccgaaattgaggatgaagtgcaagtacgccgctgaagccgctctcatgctacagcagctcaatcaaaaatcacagcagagaagtgaacaggaatcagactctgtgtgagccttgtgtgagactgtatgaggaatatggttgaggaaacgagctttgacttgaacatatgcatattcgaaacacattgtatcggcggccatcttgataaagatataggaaggcaacttcggtgacacaaatagagcataggggatcgttggaaatgattagcaaggatttactttttgcataaattgcatcaacagatagaagttaggaaaaataatttaattagagtcttcataatgggcgagcattgccaatgtcccgcctcacaatagaatatttgggcctgtagatatttcttttattaattagaatgcgaataaaggaagtaacaaactctgaaaggcagggatccttgtaatggaatgaaggcgtcagtggcacctcaacgtcaattgttgagctgtataatccttgcataacttagcacctttacaactttcagtgtttc

SEQ ID NO: 20691 - DNA, 855 bp, Muscodor strobelii
  misc_feature: SGI cDNA ID NO. 566990
  misc_feature: Encodes the peptide sequence at SEQ ID NO 20692
atgagctcgttacagaaaagcaaattggccttcattggaggcggcaacatggccgccgccatcatcggcggtcttgcagccaaaggaatcgacaaacagaacatttgtgtttccgagccatgggaagtcaaccgtgagaagatggcgcaaacaggagtgcgcacaaccacatccaatgttgaagcatcgcaagacgcagacctactcgtcattgctgtcaagccacaggtcgcgaaagtcgtttgtcaagagcttgctggagcttgggccgagcgcaagacaacgcctctggttatttctatcgcggcgggcattaccctagaaagcatgaaggagtggttgaagttggctgatggacgtatcccccatatcgtccgtgtgatgccgaatacaccggcattggtcggcgaaggtgcatcgggtctattcgcagatagcagcgttactgcggaggagaaggatcttgctgcttcgctacttgctagtgttagcaaggtgactgagtgggtcgaccgagaagaactcattgatgtggttactggattatcaggatccggcccggcatacttctttgctatggtggaacacctagttgagagcgcgaccaagttggggttgacaaaggaacaggcaactcgccttgcgacacagacatgcctcggtgctggtagaatgctggtcgagtcttcagatgagccagcgcaactccgtaagaatgttacaagccccaatggtactacacatgctgcattgcaaagcttcgaggcatctggattcgagggaatcgtcgataaggctgtcaaggcggcaactgatagaggcgaggagttgggcagaacgctgggcaagtcatga

SEQ ID NO: 20692 - protein, 284 aa, Muscodor strobelii
  misc_feature: SGI Peptide ID NO. 566990
  misc_feature (8)..(262): Pfam Id: PF03807 Pfam Desc: NADP oxidoreductase coenzyme F420-dependent
  misc_feature (7)..(157): Pfam Id: PF01210 Pfam Desc: NAD-dependent glycerol-3-phosphate dehydrogenase N-terminus
  misc_feature (1)..(284): NCBI GI: 255933592 Blast Desc: Pc12g13680 [Penicillium chrysogenum Wisconsin 54-1255] gi|211582794|emb|CAP80995.1| Pc12g13680 [Penicillium chrysogenum Wisconsin 54-1255]
  misc_feature (1)..(283): NCBI GI: 169762564 Blast Desc: [Aspergillus oryzae RIB40] gi|238488375|ref|XP_002375425.1| pyrroline-5-carboxylate reductase [Aspergillus flavus NRRL3357] protein product oryzae]
  misc_feature (1)..(283): NCBI GI: 67900800 Blast Desc: AN7387.2 [Aspergillus nidulans FGSC A4] gi|14034124|emb|CAC38820.1| pyrroline-5-carboxylate reductase [Emericella nidulans] gi|40742568|gb|EAA61758.1| conserved FGSC
  misc_feature (1)..(283): NCBI GI: 121714228 Blast Desc: pyrroline-5-carboxylate reductase [Aspergillus clavatus NRRL 1] gi|119402878|gb|EAW13299.1| pyrroline-5-carboxylate reductase [Aspergillus clavatus NRRL 1]
  misc_feature (1)..(283): NCBI GI: 119476580 Blast Desc: pyrroline-5-carboxylate reductase [Neosartorya fischeri NRRL 181] gi|119407357|gb|EAW17306.1| pyrroline-5-carboxylate reductase [Neosartorya fischeri NRRL 181]
  misc_feature (1)..(283): NCBI GI: 70996851 Blast Desc: pyrroline-5-carboxylate reductase [Aspergillus fumigatus Af293] gi|66850816|gb|EAL91142.1| pyrroline-5-carboxylate reductase [Aspergillus fumigatus Af293]
  misc_feature (3)..(279): NCBI GI: 256723466 Blast Desc: [Nectria haematococca mpVI 77-13-4]
  misc_feature (3)..(280): NCBI GI: 46116150 Blast Desc: FG03917.1 [Gibberella zeae PH-1]
  misc_feature (1)..(283): NCBI GI: 115399336 Blast Desc: conserved [Aspergillus terreus NIH2624] gi|114192140|gb|EAU33840.1| conserved [Aspergillus terreus NIH2624]
  misc_feature (1)..(283): NCBI GI: 145257207 Blast Desc: An04g02800 [Aspergillus niger] gi|134058560|emb|CAK96447.1| protein product [Aspergillus niger]
  misc_feature (34)..(283): SWISSPROT Homolog: EC 1.5.1.2 Pyrroline-5-carboxylate reductase
MSSLQKSKLAFIGGGNMAAAIIGGLAAKGIDKQNICVSEPWEVNREKMAQTGVRTTTSNVEASQDADLLVIAVKPQVAKVVCQELAGAWAERKTTPLVISIAAGITLESMKEWLKLADGRIPHIVRVMPNTPALVGEGASGLFADSSVTAEEKDLAASLLASVSKVTEWVDREELIDVVTGLSGSGPAYFFAMVEHLVESATKLGLTKEQATRLATQTCLGAGRMLVESSDEPAQLRKNVTSPNGTTHAALQSFEASGFEGIVDKAVKAATDRGEELGRTLGKS

SEQ ID NO: 20693 - DNA, 2117 bp, Muscodor strobelii
  misc_feature: SGI EST ID NO. CUFF.48625.0
  misc_feature: Variant of the nucleotide sequence at SEQ ID NO 20691
tgaagctcgaagagagaacatcgagaaaacaaaaaatccagatcacctggttcacgatgagctcgttacagaaaagcaaattggccttcattggaggcggcaacatggccgccgccatcatcggcggtcttgcagccaaaggaatcgacaaacagaacatttgtgtttccgagccatgggaagtcaaccgtgagaagatggcgcaaacaggagtgcgcacaaccacatccaatgttgaagcatcgcaagacgcagacctactcgtcattgctgtcaagccacaggtcgcgaaagtcgtttgtcaagagcttgctggagcttgggccgagcgcaagacaacgcctctggttatttctatcgcggcgggcattaccctagaaagcatgaaggagtggttgaagttggctgatggacgtatcccccatatcgtccgtgtgatgccgaatacaccggcattggtcggcgaaggtgcatcgggtctattcgcagatagcagcgttactgcggaggagaaggatcttgctgcttcgctacttgctagtgttagcaaggtgactgagtgggtcgaccgagaagaactcattgatgtggttactggattatcaggatccggcccggcatacttctttgctatggtggaacacctagttgagagcgcgaccaagttggggttgacaaaggaacaggcaactcgccttgcgacacagacatgcctcggtgctggtagaatgctggtcgagtcttcagatgagccagcgcaactccgtaagaatgttacaagccccaatggtactacacatgctgcattgcaaagcttcgaggcatctggattcgagggaatcgtcgataaggctgtcaaggcggcaactgatagaggcgaggagttgggcagaacgctgggcaagtcatgatgcggatggaggtctctttagtgtgcctcggagcaaggatttgatatgcgatggaatcggtgcatgggacatcaatacctgctaaacacgaattgacggatttaaggcaacgaaaacaattatatggacagcatccgataagcacaatggcatccggactgattcgtactcgggcaaaatagagatcggggaatcaaatacatccttgagtccaaaacattaatacttatgctatgactagctttcgcgtctacacggtgctttcggtgaagagaggacaatgtgtttgaaagtatgcaattgaattgaaacatacgctatgcttattcacatgatgcaatgtcaatactatatacagatgaacgtaaggctggcttcatgcattaaaacaatcaacgcctataatcttggctgctcctccttcttgtcaataccagaaaacttaaccatcgtccgcccctggatactaccgctcttagtgagcagctttctcctgccactagtagaaagaggagcgcaatcatcgcgatcgcgaatatagtaggcccaatctgccgtctcgtcgagctcggtctgtgagtaaccattgcctaaccatgcgaagcggttaccagcgtatgtgacgtcgaaatcgtccatacgcagatccttcatcgcttcgatgtagtgcagagcactgccaggccacagtgctatgacaggtccgtcagcgcggggcttgtaccatgaacggcacgggtcagcccacactgttccctgcatgaaccagtctttgtactcgacgaagtccttcacggcctgctccttgacagcgaactgcttgatgttggtggtttggtagcgatcgatcaacaagcacatccagtcggcttgagcctcgatggcggacaagacggggccattgccaatggggcagtttggaccaagcgagatcaagtagttggggaaaccagcggcggctacacccatatatgactctgggtctttcgcccacttgtcttgcaaattctcgccggtgtgtgagacgatagggaagcggggtttgaagctggtgttgaatccggtcgcacatatgagaacatcgacgggatactccttgctgttatcacacaagcagcccttctcggtgatggaattaatctctccgtagacgacctcgacgttgggcttggttagagactctaggtagtcgacaccgggggtgag

SEQ ID NO: 20694 - DNA, 1779 bp, Muscodor strobelii
  misc_feature: SGI cDNA ID NO. 566991
  misc_feature: Encodes the peptide sequence at SEQ ID NO 20695
atggccgatttactactgccgaagtttggtcagaccaatgcagaccgcgaagccaacaagcgcttagaaggcccaatccatgccgagaggcatatgcgaattatcgtcgtgggagccggagcctccggtctgttgatggcatacaagcttcagaaacatttcaacaacttcagtttagcagtatacgagaagaatccgaaggttgcggggacatggtacgagaaccgctatccgggatgcgcttgcgacgtaccctcgcacaactacacatggagtttcgagcctaaactcgactggtcggcggtgtaccccccggcaaaggagattttcgactacttcgaggggttcgctacaaagtataacctacaccaatacgtacatctagagcactccgtaattggcgcctactggaatagcgacaggggcggctacgatgtgaagatcaaggacaccgctaataatttgattgttaccgaccactgtgacatcctcatcaatgccggcggtgtcctaaacaactggcaatggcctgcaattcctggcttagacaagtacaagggcacccttttgcacactgccaactgggacgactcggtaagcctggaagggaagcacgttggcctaatcggcaatggctcgtcaggtatacaaattctgcccgctatccgagacaaatgcagcaaagtcaccacgttcatccgcgaaccaacatgggtatcgcctgtgcagggtctggagcaacatcttttcagcgacgaggagaagtcgaccttcattaataagcccggtgccctcctcgaataccgaaaagagattgaaaccggcctgaacggccagttcggtatcttcctcaagaacaaccaagtcaacctcgaaacgcacacgtacatgctcgaccaaatgaagcagaagctaggcaacgcgtacctagaaaagaagctgatcccgcagtggagcgttgggtgccgtcgtctcacccccggtgtcgactacctagagtctctaaccaagcccaacgtcgaggtcgtctacggagagattaattccatcaccgagaagggctgcttgtgtgataacagcaaggagtatcccgtcgatgttctcatatgtgcgaccggattcaacaccagcttcaaaccccgcttccctatcgtctcacacaccggcgagaatttgcaagacaagtgggcgaaagacccagagtcatatatgggtgtagccgccgctggtttccccaactacttgatctcgcttggtccaaactgccccattggcaatggccccgtcttgtccgccatcgaggctcaagccgactggatgtgcttgttgatcgatcgctaccaaaccaccaacatcaagcagttcgctgtcaaggagcaggccgtgaaggacttcgtcgagtacaaagactggttcatgcagggaacagtgtgggctgacccgtgccgttcatggtacaagccccgcgctgacggacctgtcatagcactgtggcctggcagtgctctgcactacatcgaagcgatgaaggatctgcgtatggacgatttcgacgtcacatacgctggtaaccgcttcgcatggttaggcaatggttactcacagaccgagctcgacgagacggcagattgggcctactatattcgcgatcgcgatgattgcgctcctctttctactagtggcaggagaaagctgctcactaagagcggtagtatccaggggcggacgatggttaagttttctggtattgacaagaaggaggagcagccaagattatag

SEQ ID NO: 20695 - protein, 592 aa, Muscodor strobelii
  misc_feature: SGI Peptide ID NO. 566991
  misc_feature (1)..(582): NCBI GI: 261355411 Blast Desc: conserved [Verticillium albo-atrum VaMs.102]
  misc_feature (1)..(592): NCBI GI: 169613494 Blast Desc: SNOG_09878 [Phaeosphaeria nodorum SN15] gi|111062023|gb|EAT83143.1| SNOG_09878 [Phaeosphaeria nodorum SN15]
  misc_feature (17)..(585): NCBI GI: 189208576 Blast Desc: monoxygenase [Pyrenophora tritici-repentis Pt-1C-BFP] gi|187976714|gb|EDU43340.1| monoxygenase [Pyrenophora tritici-repentis Pt-1C-BFP]
  misc_feature (21)..(572): NCBI GI: 85110739 Blast Desc: NCU08747 [Neurospora crassa OR74A] gi|28925293|gb|EAA34372.1| conserved [Neurospora crassa OR74A] gi|38524239|emb|CAE75705.1| related to monooxigenase [Neurospora
  misc_feature (30)..(554): NCBI GI: 145604757 Blast Desc: MGG_07887 [Magnaporthe grisea 70-15] gi|145012696|gb|EDJ97350.1| MGG_07887 [Magnaporthe grisea 70-15]
  misc_feature (25)..(553): NCBI GI: 39977349 Blast Desc: MGG_06577 [Magnaporthe grisea 70-15] gi|145015980|gb|EDK00470.1| MGG_06577 [Magnaporthe grisea 70-15]
  misc_feature (26)..(588): NCBI GI: 145248141 Blast Desc: An13g01810 [Aspergillus niger] gi|134081068|emb|CAK41580.1| protein product [Aspergillus niger]
  misc_feature (26)..(577): NCBI GI: 256720074 Blast Desc: NECHADRAFT_56509 [Nectria haematococca mpVI 77-13-4]
  misc_feature (20)..(550): NCBI GI: 256720507 Blast Desc: NECHADRAFT_55865 [Nectria haematococca mpVI 77-13-4]
  misc_feature (98)..(553): NCBI GI: 189199464 Blast Desc: conserved [Pyrenophora tritici-repentis Pt-1C-BFP] gi|187983168|gb|EDU48656.1| conserved [Pyrenophora tritici-repentis Pt-1C-BFP]
  misc_feature (26)..(519): SWISSPROT Homolog: EC 1.14.13.84 4-hydroxyacetophenone monooxygenase
MADLLLPKFGQTNADREANKRLEGPIHAERHMRIIVVGAGASGLLMAYKLQKHFNNFSLAVYEKNPKVAGTWYENRYPGCACDVPSHNYTWSFEPKLDWSAVYPPAKEIFDYFEGFATKYNLHQYVHLEHSVIGAYWNSDRGGYDVKIKDTANNLIVTDHCDILINAGGVLNNWQWPAIPGLDKYKGTLLHTANWDDSVSLEGKHVGLIGNGSSGIQILPAIRDKCSKVTTFIREPTWVSPVQGLEQHLFSDEEKSTFINKPGALLEYRKEIETGLNGQFGIFLKNNQVNLETHTYMLDQMKQKLGNAYLEKKLIPQWSVGCRRLTPGVDYLESLTKPNVEVVYGEINSITEKGCLCDNSKEYPVDVLICATGFNTSFKPRFPIVSHTGENLQDKWAKDPESYMGVAAAGFPNYLISLGPNCPIGNGPVLSAIEAQADWMCLLIDRYQTTNIKQFAVKEQAVKDFVEYKDWFMQGTVWADPCRSWYKPRADGPVIALWPGSALHYIEAMKDLRMDDFDVTYAGNRFAWLGNGYSQTELDETADWAYYIRDRDDCAPLSTSGRRKLLTKSGSIQGRTMVKFSGIDKKEEQPRL

SEQ ID NO: 20696 - DNA, 1668 bp, Muscodor strobelii
  misc_feature: SGI cDNA ID NO. 566992
  misc_feature: Encodes the peptide sequence at SEQ ID NO 20697
atggtcttcaaatcaccttatccggacttgaatctacagcaaagcaatgtactcacatacttgtttcccaataccaaggagccttccgacgaaccattatgggttaatgcaagagagaatgagcaaaatctttcaccaaagcagctactaggatgggtaaaaagactttctttcggattggagaagctagggctaaagaagggagatgttgtcatgattcttacaccgaatcaaatattcgttcctgttgcatatttagggatcgtcggcgcagggtgttgcttcagtggtgccaatcccgcttatactgtccctgaattatgccatcagatcacaaacacgacaaccaaattgatccttgtacaccccgaccatctgaagtcggttctagcagcagcgtcaaaaacgaagttccctaaatcccggattttccagttttccgaagccgcgaatccaactcaagagggtgtatcggattggtgttcgttcatcggaagcgaagcgcagggtcagtcatatcaatggcctgaactctctccgagcgagtcgaaaaacacagttgcgactatcaattacagctcaggcactaccggtctgccaaagggagtctgcgtctcacacgcgaaccttattgccaatgtcgaacagaccatattcatgcgatatggtgtacttaaacttccgtttggccaaaggccacaggagagatggattgggtttttgccgctctatcacgcatatggccagctctacaccatcctgatggcaataaaactccaagtaccggtctacatcatgactgagtttagatacgaggaatttctattttacatcggaaagtacaaaattacgaatttacaacttgcaccgccagtattagtgatgctttcaaagcggccagagacatcccgctatgatctatctagtgtcaaggatgttctatgtggcgcggctccattatctcgtgaactacagaatgagtgccagaagaaattcaatattcacgtctatcaaggctggggcatgacagaggtgacgtgcggagctattcacgtcccaagaggtcgcaaggatgactcaggctctgtcggtcaattggaccctaactgtgaagccaagctgattgatgatgatggaaaagaggtcggcgctggccagcccggagagctgtatatcagggggccgaacgtgtgtatgcgatactggaggaatgaagaagcaacaagggaatcactagatgcggatggctggcttaagacaggagatgttgcagtcataaacgacaaaggctatttctggatcgtagacagaaagaaggagctcatcaaagtaaacgcgcttcaagtagcacctgcagagctcgagggcgtgctacttgagaatgaacacgtagcagacgccgcagctgtgggtattactgtacgaggagaggaagcgccaagagcatacgtagtcattcacgagacgtcaaagggagcggtcacaccaaatgatatccaagaatggataaaaccaagagtagctaaacataagtacttgaatgggggagtcgttttcatcgacgaggtgcctaaacttgcgagcggtaagatacagaggaagactatgagagaatgggcaaagagggacgcggcagagttagagcaggttgcaaagcccaagttgtaa

SEQ ID NO: 20697 - protein, 555 aa, Muscodor strobelii
  misc_feature: SGI Peptide ID NO. 566992
  misc_feature (45)..(469): Pfam Id: PF00501 Pfam Desc: AMP-binding enzyme
  misc_feature (1)..(545): NCBI GI: 67538232 Blast Desc: AN5286.2 [Aspergillus nidulans FGSC A4] gi|40743256|gb|EAA62446.1| AN5286.2 [Aspergillus nidulans FGSC A4]
  misc_feature (1)..(545): NCBI GI: 259485278 Blast Desc: TPA: conserved [Aspergillus nidulans FGSC A4]
  misc_feature (1)..(555): NCBI GI: 169613486 Blast Desc: SNOG_09874 [Phaeosphaeria nodorum SN15] gi|160702735|gb|EAT83139.2| SNOG_09874 [Phaeosphaeria nodorum SN15]
  misc_feature (1)..(555): NCBI GI: 119173778 Blast Desc: 4-coumarate:coenzyme A ligase [Coccidioides immitis RS]
  misc_feature (1)..(555): NCBI GI: 240111923 Blast Desc: AMP-binding enzyme, [Coccidioides posadasii C735 delta SOWgp]
  misc_feature (1)..(543): NCBI GI: 115386896 Blast Desc: [Aspergillus terreus NIH2624] gi|114190987|gb|EAU32687.1| [Aspergillus terreus NIH2624]
  misc_feature (1)..(549): NCBI GI: 189208566 Blast Desc: 4-coumarate-CoA ligase 2 [Pyrenophora tritici-repentis Pt-1C-BFP] gi|187976709|gb|EDU43335.1| 4-coumarate-CoA ligase 2 [Pyrenophora tritici-repentis Pt-1C-BFP]
  misc_feature (1)..(555): NCBI GI: 258570229 Blast Desc: [Uncinocarpus reesii 1704] gi|237904188|gb|EEP78589.1| [Uncinocarpus reesii 1704]
  misc_feature (220)..(552): NCBI GI: 261355412 Blast Desc: 4-coumarate-CoA ligase [Verticillium albo-atrum VaMs.102]
  misc_feature (52)..(543): NCBI GI: 240109728 Blast Desc: AMP-binding enzyme, [Coccidioides posadasii C735 delta SOWgp]
  misc_feature (3)..(539): SWISSPROT Homolog: EC 6.2.1.12 4-coumarate--CoA ligase
MVFKSPYPDLNLQQSNVLTYLFPNTKEPSDEPLWVNARENEQNLSPKQLLGWVKRLSFGLEKLGLKKGDVVMILTPNQIFVPVAYLGIVGAGCCFSGANPAYTVPELCHQITNTTTKLILVHPDHLKSVLAAASKTKFPKSRIFQFSEAANPTQEGVSDWCSFIGSEAQGQSYQWPELSPSESKNTVATINYSSGTTGLPKGVCVSHANLIANVEQTIFMRYGVLKLPFGQRPQERWIGFLPLYHAYGQLYTILMAIKLQVPVYIMTEFRYEEFLFYIGKYKITNLQLAPPVLVMLSKRPETSRYDLSSVKDVLCGAAPLSRELQNECQKKFNIHVYQGWGMTEVTCGAIHVPRGRKDDSGSVGQLDPNCEAKLIDDDGKEVGAGQPGELYIRGPNVCMRYWRNEEATRESLDADGWLKTGDVAVINDKGYFWIVDRKKELIKVNALQVAPAELEGVLLENEHVADAAAVGITVRGEEAPRAYVVIHETSKGAVTPNDIQEWIKPRVAKHKYLNGGVVFIDEVPKLASGKIQRKTMREWAKRDAAELEQVAKPKL

SEQ ID NO: 20698 - DNA, 587 bp, Muscodor strobelii
  misc_feature: SGI EST ID NO. CUFF.48554.0
  misc_feature: Variant of the nucleotide sequence at SEQ ID NO 20696
ctggatcgtagacagaaagaaggagctcatcaaagtaaacgcgcttcaagtagcacctgcagagctcgagggcgtgctacttgagaatgaacacgtagcagacgccgcagctgtgggtattactgtacgaggagaggaagcgccaagagcatacgtagtcattcacgagacgtcaaagggagcggtcacaccaaatgatatccaagaatggataaaaccaagagtagctaaacataagtacttgaatgggggagtcgttttcatcgacgaggtgcctaaacttgcgagcggtaagatacagaggaagactatgagagaatgggcaaagagggacgcggcagagttagagcaggttgcaaagcccaagttgtaactaatactctatgaatcaaatgtcattggtgactatatctttcttattggagctgatatacttcgattagctgcagaaaaccccgttaccttgatgtgaacgactgtctaatgacacaaaactggcttgattcgttcctaaatgggttggaggtcgtcggtgttatcataggatccggccgggatcggaactttggtccaattatgaagtctcg

SEQ ID NO: 20699 - DNA, 852 bp, Muscodor strobelii
  misc_feature: SGI cDNA ID NO. 566993
  misc_feature: Elevated expression when VOC is produced
  misc_feature: Encodes the peptide sequence at SEQ ID NO 20700
atgtcggacatatctaattttcacaacattttctcccttgagggcagaaccgcattggtcacaggtggctctcgaggcctcggcctgcacatggcgacggcgtttctgttggcaggttgctcgttagtcattgtcacagctcgcaagctcgagggtgatgtaggcatcaatcaggccgtggagaagctcaatgcgcttcctggtatccggggtaaagcagtaggccttgcagcgaacgtgggaaacacggatgctatcgtgaagcttgcaggcgaagtgaaagagctcgttggaagcaaaggtctcaatattatggtgtgcaatgcaggtgctacttggggctcgaggtttgaagatgcgccacctcacagctcggtgaagatcctagatctcaatgtgagaggcatttttgagcaggtgcaaaatttcttgcctcaactacaggctgccgcgtcaaaagaggatccttccaggatcgttattataagctcaaccgcaggcaccaatgttccccacattggcgagcacggcacaatcatgtactctacatcaaaagccgcagcggatcaccttggaaggaattttgcggtcgagctgggatctaagaacattacaaccaatatcatctcgcctggattcttcccgaccaagatcgcagcagggcttatcaacaacctcggtggcgaggagtccttaagtcgggataatccaatgggccgactgggtcaacctgatgacattgccggcgttgctacattcctttgctcgcgggcagctaaatatgtaaatggtgtcaatatcgctgtggatggggctgcgagactatccgccggtagattatcgagattgtaa

SEQ ID NO: 20700 - protein, 283 aa, Muscodor strobelii
  misc_feature: SGI Peptide ID NO. 566993
  misc_feature (16)..(200): Pfam Id: PF00106 Pfam Desc: short chain dehydrogenase
  misc_feature (16)..(48): Pfam Id: PF00106 Pfam Desc: short chain dehydrogenase
  misc_feature (1)..(283): NCBI GI: 261355414 Blast Desc: rhamnolipids biosynthesis 3-oxoacyl-[acyl-carrier-protein] reductase [Verticillium albo-atrum VaMs.102]
  misc_feature (1)..(278): NCBI GI: 239610213 Blast Desc: 3-oxoacyl-acyl-carrier-protein reductase [Ajellomyces dermatitidis ER-3]
  misc_feature (1)..(278): NCBI GI: 261192725 Blast Desc: 3-oxoacyl-acyl-carrier-protein reductase [Ajellomyces dermatitidis SLH14081] gi|239589251|gb|EEQ71894.1| 3-oxoacyl-acyl-carrier-protein reductase [Ajellomyces SLH14081]
  misc_feature (1)..(275): NCBI GI: 226279522 Blast Desc: 3-oxoacyl-[acyl-carrier-protein] reductase [Paracoccidioides brasiliensis Pb01]
  misc_feature (1)..(275): NCBI GI: 225678151 Blast Desc: short-chain dehydrogenase/reductase SDR [Paracoccidioides brasiliensis Pb03]
  misc_feature (1)..(283): NCBI GI: 169613484 Blast Desc: SNOG_09873 [Phaeosphaeria nodorum SN15] gi|111062018|gb|EAT83138.1| SNOG_09873 [Phaeosphaeria nodorum SN15]
  misc_feature (1)..(275): NCBI GI: 189208564 Blast Desc: 3-oxoacyl-(acyl-carrier-protein) reductase [Pyrenophora tritici-repentis Pt-1C-BFP] gi|187976708|gb|EDU43334.1| 3-oxoacyl-(acyl-carrier-protein)
  misc_feature (1)..(262): NCBI GI: 258572488 Blast Desc: conserved [Uncinocarpus reesii 1704] gi|237905276|gb|EEP79677.1| conserved [Uncinocarpus reesii 1704]
  misc_feature (1)..(282): NCBI GI: 67902832 Blast Desc: AN8403.2 [Aspergillus nidulans FGSC A4] gi|40747869|gb|EAA67025.1| AN8403.2 [Aspergillus nidulans FGSC A4] gi|259484337|tpe|CBF80469.1| TPA: conserved [Aspergillus FGSC
  misc_feature (2)..(280): NCBI GI: 85103212 Blast Desc: NCU03693 [Neurospora crassa OR74A] gi|11595574|emb|CAC18176.1| NADPH-dependent beta-ketoacyl reductase (rhlG) [Neurospora crassa] gi|28923015|gb|EAA32233.1|
  misc_feature (7)..(275): SWISSPROT Homolog: EC 1.1.1.100 3-oxoacyl-[acyl-carrier-protein] reductase
  misc_feature: Useful for introducing or modulating the production of volatile compounds
MSDISNFHNIFSLEGRTALVTGGSRGLGLHMATAFLLAGCSLVIVTARKLEGDVGINQAVEKLNALPGIRGKAVGLAANVGNTDAIVKLAGEVKELVGSKGLNIMVCNAGATWGSRFEDAPPHSSVKILDLNVRGIFEQVQNFLPQLQAAASKEDPSRIVIISSTAGTNVPHIGEHGTIMYSTSKAAADHLGRNFAVELGSKNITTNIISPGFFPTKIAAGLINNLGGEESLSRDNPMGRLGQPDDIAGVATFLCSRAAKYVNGVNIAVDGAARLSAGRLSRL

SEQ ID NO: 20701 - DNA, 972 bp, Muscodor strobelii
  misc_feature: SGI EST ID NO. CUFF.48565.0
  misc_feature: Variant of the nucleotide sequence at SEQ ID NO 20699
ggcatgtttaccgcttgtaattcaactcagtatactcacattatgtagacgacgattctcattgcgagaaggaaaaaaaattgcactatcatacaatcatcccagtatagtagactaatcactttcacgatgtcggacatatctaattttcacaacattttctcccttgagggcagaaccgcattggtcacaggtggctctcgaggcctcggcctgcacatggcgacggcgtttctgttggcaggttgctcgttagtcattgtcacagctcgcaagctcgagggtgatgtaggcatcaatcaggccgtggagaagctcaatgcgcttcctggtatccggggtaaagcagtaggccttgcagcgaacgtgggaaacacggatgctatcgtgaagcttgcaggcgaagtgaaagagctcgttggaagcaaaggtctcaatattatggtgtgcaatgcaggtgctacttggggctcgaggtttgaagatgcgccacctcacagctcggtgaagatcctagatctcaatgtgagaggcatttttgagcaggtgcaaaatttcttgcctcaactacaggctgccgcgtcaaaagaggatccttccaggatcgttattataagctcaaccgcaggcaccaatgttccccacattggcgagcacggcacaatcatgtactctacatcaaaagccgcagcggatcaccttggaaggaattttgcggtcgagctgggatctaagaacattacaaccaatatcatctcgcctggattcttcccgaccaagatcgcagcagggcttatcaacaacctcggtggcgaggagtccttaagtcgggataatccaatgggccgactgggtcaacctgatgacattgccggcgttgctacattcctttgctcgcgggcagctaaatatgtaaatggtgtcaatatcgctgtggatggggctgcgagactatccgccggtagattatcg

SEQ ID NO: 20702 - DNA, 1512 bp, Muscodor strobelii
  misc_feature: SGI cDNA ID NO. 566994
  misc_feature: Encodes the peptide sequence at SEQ ID NO 20703
atgagtcaattaggcccttcccttaaagaatccgccaggaaaataccaacagatttcacatggagcaagactaatctaccgaaaaagcttttcattaacaacgagtatgtcgactccaagaacaccaagaaactagaggtctataatccaaaagacggttccctcgttgccaatgacgtcgcgctcgccggcgaacacgatgtcgatgctgctgttgctgccgctgaggccgctttcccagggtggaagaaaacatctcctgtagagaggagaaattgcatgaataggctagccgacctgattgaacagcaaggcaccgacttcgccgatctcacacgcctaacactcggtgctcctttcgcatctttcggttcattcgagatcaacctcgccgcagagggcttccgatacttcgcaggctggattgataagttcgccggcgagagttatcctcaagatgatggattccttaagatcgttcgcaacgagccccttggggttactgctggtatcattccctggaacggacccatgggcaatgtcggtatgaaggcgggtcccgcgctggctacgggtaactgcttcattctcaagccatctgagaagacgcctttcgcagcattggcacttggtcaactcatcaaagaggccggtttcccaccgggtgtcttccagattctatcgggtgacggttccactggagccctgcttgcaagccacatgagagtgcggaagatcagctttactggctctaccacaactggccgcaaaatccaggaaatggctgctaagagcaacctgaagcgcatcaccctcgagctcggcggcaagagtcctgcaattgtgtttgatgatgcgaaccttgagaacgcgatctcatggtgtgtcaatgcaatttgcgcgaatacaggccaggtctgcttcgccgcctctagagtgtatgttcaagaaggcatattcgataagttcgctgctgggtataaggccgcgatggaggagcgtgccaagactatcggagacccatgggcggaggcaactgtcatgggtcctttggtggacaagagtcagttcgagcgagtctctggcttcctcgagcgcggaaagagccaagggactttgttgaccggtggcgctcgtgttggtgatcagggctttttcattcagccaacggtttttaccaatgttgcagaagactccgagatttgcacacaggaaattttcggcccggtctccgttttgaacaagttcaagaccgaggaagagatcatcgcaaaggctaacgacacaaacttcggtctcatggccggtgtattcacacaagacatcaataaagctttgcgcgtatcttcagatatcgatagcggaatggttggcattaattgcgttagtttatgcttcttgacagcgccattcggtggatcgaaggagagcggcgcaggtcgtgaaaatgccatcaatgccctgcgcatgtttacagaaccgaagaccgtgatggtcaacttgacttactaa

SEQ ID NO: 20703 - protein, 503 aa, Muscodor strobelii
  misc_feature: SGI Peptide ID NO. 566994
  misc_feature (36)..(497): Pfam Id: PF00171 Pfam Desc: Aldehyde dehydrogenase family
  misc_feature (1)..(503): NCBI GI: 261355416 Blast Desc: aldehyde dehydrogenase [Verticillium albo-atrum VaMs.102]
  misc_feature (19)..(503): NCBI GI: 189208560 Blast Desc: aldehyde dehydrogenase X, mitochondrial precursor [Pyrenophora tritici-repentis Pt-1C-BFP] gi|187976706|gb|EDU43332.1| aldehyde dehydrogenase X, precursor
  misc_feature (19)..(503): NCBI GI: 169613480 Blast Desc: SNOG_09871 [Phaeosphaeria nodorum SN15] gi|160702733|gb|EAT83136.2| SNOG_09871 [Phaeosphaeria nodorum SN15]
  misc_feature (29)..(501): NCBI GI: 256724758 Blast Desc: NECHADRAFT_84385 [Nectria haematococca mpVI 77-13-4]
  misc_feature (29)..(499): NCBI GI: 256720162 Blast Desc: NECHADRAFT_56373 [Nectria haematococca mpVI 77-13-4]
  misc_feature (21)..(501): NCBI GI: 46139039 Blast Desc: FG11034.1 [Gibberella zeae PH-1]
  misc_feature (24)..(501): NCBI GI: 242820069 Blast Desc: aldehyde dehydrogenase, [Talaromyces stipitatus ATCC 10500] gi|218713907|gb|EED13331.1| aldehyde dehydrogenase, [Talaromyces stipitatus ATCC 10500]
  misc_feature (27)..(501): NCBI GI: 154310767 Blast Desc: BC1G_06362 [Botryotinia fuckeliana B05.10] gi|150851161|gb|EDN26354.1| BC1G_06362 [Botryotinia fuckeliana B05.10]
  misc_feature (23)..(501): NCBI GI: 110592121 Blast Desc: aldehyde dehydrogenase [Beauveria bassiana]
  misc_feature (27)..(501): NCBI GI: 218440679 Blast Desc: Aldehyde Dehydrogenase [Cyanothece sp. PCC 7424] gi|218173407|gb|ACK72140.1| Aldehyde Dehydrogenase [Cyanothece sp. PCC 7424]
  misc_feature (24)..(503): SWISSPROT Homolog: EC 1.2.1.3 Aldehyde dehydrogenase (NAD(+))
  misc_feature: Useful for introducing or modulating the production of volatile compounds
  misc_feature: Useful for fungicidal and/or biocontrol applications
MSQLGPSLKESARKIPTDFTWSKTNLPKKLFINNEYVDSKNTKKLEVYNPKDGSLVANDVALAGEHDVDAAVAAAEAAFPGWKKTSPVERRNCMNRLADLIEQQGTDFADLTRLTLGAPFASFGSFEINLAAEGFRYFAGWIDKFAGESYPQDDGFLKIVRNEPLGVTAGIIPWNGPMGNVGMKAGPALATGNCFILKPSEKTPFAALALGQLIKEAGFPPGVFQILSGDGSTGALLASHMRVRKISFTGSTTTGRKIQEMAAKSNLKRITLELGGKSPAIVFDDANLENAISWCVNAICANTGQVCFAASRVYVQEGIFDKFAAGYKAAMEERAKTIGDPWAEATVMGPLVDKSQFERVSGFLERGKSQGTLLTGGARVGDQGFFIQPTVFTNVAEDSEICTQEIFGPVSVLNKFKTEEEIIAKANDTNFGLMAGVFTQDINKALRVSSDIDSGMVGINCVSLCFLTAPFGGSKESGAGRENAINALRMFTEPKTVMVNLTY

SEQ ID NO: 20704 - DNA, 1981 bp, Muscodor strobelii
  misc_feature: SGI EST ID NO. CUFF.48569.0
  misc_feature: Variant of the nucleotide sequence at SEQ ID NO 20702
gaaaattagtccttgtcagtaaatagttggtacgagcccgttgtgtggatgtgaatggcatgctggaagtattcacggaattggggacggattttgcggcgagtcataaactcattcatatcgtttgtaggccagtcatgtaacagcaattctgtatgcatatttgtatgtgatacaggttgctacagtacaaattaattgaaaccaataaacatacatcatctcctctacgatacctgtttaaagatctatcccgcgtcagctacataccaaaatcttgatacaaactatctgaagaataaagaaaaatgagtcaattaggcccttcccttaaagaatccgccaggaaaataccaacagatttcacatggagcaagactaatctaccgaaaaagcttttcattaacaacgaggtatgtgacgcttccgaagtgtaactgagagtagctaaggctcataaagcaatagtatgtcgactccaagaacaccaagaaactagaggtctataatccaaaagacggttccctcgttgccaatgacgtcgcgctcgccggcgaacacgatgtcgatgctgctgttgctgccgctgaggccgctttcccagggtggaagaaaacatctcctgtagagaggagaaattgcatgaataggctagccgacctgattgaacagcaaggcaccgacttcgccgatctcacacgcctaacactcggtgctcctttcgcatctttcggttcattcgagatcaacctcgccgcagagggcttccgatacttcgcaggctggattgataagttcgccggcgagagttatcctcaagatgatggattccttaagatcgttcgcaacgagccccttggggttactgctggtatcattccctggaacggacccatgggcaatgtcggtatgaaggcgggtcccgcgctggctacgggtaactgcttcattctcaagccatctgagaagacgcctttcgcagcattggcacttggtcaactcatcaaagaggccggtttcccaccgggtgtcttccagattctatcgggtgacggttccactggagccctgcttgcaagccacatgagagtgcggaagatcagctttactggctctaccacaactggccgcaaaatccaggaaatggctgctaagagcaacctgaagcgcatcaccctcgagctcggcggcaagagtcctgcaattgtgtttgatgatgcgaaccttgagaacgcgatctcatggtgtgtcaatgcaatttgcgcgaatacaggccaggtctgcttcgccgcctctagagtgtatgttcaagaaggcatattcgataagttcgctgctgggtataaggccgcgatggaggagcgtgccaagactatcggagacccatgggcggaggcaactgtcatgggtcctttggtggacaagagtcagttcgagcgagtctctggcttcctcgagcgcggaaagagccaagggactttgttgaccggtggcgctcgtgttggtgatcagggctttttcattcagccaacggtttttaccaatgttgcagaagactccgagatttgcacacaggaaattttcggcccggtctccgttttgaacaagttcaagaccgaggaagagatcatcgcaaaggctaacgacacaaacttcggtctcatggccggtgtattcacacaagacatcaataaagctttgcgcgtatcttcagatatcgatagcggaatggttggcattaattgcgttagtttatgcttcttgacagcgccattcggtggatcgaaggagagcggcgcaggtcgtgaaaatgccatcaatgccctgcgcatgtttacagaaccgaagaccgtgatggtcaacttgacttactaagttgattaagtagtcctgtattttagttgggaaacatgattacgaattcaatgtgatggaagtcaagtcatgcacgtgttcgagacgcgtcacgcgtcaccgtcgc

SEQ ID NO: 20705 - DNA, 648 bp, Muscodor strobelii
  misc_feature: SGI cDNA ID NO. 566995
  misc_feature: Encodes the peptide sequence at SEQ ID NO 20706
atgggttatgaccatgccccagagggccatggagagtatctctatgaaaacgtgcgggttccaattgaaaatgttattcttggcgagggtcgcgcgttcgaaattgcccaaggcagattaggacctggccgcattcaccactgcatgcgtctcatcggccaatgtgaacgtgcatacgagcttgctctcattcgatgcaatgatcagcgtaagaagccccgtggaaagctgatcggcgagttcgactcgaatatagagagaattgcacaaatgcggcttgagattgatgcaatgaggcttgttgtcttgaacgccgccgataccatggacttacacggcaacaaagctggcaaacgcgcaattgctcaaagcaaaatccttgtgccgaatgtagtgacgaagattgtagatgagtgtatgcagatctacggtggacaaggtctgacacaacacacaattctgcctgagatctggacctatgctcggttcgtccgtgtcgctgacggacccgatgctgcacacagacatcaagttggaagagaagagatgaaatcagctgcaaagttcgccgagaggtataagaagtatgacgagaaatacaaggagcttgcggagtattacggggagaaatatgtcagctttgattga

SEQ ID NO: 20706 - protein, 215 aa, Muscodor strobelii
  misc_feature: SGI Peptide ID NO. 566995
  misc_feature (30)..(183): Pfam Id: PF00441 Pfam Desc: Acyl-CoA dehydrogenase, C-terminal domain
  misc_feature (1)..(208): NCBI GI: 189208552 Blast Desc: acyl-CoA dehydrogenase family member 11 [Pyrenophora tritici-repentis Pt-1C-BFP] gi|187976702|gb|EDU43328.1| acyl-CoA dehydrogenase family member 11 [Pyrenophora tritici-repentis
  misc_feature (1)..(208): NCBI GI: 169613468 Blast Desc: SNOG_09865 [Phaeosphaeria nodorum SN15] gi|160702730|gb|EAT83130.2| SNOG_09865 [Phaeosphaeria nodorum SN15]
  misc_feature (1)..(208): NCBI GI: 67538234 Blast Desc: AN5287.2 [Aspergillus nidulans FGSC A4] gi|40743257|gb|EAA62447.1| AN5287.2 [Aspergillus nidulans FGSC A4] gi|259485277|tpe|CBF82167.1| TPA: conserved [Aspergillus FGSC
  misc_feature (2)..(208): NCBI GI: 238914584 Blast Desc: FadE2-like acyl-CoA dehydrogenase [Beauveria bassiana]
  misc_feature (2)..(208): NCBI GI: 256731463 Blast Desc: [Nectria haematococca mpVI 77-13-4]
  misc_feature (1)..(208): NCBI GI: 189189220 Blast Desc: acyl-CoA dehydrogenase family member 11 [Pyrenophora tritici-repentis Pt-1C-BFP] gi|187972555|gb|EDU40054.1| acyl-CoA dehydrogenase family member 11 [Pyrenophora tritici-repentis
  misc_feature (2)..(208): NCBI GI: 116199143 Blast Desc: conserved [Chaetomium globosum CBS 148.51] gi|88179006|gb|EAQ86474.1| conserved [Chaetomium globosum CBS 148.51]
  misc_feature (2)..(208): NCBI GI: 46121523 Blast Desc: FG05140.1 [Gibberella zeae PH-1]
  misc_feature (2)..(210): NCBI GI: 85103572 Blast Desc: NCU01181 [Neurospora crassa OR74A] gi|18376287|emb|CAD21400.1| conserved [Neurospora crassa] gi|28923094|gb|EAA32311.1| NCU01181 [Neurospora crassa OR74A]
  misc_feature (2)..(207): NCBI GI: 39948169 Blast Desc: conserved [Magnaporthe grisea 70-15] gi|145010286|gb|EDJ94942.1| conserved [Magnaporthe grisea 70-15]
  misc_feature (15)..(184): SWISSPROT Homolog: EC 1.3.99.3 Acyl-CoA dehydrogenase
  misc_feature: Useful for introducing or modulating the production of volatile compounds
  misc_feature: Useful for fungicidal and/or biocontrol applications
MGYDHAPEGHGEYLYENVRVPIENVILGEGRAFEIAQGRLGPGRIHHCMRLIGQCERAYELALIRCNDQRKKPRGKLIGEFDSNIERIAQMRLEIDAMRLVVLNAADTMDLHGNKAGKRAIAQSKILVPNVVTKIVDECMQIYGGQGLTQHTILPEIWTYARFVRVADGPDAAHRHQVGREEMKSAAKFAERYKKYDEKYKELAEYYGEKYVSFD

SEQ ID NO: 20707 - DNA, 875 bp, Muscodor strobelii
  misc_feature: SGI EST ID NO. CUFF.48571.0
  misc_feature: Variant of the nucleotide sequence at SEQ ID NO 20705
tgataaatgggctagacactccatgctccttgtacctgcgaactccccaggcctcactcaagttcgcaatctcacgataatgggttatgaccatgccccagagggccatggagagtatctctatgaaaacgtgcgggttccaattgaaaatgttattcttggcgagggtcgcgcgttcgaaattgcccaaggcagattaggacctggccgcattcaccactgcatgcgtctcatcggccaatgtgaacgtgcatacgagcttgctctcattcgatgcaatgatcagcgtaagaagccccgtggaaagctgatcggcgagttcgactcgaatatagagagaattgcacaaatgcggcttgagattgatgcaatgaggcttgttgtcttgaacgccgccgataccatggacttacacggcaacaaagctggcaaacgcgcaattgctcaaagcaaaatccttgtgccgaatgtagtgacgaagattgtagatgagtgtatgcagatctacggtggacaaggtctgacacaacacacaattctgcctgagatctggacctatgctcggttcgtccgtgtcgctgacggacccgatgctgcacacagacatcaagttggaagagaagagatgaaatcagctgcaaagttcgccgagaggtataagaagtatgacgagaaatacaaggagcttgcggagtattacggggagaaatatgtcagctttgattgaattaattagcttatatacccggcgctcttgtcatcatttagagaggcaaagttttgggcatcaactatccacaatgcttcaaaagattttcgtactcgtggctaaatctagacgaagttttgtatgtgcagtatctcacggaggtgag

SEQ ID NO: 20708 - DNA, 1176 bp, Muscodor strobelii
  misc_feature: SGI cDNA ID NO. 566996
  misc_feature: Encodes the peptide sequence at SEQ ID NO 20709
atggcaccgaatcatgccctcatatttggtgctagcgggatatctgggtgggcaattaccaaagccttagcagatggctatcccgcaaaagacacattcgagtcgatcaccgctctgacaaaccgtacactttcgcgcgaagatgctctgtggcctgccacgtcaaagctcgatgtcgtgagcgggattgacatcctcacggaagcagggcagggtgctttcgaggccgagctcaaagagaaagtcaaaaacatctcgtcagtcacacatgtctatttctacgcctatgttatgagtgaggactcagcgaaagaagtctcgaccaacgaggaacttatcaagcgtgctgtgaccgcggtggaaaatctgtcacccaagcttagatatgtggttcttcccactggaaccaaagcctacggtgtcatgcttctcgacaaattcccatttcccaaggatctccctctttcggagaaattgcctcgcattcccgagccatggcgctcccagatgttctattatagccaggtagacgcactggctgccatgtcacgaggtaagaagtggacttggtgcgagatcatcccggacgtcatcgttggctttgtgccaaacaataacgtatactgcatggcccaagttctgggtacctacttatctctgtatgcggaggtcaatggaaagggcagcgaagttgcctttcccggcaatgaatcgtcctggaaagcgttgagcaacgacagcagccaggacatagtagccaaggcgtccatcatcgcatctctgaatcctgaaaaaagtgccgagcagcgctacaatacagccgatgaccctgttccctcgtcttggagcaaaaaatggccaattgtctgcgagtactttggcctgaagggagtcggtccgttcccatcggggccacaacccacgcagtactgtgctgaccaccttgatgagtggaaggcgatggaggagaaatacggcctgaagaaaggcagagttggcaacgatagaagctttggcgggttcccttatctcatcatgactctcttcgactttgatagaagtctggacgtgagcaaagtgcaggacatgatgggtgatcacaaggtcgaggctgacacgaagggtgtttggtacactgcatttgataggttccgtgaggctaagatcatcccatga

SEQ ID NO: 20709 - protein, 391 aa, Muscodor strobelii
  misc_feature: SGI Peptide ID NO. 566996
  misc_feature (1)..(391): NCBI GI: 145241628 Blast Desc: An09g01430 [Aspergillus niger] gi|134077999|emb|CAK49064.1| protein product [Aspergillus niger]
  misc_feature (4)..(391): NCBI GI: 115386892 Blast Desc: conserved [Aspergillus terreus NIH2624] gi|114190985|gb|EAU32685.1| conserved [Aspergillus terreus NIH2624]
  misc_feature (4)..(391): NCBI GI: 169609028 Blast Desc: SNOG_07599 [Phaeosphaeria nodorum SN15] gi|111063945|gb|EAT85065.1| SNOG_07599 [Phaeosphaeria nodorum SN15]
  misc_feature (89)..(391): NCBI GI: 261355424 Blast Desc: SirQ [Verticillium albo-atrum VaMs.102]
  misc_feature (3)..(391): NCBI GI: 115399764 Blast Desc: conserved [Aspergillus terreus NIH2624] gi|114191137|gb|EAU32837.1| conserved [Aspergillus terreus NIH2624]
  misc_feature (4)..(391): NCBI GI: 67538238 Blast Desc: AN5289.2 [Aspergillus nidulans FGSC A4] gi|40743259|gb|EAA62449.1| AN5289.2 [Aspergillus nidulans FGSC A4] gi|259485275|tpe|CBF82164.1| TPA: conserved [Aspergillus FGSC
  misc_feature (4)..(390): NCBI GI: 242771574 Blast Desc: conserved [Talaromyces stipitatus ATCC 10500] gi|218721488|gb|EED20906.1| conserved [Talaromyces stipitatus ATCC 10500]
  misc_feature (6)..(391): NCBI GI: 169613478 Blast Desc: SNOG_09870 [Phaeosphaeria nodorum SN15] gi|111062015|gb|EAT83135.1| SNOG_09870 [Phaeosphaeria nodorum SN15]
  misc_feature (4)..(390): NCBI GI: 145241980 Blast Desc: An09g03200 [Aspergillus niger] gi|134078179|emb|CAK40259.1| protein product [Aspergillus niger]
  misc_feature (6)..(391): NCBI GI: 189208558 Blast Desc: conserved [Pyrenophora tritici-repentis Pt-1C-BFP] gi|187976705|gb|EDU43331.1| conserved [Pyrenophora tritici-repentis Pt-1C-BFP]
MAPNHALIFGASGISGWAITKALADGYPAKDTFESITALTNRTLSREDALWPATSKLDVVSGIDILTEAGQGAFEAELKEKVKNISSVTHVYFYAYVMSEDSAKEVSTNEELIKRAVTAVENLSPKLRYVVLPTGTKAYGVMLLDKFPFPKDLPLSEKLPRIPEPWRSQMFYYSQVDALAAMSRGKKWTWCEIIPDVIVGFVPNNNVYCMAQVLGTYLSLYAEVNGKGSEVAFPGNESSWKALSNDSSQDIVAKASIIASLNPEKSAEQRYNTADDPVPSSWSKKWPIVCEYFGLKGVGPFPSGPQPTQYCADHLDEWKAMEEKYGLKKGRVGNDRSFGGFPYLIMTLFDFDRSLDVSKVQDMMGDHKVEADTKGVWYTAFDRFREAKIIP

SEQ ID NO: 20710 - DNA, 1857 bp, Muscodor strobelii
  misc_feature: SGI cDNA ID NO. 566997
  misc_feature: Encodes the peptide sequence at SEQ ID NO 20711
atgtcgccttcagcagtggcagagccaaatggaattgcgccagagactgccgagcaactcaagggtgagggaccagcagcgcctatggatgtgccacctaagaaaaacgggacagaatggaaggatgaccttcactacgctccagttgtagaccccaagactacttacagagttctcgatcagtatcattccaagccaacgaaattacgcgtcgcttgcatcggcgctggcgcatcaggtctatgtcttgcatacaaaatggaaagacaaatggtgcccggtagttgggacctgacgttgttcgagaagaatcctgtttttggaggtacttggtacgaaaatacgtatcctggagttgcttgcgacataccttcacctctttacacatttagttgggacccaaaaccagactggtcgcactactacgcctatggcggagaaattcgaagatatttcgaagactttgcgaagcgacacaactctgaacagtacatgaaactgaacaccaaggtcgttgaaggccgatgggacgaagaaaaaggagtctggcagctcacgcttgaggatcaggtcaccaaagctcattggtacgattggtgccatgtcttaattaatggtaccggtatcctcaacaactgggtttggccaaacatcaagggtattgacgacttcaagggtccgaagatgcactctgcacactgggatcactctgttgacttgaagggcaagtctatcggtatcattggcgttggcagtaccgccattcagattgtaccacagttacaaaaggtagcaaaggacctaaaggtcttcatgcgatcacccacatgggtatcacctccttttggaggcggcgttctagaagaagatcttcgaaagggagaaacgggagctccaggcaaccggcagtacgaatttactgatgccgacaaagagaagttcaggaccgatcccgagtacttcttgacacttcgcaagcgtattgaagccgagataaactcacttttcagcatgtatcatcaaggatccgatatgtctaatctaatgaggaaaacaatcacagaggaaatggagcgaagaataggacctggaaacgaggagctgaagaggttccttattccgaagtgggcaccaggatgtcgacgtatttcacctggtgatggatttctcgaggcactcgtcgagcccaatgtccatcccgtcttaggcggcgttaaggagatcactcccgagggcctcatctcagaggatggcacagagtacaagtttgatgtgctcgtatgcgcaacaggttttaacgttgctttcagaccagcattcaaactcattaacagcaagggcaagtcgctcgacgaagattggggtcagggcgtgaacctttacttcggtgtgtcggcacctcgtttccctaactattacaccattgttggacctggtgctacgtggtcttcaggcacactcctcccttcgatcgaaacaactatcgagtactccattaagatgatgaagaagatccaacatgagaatatccgatcgattgatgttagacaagacgctgttgacgaaatttacgcacatttcgatgaatttcacagtaagactgtgttcaaagaggagtgcaacagttggttcaaggcaggcaaatcaactggtcgcatctatctgtggcctggctgtactatccactttttgaagaccatcaaagagccccgattcgaagattacaacattagatacaggtactccaacagatttgccttccttggcaatggagaagtcaaggccctttacaagaaagatttcaagggcttggctacatatgtgcgtgattccgatcacgaatggaacgtcgaataa

SEQ ID NO: 20711 - protein, 618 aa, Muscodor strobelii
  misc_feature: SGI Peptide ID NO. 566997
  misc_feature (1)..(618): NCBI GI: 261355425 Blast Desc: 4-hydroxyacetophenone monooxygenase [Verticillium albo-atrum VaMs.102]
  misc_feature (56)..(618): NCBI GI: 169613488 Blast Desc: SNOG_09875 [Phaeosphaeria nodorum SN15] gi|111062020|gb|EAT83140.1| SNOG_09875 [Phaeosphaeria nodorum SN15]
  misc_feature (56)..(618): NCBI GI: 189208568 Blast Desc: conserved [Pyrenophora tritici-repentis Pt-1C-BFP] gi|187976710|gb|EDU43336.1| conserved [Pyrenophora tritici-repentis Pt-1C-BFP]
  misc_feature (45)..(612): NCBI GI: 145604757 Blast Desc: MGG_07887 [Magnaporthe grisea 70-15] gi|145012696|gb|EDJ97350.1| MGG_07887 [Magnaporthe grisea 70-15]
  misc_feature (53)..(612): NCBI GI: 39977349 Blast Desc: MGG_06577 [Magnaporthe grisea 70-15] gi|145015980|gb|EDK00470.1| MGG_06577 [Magnaporthe grisea 70-15]
  misc_feature (59)..(614): NCBI GI: 85110739 Blast Desc: NCU08747 [Neurospora crassa OR74A] gi|28925293|gb|EAA34372.1| conserved [Neurospora crassa OR74A] gi|38524239|emb|CAE75705.1| related to monooxigenase [Neurospora
  misc_feature (69)..(612): NCBI GI: 242799328 Blast Desc: monooxygenase, [Talaromyces stipitatus ATCC 10500] gi|218716700|gb|EED16121.1| monooxygenase, [Talaromyces stipitatus ATCC 10500]
  misc_feature (56)..(609): NCBI GI: 240111172 Blast Desc: Flavin-binding monooxygenase-like family protein [Coccidioides posadasii C735 delta SOWgp]
  misc_feature (56)..(591): NCBI GI: 238481869 Blast Desc: dimethylaniline monooxygenase, [Aspergillus flavus NRRL3357] gi|220700223|gb|EED56561.1| dimethylaniline monooxygenase, [Aspergillus flavus NRRL3357]
  misc_feature (49)..(591): NCBI GI: 60738772 Blast Desc: MoxY [Phaeomoniella chlamydospora]
  misc_feature (69)..(577): SWISSPROT Homolog: EC 1.14.13.84 4-hydroxyacetophenone monooxygenase
MSPSAVAEPNGIAPETAEQLKGEGPAAPMDVPPKKNGTEWKDDLHYAPVVDPKTTYRVLDQYHSKPTKLRVACIGAGASGLCLAYKMERQMVPGSWDLTLFEKNPVFGGTWYENTYPGVACDIPSPLYTFSWDPKPDWSHYYAYGGEIRRYFEDFAKRHNSEQYMKLNTKVVEGRWDEEKGVWQLTLEDQVTKAHWYDWCHVLINGTGILNNWVWPNIKGIDDFKGPKMHSAHWDHSVDLKGKSIGIIGVGSTAIQIVPQLQKVAKDLKVFMRSPTWVSPPFGGGVLEEDLRKGETGAPGNRQYEFTDADKEKFRTDPEYFLTLRKRIEAEINSLFSMYHQGSDMSNLMRKTITEEMERRIGPGNEELKRFLIPKWAPGCRRISPGDGFLEALVEPNVHPVLGGVKEITPEGLISEDGTEYKFDVLVCATGFNVAFRPAFKLINSKGKSLDEDWGQGVNLYFGVSAPRFPNYYTIVGPGATWSSGTLLPSIETTIEYSIKMMKKIQHENIRSIDVRQDAVDEIYAHFDEFHSKTVFKEECNSWFKAGKSTGRIYLWPGCTIHFLKTIKEPRFEDYNIRYRYSNRFAFLGNGEVKALYKKDFKGLATYVRDSDHEWNVE

SEQ ID NO: 20712 - DNA, 468 bp, Muscodor strobelii
  misc_feature: SGI EST ID NO. CUFF.48598.0
  misc_feature: Variant of the nucleotide sequence at SEQ ID NO 20710
gtcgccttcagcagtggcagagccaaatggaattgcgccagagactgccgagcaactcaagggtgagggaccagcagcgcctatggatgtgccacctaagaaaaacgggacagaatggaaggatgaccttcactacgctccagttgtagaccccaagactacttacagagttctcgatcagtatcattccaagccaacgaaattacgcgtcgcttgcatcggcgctggcgcatcaggtctatgtcttgcatacaaaatggtcagtaaatgactcttcgtcgcacgggtaaggcgatgtcgtattgacaaagcttcaatattaggaaagacaaatggtgcccggtagttgggacctgacgttgttcgagaagaatcctgtttttggaggtacttggtacgaaaatacgtatcctggagttgcttgcgacataccttcacctctttacacatttagttgggacccaaaac

SEQ ID NO: 20713 - DNA, 2679 bp, Muscodor strobelii
  misc_feature: SGI cDNA ID NO. 566998
  misc_feature: Encodes the peptide sequence at SEQ ID NO 20714
atgcttgaagacatgctgctcgagaaaggtgtcgttcctccagcagctgtacatcctccgaaaaccaaacaagaagcgttgaccacggaatccggagaagaatctcgacctgtaacaagcgcagcagggaatctcacgagcttgtcagatcagaatggctctccgaattcgcctattcgcgatgtgccatcgccaccagactcccatgaagattatgccgttcatgagagtccaatgcaggactttgtcaatgtcgcgaatgtgccaatggggacggtgcctcgagaaatatctccatttcggatgcttgatgctaaacaagaagacacgattcatcgtctcttcgccaccgaaggcagtctcacctttgaccaaatctcgggcagattacgattttttggaccaactgctaatagtcacgtctacgctgagtcgcccgacaaatacgactctagagagccaccagagcaaattcgtcgggcagagcgtattattagatccctcacacctgaaacgcacgattatctcatgcaaagcttttgggaatattacaatggtcccctccaggtaattgataaagaggcattcgagacggacagagactcgcaaaatccaaaattctattcctcacttctgcatatcacgattcttgctggaggatggcgattcacggataaagaccgtgaggacatgatgagattgaatctagggaaccgtgaaagcactctacatcgagaagccaagtatatgcttgatgttgagctggagaggccaggcggaattccaagtgtgcaagctcttttgattctaggtgatctcgaaaccggtgttggcagagacaacactggttggatgtattcaggaatggcaaatcgtttggcctttgacgttgggttacatcttgactgcagcaacaatggccttccagaccaagacgttcgcatacggcaaatggtaatgagggcctgtattctgtacgataagtactgggccttatttctcggtcggccaacgagtatcaaaagccaggatgtaggcatggacttgctctctaagagatttacctctacacttcgttcatttgggtccaatcctgaacctaccaaaccaatcaacaccaaagcagctgaagaagagatccatgaccaattaatggaactgatggatttggcgggtcgcattacagagattcgcgaacacaaagcaaagttcacgaatacgatagatcaggcgaacatgttcgccatcagcgaggcagaggacaacacctacatgcatgttattagtcttgatcggcaacttcaaaattggtatcgtcgactaccagagcacttgacctggagtcccgtcaacatcaagaatgctgtcttcagctactttcttcttcatcaacaatatcatgtcacgatgatcctgctgcatcgccaatgggccagatatggatctaataccaccagcggatctagcccagcatctcatcctagtcccgaagaatcaaaacaggctattgacccatatcaccaaaatcattcctcagccggtggcctgctgggcctgggcgatccttcgtcaatcgtggaggatagtcgtacctcattatcgcgaagtatctgtacacaacaagcaatccgtatcgctcgggttttctggcaagccaagcagaagtatgatcttaagaaaatatgctgcacgggtatgcagcatgcaggcaccgcatccattgctctgattgctgctatcgcttatcacaagagcgaggctgaccgtcggaactatatgggatatcttgaggttcttgcggatgccattaaagatatgagccacccataccacccagcggctagaatgagcgacctcgttcaggctgttctcacacagctacgtgttgatgcgaaccaacccctgcacagccgagcaggctcttttacccaaggcgcaactgggtgtaaaaggacactatggggtctagctggagagaagcagatttgtacactatcacaccagcacggagagagaacgcaggccagagtctaccctatggtagcaacaaacgacctcgtgctaccgcaagccgacgcgcttctgacccataacccaaatgcaatgtcggccggtctttttccatctttcgctgagccaccagcagcgccgtttgatcttgattctcttcgttgttccaccattgacgtggatatccaggaagaacaagccgcctatggcagtcgtggcggatcagatagttacctactcgtcgcgccgtcagctgatggatggagcctgcatagcgttcacgcgccagacacccatccacaacatccacgtcctccagcatcccgggattttgacttccagatgtctgaatgggtaactgcaccaactgctcagcccacagcggcagtacatgaacctgaaactggaaatcatgacactgtaatgagccagaatgcaccggcgctcaatccgacattgaatcctaacttagataacaagggcaacaagattgaacaccaacacccggacaatttggagtggatggcaggtgatggtggtctcacagtgcttagtcccactagccttagtggcgtggttccaagtgcagacaaggccggaactaccagcgaagcacatgcctctgggagcacacctcgcaatcatgaacttgacttcttcagtttctag

SEQ ID NO: 20714 - protein, 892 aa, Muscodor strobelii
  misc_feature: SGI Peptide ID NO. 566998
  misc_feature (260)..(357): Pfam Id: PF04082 Pfam Desc: Fungal specific transcription factor domain
  misc_feature (1)..(631): NCBI GI: 261355426 Blast Desc: nitrogen assimilation transcription factor nit-4 [Verticillium albo-atrum VaMs.102]
  misc_feature (1)..(642): NCBI GI: 46108992 Blast Desc: FG01378.1 [Gibberella zeae PH-1]
  misc_feature (1)..(628): NCBI GI: 256730870 Blast Desc: NECHADRAFT_74381 [Nectria haematococca mpVI 77-13-4]
  misc_feature (63)..(628): NCBI GI: 116203829 Blast Desc: CHGG_09798 [Chaetomium globosum CBS 148.51] gi|88175926|gb|EAQ83394.1| CHGG_09798 [Chaetomium globosum CBS 148.51]
  misc_feature (1)..(628): NCBI GI: 189208570 Blast Desc: conserved [Pyrenophora tritici-repentis Pt-1C-BFP] gi|187976711|gb|EDU43337.1| conserved [Pyrenophora tritici-repentis Pt-1C-BFP]
  misc_feature (1)..(630): NCBI GI: 171680016 Blast Desc: protein product [Podospora anserina] gi|170939634|emb|CAP64861.1| protein product [Podospora anserina]
  misc_feature (180)..(628): NCBI GI: 85094139 Blast Desc: NCU06068 [Neurospora crassa OR74A] gi|28921286|gb|EAA30595.1| [Neurospora crassa OR74A]
  misc_feature (151)..(434): NCBI GI: 169613490 Blast Desc: SNOG_09876 [Phaeosphaeria nodorum SN15] gi|160702736|gb|EAT83141.2| SNOG_09876 [Phaeosphaeria nodorum SN15]
  misc_feature (108)..(648): NCBI GI: 255940920 Blast Desc: Pc16g09100 [Penicillium chrysogenum Wisconsin 54-1255] gi|211585852|emb|CAP93580.1| Pc16g09100 [Penicillium chrysogenum Wisconsin 54-1255]
  misc_feature (108)..(620): NCBI GI: 238501120 Blast Desc: conserved [Aspergillus flavus NRRL3357] gi|220692031|gb|EED48378.1| conserved [Aspergillus flavus NRRL3357]
MLEDMLLEKGVVPPAAVHPPKTKQEALTTESGEESRPVTSAAGNLTSLSDQNGSPNSPIRDVPSPPDSHEDYAVHESPMQDFVNVANVPMGTVPREISPFRMLDAKQEDTIHRLFATEGSLTFDQISGRLRFFGPTANSHVYAESPDKYDSREPPEQIRRAERIIRSLTPETHDYLMQSFWEYYNGPLQVIDKEAFETDRDSQNPKFYSSLLHITILAGGWRFTDKDREDMMRLNLGNRESTLHREAKYMLDVELERPGGIPSVQALLILGDLETGVGRDNTGWMYSGMANRLAFDVGLHLDCSNNGLPDQDVRIRQMVMRACILYDKYWALFLGRPTSIKSQDVGMDLLSKRFTSTLRSFGSNPEPTKPINTKAAEEEIHDQLMELMDLAGRITEIREHKAKFTNTIDQANMFAISEAEDNTYMHVISLDRQLQNWYRRLPEHLTWSPVNIKNAVFSYFLLHQQYHVTMILLHRQWARYGSNTTSGSSPASHPSPEESKQAIDPYHQNHSSAGGLLGLGDPSSIVEDSRTSLSRSICTQQAIRIARVFWQAKQKYDLKKICCTGMQHAGTASIALIAAIAYHKSEADRRNYMGYLEVLADAIKDMSHPYHPAARMSDLVQAVLTQLRVDANQPLHSRAGSFTQGATGCKRTLWGLAGEKQICTLSHQHGERTQARVYPMVATNDLVLPQADALLTHNPNAMSAGLFPSFAEPPAAPFDLDSLRCSTIDVDIQEEQAAYGSRGGSDSYLLVAPSADGWSLHSVHAPDTHPQHPRPPASRDFDFQMSEWVTAPTAQPTAAVHEPETGNHDTVMSQNAPALNPTLNPNLDNKGNKIEHQHPDNLEWMAGDGGLTVLSPTSLSGVVPSADKAGTTSEAHASGSTPRNHELDFFSF

SEQ ID NO: 20715 - DNA, 1443 bp, Muscodor strobelii
  misc_feature: SGI cDNA ID NO. 566999
  misc_feature: Encodes the peptide sequence at SEQ ID NO 20716
atgttcgccatcagcgaggcagaggacaacacctacatgcatgttattagtcttgatcggcaacttcaaaattggtatcgtcgactaccagagcacttgacctggagtcccgtcaacatcaagaatgctgtcttcagctactttcttcttcatcaacaatatcatgtcacgatgatcctgctgcatcgccaatgggccagatatggatctaataccaccagcggatctagcccagcatctcatcctagtcccgaagaatcaaaacaggctattgacccatatcaccaaaatcattcctcagccggtggcctgctgggcctgggcgatccttcgtcaatcgtggaggatagtcgtacctcattatcgcgaagtatctgtacacaacaagcaatccgtatcgctcgggttttctggcaagccaagcagaagtatgatcttaagaaaatatgctgcacgggtatgcagcatgcaggcaccgcatccattgctctgattgctgctatcgcttatcacaagagcgaggctgaccgtcggaactatatgggatatcttgaggttcttgcggatgccattaaagatatgagccacccataccacccagcggctagaatgagcgacctcgttcaggctgttctcacacagctacgtgttgatgcgaaccaacccctgcacagccgagcaggctcttttacccaaggcgcaactgggtgtaaaaggacactatggggtctagctggagagaagcagatttgtacactatcacaccagcacggagagagaacgcaggccagagtctaccctatggtagcaacaaacgacctcgtgctaccgcaagccgacgcgcttctgacccataacccaaatgcaatgtcggccggtctttttccatctttcgctgagccaccagcagcgccgtttgatcttgattctcttcgttgttccaccattgacgtggatatccaggaagaacaagccgcctatggcagtcgtggcggatcagatagttacctactcgtcgcgccgtcagctgatggatggagcctgcatagcgttcacgcgccagacacccatccacaacatccacgtcctccagcatcccgggattttgacttccagatgtctgaatgggtaactgcaccaactgctcagcccacagcggcagtacatgaacctgaaactggaaatcatgacactgtaatgagccagaatgcaccggcgctcaatccgacattgaatcctaacttagataacaagggcaacaagattgaacaccaacacccggacaatttggagtggatggcaggtgatggtggtctcacagtgcttagtcccactagccttagtggcgtggttccaagtgcagacaaggccggaactaccagcgaagcacatgcctctgggagcacacctcgcaatcatgaacttgacttcttcagtttctag

SEQ ID NO: 20716 - protein, 480 aa, Muscodor strobelii
  misc_feature: SGI Peptide ID NO. 566999
  misc_feature (5)..(219): NCBI GI: 261355426 Blast Desc: nitrogen assimilation transcription factor nit-4 [Verticillium albo-atrum VaMs.102]
  misc_feature (2)..(230): NCBI GI: 46108992 Blast Desc: FG01378.1 [Gibberella zeae PH-1]
  misc_feature (1)..(216): NCBI GI: 116203829 Blast Desc: CHGG_09798 [Chaetomium globosum CBS 148.51] gi|88175926|gb|EAQ83394.1| CHGG_09798 [Chaetomium globosum CBS 148.51]
  misc_feature (6)..(216): NCBI GI: 256730870 Blast Desc: NECHADRAFT_74381 [Nectria haematococca mpVI 77-13-4]
  misc_feature (7)..(218): NCBI GI: 171680016 Blast Desc: protein product [Podospora anserina] gi|170939634|emb|CAP64861.1| protein product [Podospora anserina]
  misc_feature (1)..(216): NCBI GI: 85094139 Blast Desc: NCU06068 [Neurospora crassa OR74A] gi|28921286|gb|EAA30595.1| [Neurospora crassa OR74A]
  misc_feature (3)..(216): NCBI GI: 189208570 Blast Desc: conserved [Pyrenophora tritici-repentis Pt-1C-BFP] gi|187976711|gb|EDU43337.1| conserved [Pyrenophora tritici-repentis Pt-1C-BFP]
MFAISEAEDNTYMHVISLDRQLQNWYRRLPEHLTWSPVNIKNAVFSYFLLHQQYHVTMILLHRQWARYGSNTTSGSSPASHPSPEESKQAIDPYHQNHSSAGGLLGLGDPSSIVEDSRTSLSRSICTQQAIRIARVFWQAKQKYDLKKICCTGMQHAGTASIALIAAIAYHKSEADRRNYMGYLEVLADAIKDMSHPYHPAARMSDLVQAVLTQLRVDANQPLHSRAGSFTQGATGCKRTLWGLAGEKQICTLSHQHGERTQARVYPMVATNDLVLPQADALLTHNPNAMSAGLFPSFAEPPAAPFDLDSLRCSTIDVDIQEEQAAYGSRGGSDSYLLVAPSADGWSLHSVHAPDTHPQHPRPPASRDFDFQMSEWVTAPTAQPTAAVHEPETGNHDTVMSQNAPALNPTLNPNLDNKGNKIEHQHPDNLEWMAGDGGLTVLSPTSLSGVVPSADKAGTTSEAHASGSTPRNHELDFFSF

SEQ ID NO: 20717 - DNA, 804 bp, Muscodor strobelii
  misc_feature: SGI cDNA ID NO. 567000
  misc_feature: Reduced expression when VOC is produced
  misc_feature: Encodes the peptide sequence at SEQ ID NO 20718
atggcgtcccttctacgaggcacggcattcatcacaggcgctgcatcaggcatagggcaatacactgctctctcattcgcaaaatatggcattacccgccttgccttagccgacataaatggcgaggcgctcaagaaatccgcagcagctctgcgcggccaatatcctggtgtcgaaacggtggaaataacaatggacgtgcgcgacacatcagccgtcaagtctggaattgcggaagctgtgaagggtcttggcggccgtcttgatgtcgccgtgaacaacgcagggattggcggcagtggtaacgagacacacaacgttcccgatgaagagtggttgcgagtgaatgacgttaactttaatggtgtatggaggtgtcaaaaagaagaaattacgcacatgttgaagcaagaagatcgtggcaagcgtgagggacgtggccgcatcatcaatattgccagtatgctcggtatcgtgtcgccggggacgactatgagccacacagcttatactgcctcgaaacacgctgtcgtcggcttgaccaaaggtgatggaaacacatatggttgtcaaggcattaggatcaatgccatgtgtcccggctacgtcgagacgcctctgcttctcgcgtctatggctactaccccgaattcccccttggggttggatattgagcgtacaccactacaacgcatggcaacaatggaagaaattggagacgcaattactttccttgcctcgccattatcaagcttcatgcaaagcggagcattgatcgttgacggtggcttcactgctcagtaa

SEQ ID NO: 20718 - protein, 267 aa, Muscodor strobelii
  misc_feature: SGI Peptide ID NO. 567000
  misc_feature (7)..(189): Pfam Id: PF00106 Pfam Desc: short chain dehydrogenase
  misc_feature (7)..(182): Pfam Id: PF00106 Pfam Desc: short chain dehydrogenase
  misc_feature (5)..(264): NCBI GI: 121714184 Blast Desc: short chain dehydrogenase/reductase family oxidoreductase, [Aspergillus clavatus NRRL 1] gi|119402856|gb|EAW13277.1| short chain dehydrogenase/reductase
  misc_feature (1)..(265): NCBI GI: 255941318 Blast Desc: Pc16g11240 [Penicillium chrysogenum Wisconsin 54-1255] gi|211586051|emb|CAP93794.1| Pc16g11240 [Penicillium chrysogenum Wisconsin 54-1255]
  misc_feature (1)..(264): NCBI GI: 145254371 Blast Desc: An18g01460 [Aspergillus niger] gi|134084186|emb|CAK47219.1| protein product [Aspergillus niger]
  misc_feature (4)..(267): NCBI GI: 145231070 Blast Desc: An01g14000 [Aspergillus niger] gi|134055927|emb|CAK37404.1| protein product [Aspergillus niger]
  misc_feature (1)..(266): NCBI GI: 145249720 Blast Desc: An14g05760 [Aspergillus niger] gi|134081882|emb|CAK42137.1| protein product [Aspergillus niger]
  misc_feature (1)..(265): NCBI GI: 189208574 Blast Desc: oxidoreductase ucpA [Pyrenophora tritici-repentis Pt-1C-BFP] gi|187976713|gb|EDU43339.1| oxidoreductase ucpA [Pyrenophora tritici-repentis Pt-1C-BFP]
  misc_feature (17)..(266): NCBI GI: 67903148 Blast Desc: AN8561.2 [Aspergillus nidulans FGSC A4] gi|40747830|gb|EAA66986.1| AN8561.2 [Aspergillus nidulans FGSC A4] gi|259484516|tpe|CBF80804.1| TPA: oxidoreductase, short-chain
  misc_feature (26)..(265): NCBI GI: 169613496 Blast Desc: SNOG_09879 [Phaeosphaeria nodorum SN15] gi|160702737|gb|EAT83144.2| SNOG_09879 [Phaeosphaeria nodorum SN15]
  misc_feature (1)..(266): NCBI GI: 70996937 Blast Desc: oxidoreductase, short-chain dehydrogenase/reductase family, [Aspergillus fumigatus Af293] gi|66850859|gb|EAL91185.1| oxidoreductase, short-chain dehydrogenase/reductase family,
  misc_feature (1)..(266): NCBI GI: 159127052 Blast Desc: oxidoreductase, short-chain dehydrogenase/reductase family, [Aspergillus fumigatus A1163]
  misc_feature (9)..(266): SWISSPROT Homolog: EC 1.1.1.268 2-(R)-hydroxypropyl-CoM dehydrogenase
  misc_feature: Useful for introducing or modulating the production of volatile compounds
MASLLRGTAFITGAASGIGQYTALSFAKYGITRLALADINGEALKKSAAALRGQYPGVETVEITMDVRDTSAVKSGIAEAVKGLGGRLDVAVNNAGIGGSGNETHNVPDEEWLRVNDVNFNGVWRCQKEEITHMLKQEDRGKREGRGRIINIASMLGIVSPGTTMSHTAYTASKHAVVGLTKGDGNTYGCQGIRINAMCPGYVETPLLLASMATTPNSPLGLDIERTPLQRMATMEEIGDAITFLASPLSSFMQSGALIVDGGFTAQ

SEQ ID NO: 20719 - DNA, 3879 bp, Muscodor strobelii
  misc_feature: SGI EST ID NO. CUFF.48718.1
  misc_feature: Variant of the nucleotide sequence at SEQ ID NO 20717
aaagacaatatatttatcctcatcgaactccactaagatctgcgacaagggaatcatggcagcgcatcacgtactagtgcttggtggaagcggcaaggtcgcgcagctcttaaccccgatgctccttcaacgatcatggaatgtaacgagcatcatccgcaatcccgaccaagtagccgatctccagaagcttggcgagaatcagaacggcaaattgaacgtacttgttcgcagcttggaagatgtcaagagcgacgagcaagccaagggactgatcgatgaggtcaagcccgactacgtcgtatggactgcaggcgccggtggtaaaggtgcacctgaacggaccaacgcgattgatcgtgatgctgcatgtcatttcatccgcgcatcagttgcaactccatcagtcaccaaattcgtcatggtttcgttcatgacatcacgtctgcaaggcgctccttggtggaccgaagaaatgtggcaaaaagcgcgaaacacaatccgcgaaaaactagaacgctactatttagctaaagtcgcagcggatcaggtcctctacgaggaaagcaagaagcgacctaatgatttcgctgctatcaatttgcgcccaggaactttgactacggagcctgtcggtaaggttgctcttggcaagctacctgtgacaagtggttcgtctagtcgtgcatctgttgccaatctagctgcgctgcttctcgccaacccgaaggcgaagagttgctggttggatatggtcgatggcgacgaggaccccgaagcggctgtaaacagatgtgttaacgagggcgttgacactattgaaggcgaaccatactatcactaaactaggattaattggagatggaaggcatttagggagaacgtctacatgtatccaaactttgagaatggaatttgaaaatcccatatgcatataggaaatgctgtgcgattcccatcaacttctacgtctctccaagacaaatgagtctcgtcagcttctactagatgggaaaatctgttcctaatacccagcagagtccactgcaagattgccatgcgatgcagcattgtgcaccgcaatcacatacagtgaattccaactttcttgactagttcaattaatcagatgcagaagttcacagttggaagtgtagttcacggaacgtttgtgatctgaattatggcctgatgtgagacagtatcttctacaacgcgtcgcggatagatgaggttgtcggagaatggaatccgcccaccaactcacctccaattccccacatcatcacttagacctgtacggcaaaccatcgcctcgacacgcgcgaccctgcgctaatactttacaggaaataagcttaagactgagagctagcaagctggtcgcgttagcttggagacctgctgccgtgtgcatgtatccaggccatggagctcggaatgtcaacacggagttgccttgtgcatatccgcttgtccattgccgacttcacttacacgtttctttcaattaaaagtgtaggatgattgatcttcatatctgcccatctgttttcaatcatacgatttcatcataccattgcgtcttatgatttcgaatacctagcgttccactgctaacattccccatatcttataatataaccccggctatcatggcgtcccttctacgaggcacggcattcatcacaggcgctgcatcaggcatagggcaatacactgctctctcattcgcaaaatatggcattacccgccttgccttagccgacataaatggcgaggcgctcaagaaatccgcagcagctctgcgcggccaatatcctggtgtcgaaacggtggaaataacaatggacgtgcgcgacacatcagccgtcaagtctggaattgcggaagctgtgaagggtcttggcggccgtcttgatgtcgccgtgaacaacgcagggattggcggcagtggtaacgagacacacaacgttcccgatgaagagtggttgcgagtgaatgacgttaactttaatggtgtatggaggtgtcaaaaagaagaaattacgcacatgttgaagcaagaagatcgtggcaagcgtgagggacgtggccgcatcatcaatattgccagtatgctcggtatcgtgtcgccggggacgactatgagccacacagcttatactgcctcgaaacacggtagattgaatctgttcacctgatacggaataatatttgaagatgaatactgactgttctgctcttagctgtcgtcggcttgaccaaaggtgatggaaacacatatggttgtcaaggcattaggatcaatgccatgtgtcccggctacgtcgagacgcctctgcttctcgcgtctatggctactaccccgaattcccccttggggttggatattgagcgtacaccactacaacgcatggcaacaatggaagaaattggagacgcaattactttccttgcctcgccattatcaagcttcatgcaaagcggagcattgatcgttgacggtggcttcactgctcagtaatcatattgcacacatgaggcaggcgagttaaactgaatcattcgatacttttggcactctaaggacaaatcgtcagatggcccattcgatgtacataatatacatgggcaacgttatattgcgttgtcagcactcgctgacagaggcccttctgcaccttactaggttgttctccataccatatgagtgatggatagttaccaagctaaaagtagcagctatattcgatgggaagatatccttttcgacaagatcaaagcaagcctgcgccatacaccactctattagcctccccatagacgccgagcttaaaccgtgaaaaaactagaaactgaagaagtcaagttcatgattgcgaggtgtgctcccagaggcatgtgcttcgctggtagttccggccttgtctgcacttggaaccacgccactaaggctagtgggactaagcactgtgagaccaccatcacctgccatccactccaaattgtccgggtgttggtgttcaatcttgttgcccttgttatctaagttaggattcaatgtcggattgagcgccggtgcattctggctcattacagtgtcatgatttccagtttcaggttcatgtactgccgctgtgggctgagcagttggtgcagttacccattcagacatctggaagtcaaaatcccgggatgctggaggacgtggatgttgtggatgggtgtctggcgcgtgaacgctatgcaggctccatccatcagctgacggcgcgacgagtaggtaactatctgatccgccacgactgccataggcggcttgttcttcctggatatccacgtcaatggtggaacaacgaagagaatcaagatcaaacggcgctgctggtggctcagcgaaagatggaaaaagaccggccgacattgcatttgggttatgggctatgttagatatgccttgattttggttcaggaagaatggaggtggacgccttgagtactcagaagcgcgtcggcttgcggtagcacgaggtcgtttgttgctaccatagggtagactctggcctgcgttctctctccgtgctggtgtgatagtgtacaaatctgcttctctccagctagaccccatagtgtccttttacacccagttgcgccttgggtaaaagagcctgctcggctgtgcaggggttggttcgcatcaacacgtagctgtgtgagaacagcctgaacgaggtcgctcattctagccgctgggtggtatgggtggctcatatctttaatggcatccgcaagaacctcaagatatcccatatagttccgacggtcagcctcgctcttgtgataagcgatagcagcaatcagagcaatggatgcggt

SEQ ID NO: 20720 - DNA, 789 bp, Muscodor strobelii
  misc_feature: SGI cDNA ID NO. 567001
  misc_feature: Encodes the peptide sequence at SEQ ID NO 20721
atggcagcgcatcacgtactagtgcttggtggaagcggcaaggtcgcgcagctcttaaccccgatgctccttcaacgatcatggaatgtaacgagcatcatccgcaatcccgaccaagtagccgatctccagaagcttggcgagaatcagaacggcaaattgaacgtacttgttcgcagcttggaagatgtcaagagcgacgagcaagccaagggactgatcgatgaggtcaagcccgactacgtcgtatggactgcaggcgccggtggtaaaggtgcacctgaacggaccaacgcgattgatcgtgatgctgcatgtcatttcatccgcgcatcagttgcaactccatcagtcaccaaattcgtcatggtttcgttcatgacatcacgtctgcaaggcgctccttggtggaccgaagaaatgtggcaaaaagcgcgaaacacaatccgcgaaaaactagaacgctactatttagctaaagtcgcagcggatcaggtcctctacgaggaaagcaagaagcgacctaatgatttcgctgctatcaatttgcgcccaggaactttgactacggagcctgtcggtaaggttgctcttggcaagctacctgtgacaagtggttcgtctagtcgtgcatctgttgccaatctagctgcgctgcttctcgccaacccgaaggcgaagagttgctggttggatatggtcgatggcgacgaggaccccgaagcggctgtaaacagatgtgttaacgagggcgttgacactattgaaggcgaaccatactatcactaa

SEQ ID NO: 20721 - protein, 262 aa, Muscodor strobelii
  misc_feature: SGI Peptide ID NO. 567001
  misc_feature (2)..(261): NCBI GI: 116203825 Blast Desc: CHGG_09796 [Chaetomium globosum CBS 148.51] gi|88175924|gb|EAQ83392.1| CHGG_09796 [Chaetomium globosum CBS 148.51]
  misc_feature (1)..(261): NCBI GI: 256726795 Blast Desc: NECHADRAFT_66155 [Nectria haematococca mpVI 77-13-4]
  misc_feature (8)..(261): NCBI GI: 171680002 Blast Desc: protein product [Podospora anserina] gi|170939627|emb|CAP64854.1| protein product [Podospora anserina]
  misc_feature (1)..(262): NCBI GI: 46136357 Blast Desc: FG09694.1 [Gibberella zeae PH-1]
  misc_feature (3)..(258): NCBI GI: 189206097 Blast Desc: conserved [Pyrenophora tritici-repentis Pt-1C-BFP] gi|187975476|gb|EDU42102.1| conserved [Pyrenophora tritici-repentis Pt-1C-BFP]
  misc_feature (4)..(258): NCBI GI: 256734786 Blast Desc: NECHADRAFT_75398 [Nectria haematococca mpVI 77-13-4]
  misc_feature (5)..(258): NCBI GI: 169783526 Blast Desc: [Aspergillus oryzae RIB40] gi|238493341|ref|XP_002377907.1| conserved [Aspergillus flavus NRRL3357] gi|83774969|dbj|BAE65092.1| protein product oryzae]
  misc_feature (5)..(258): NCBI GI: 121715418 Blast Desc: NAD dependent epimerase/dehydratase family protein [Aspergillus clavatus NRRL 1] gi|119403475|gb|EAW13892.1| NAD dependent epimerase/dehydratase family protein [Aspergillus NRRL
  misc_feature (5)..(260): NCBI GI: 154292536 Blast Desc: BC1G_14906 [Botryotinia fuckeliana B05.10] gi|150846103|gb|EDN21296.1| BC1G_14906 [Botryotinia fuckeliana B05.10]
  misc_feature (5)..(258): NCBI GI: 119480945 Blast Desc: NFIA_085580 [Neosartorya fischeri NRRL 181] gi|119408655|gb|EAW18604.1| conserved [Neosartorya fischeri NRRL 181]
MAAHHVLVLGGSGKVAQLLTPMLLQRSWNVTSIIRNPDQVADLQKLGENQNGKLNVLVRSLEDVKSDEQAKGLIDEVKPDYVVWTAGAGGKGAPERTNAIDRDAACHFIRASVATPSVTKFVMVSFMTSRLQGAPWWTEEMWQKARNTIREKLERYYLAKVAADQVLYEESKKRPNDFAAINLRPGTLTTEPVGKVALGKLPVTSGSSSRASVANLAALLLANPKAKSCWLDMVDGDEDPEAAVNRCVNEGVDTIEGEPYYH

SEQ ID NO: 20722 - DNA, 3879 bp, Muscodor strobelii; identical to SEQ ID NO: 20719
  misc_feature: SGI EST ID NO. CUFF.48718.1
  misc_feature: Variant of the nucleotide sequence at SEQ ID NO 20720

SEQ ID NO: 20723 - DNA, 1071 bp, Muscodor strobelii
  misc_feature: SGI cDNA ID NO. 567002
  misc_feature: Encodes the peptide sequence at SEQ ID NO 20724
atgtccgctccaactcacaataccaaagtgttcatgaacacggtcaaccgccaggtcacggcatgcatgaaagggacagttgaacatgactacaacaccgccaaagtatccgtttctccgaccacacatggccttcaagatattttgggtccatctgacaaagatggccactggtggcgactctacatcaacccgatggactgggagaaagcgctggctaagccagatccgcgcctgctatatgatcaggacaataatgagtattactcacaacgtaaaggatttcatgccgcgatgatcaaagcttacgataaattcttggtgaatggggagttcaatgccaagtttggaactcatgctgggcccctaagcgtagatgaatacctgcagatcttcaccgcctgctcgccagagctcactacaaagcaggccagcgacggcatggtcatgaacctcgagccaatgatatttagagagaccaaaaatgccgaattcggctgtcctaaggaactcgcatcggacgtggaagggatcaaaatcaaagtagacgaacataccatctgctcgctagttaccaaagacagtaccaagaaagctcaagcattctctcactggggccccgcgaacaacccgaaaatcgaaacgaccaaagtgggagaccagctcaaggccggaatcactgcagtgttccgggatttcaaggctgaaattgatgcagctgaacttcgttctgcgcagctccgtgcaattggcaagttagtacgaagtctgcacatgatgcatgctttcaataacggctgcggacgcaccaatattttcacagttctgcctctactcttgctgcgctacggatttggattaccacttggcggagaacatgatgggatgatcgataagaaggccattgacatgatgttcaatggcggctacactgtcgaggaaatcgcaaggttcctgtgggtgtcgcaagatttcggtcttcttcataataaggacggtaaactggctctgaagagttgtctcggagctaaggacacaaagcctgtcgtgaagcctgccgtcgctgcttga

SEQ ID NO: 20724 - protein, 356 aa, Muscodor strobelii
  misc_feature: SGI Peptide ID NO. 567002
  misc_feature (34)..(323): NCBI GI: 159040317 Blast Desc: Sare_4829 [Salinispora arenicola CNS-205] gi|157919152|gb|ABW00580.1| Sare_4829 [Salinispora arenicola CNS-205]
  misc_feature (45)..(285): NCBI GI: 182440152 Blast Desc: SGR_6359 [Streptomyces griseus subsp. griseus NBRC 13350] gi|178468668|dbj|BAG23188.1| [Streptomyces griseus subsp. griseus NBRC 13350]
  misc_feature (45)..(285): NCBI GI: 282873372 Blast Desc: SACT1DRAFT_6369 [Streptomyces sp. ACT-1] gi|282573211|gb|EFB78662.1| SACT1DRAFT_6369 [Streptomyces sp. ACT-1]
  misc_feature (43)..(330): NCBI GI: 256380445 Blast Desc: Amir_6458 [Actinosynnema mirum DSM 43827] gi|255924748|gb|ACU40259.1| Amir_6458 [Actinosynnema mirum DSM 43827]
MSAPTHNTKVFMNTVNRQVTACMKGTVEHDYNTAKVSVSPTTHGLQDILGPSDKDGHWWRLYINPMDWEKALAKPDPRLLYDQDNNEYYSQRKGFHAAMIKAYDKFLVNGEFNAKFGTHAGPLSVDEYLQIFTACSPELTTKQASDGMVMNLEPMIFRETKNAEFGCPKELASDVEGIKIKVDEHTICSLVTKDSTKKAQAFSHWGPANNPKIETTKVGDQLKAGITAVFRDFKAEIDAAELRSAQLRAIGKLVRSLHMMHAFNNGCGRTNIFTVLPLLLLRYGFGLPLGGEHDGMIDKKAIDMMFNGGYTVEEIARFLWVSQDFGLLHNKDGKLALKSCLGAKDTKPVVKPAVAA

SEQ ID NO: 20725 - DNA, 280 bp, Muscodor strobelii
  misc_feature: SGI EST ID NO. CUFF.48637.0
  misc_feature: Variant of the nucleotide sequence at SEQ ID NO 20723
gttcaatcacttttacaacatcttcatacaacgacaataaccacaacctcagtaaactatcctcgacataaataatgtccgctccaactcacaataccaaagtgttcatgaacacggtcaaccgccaggtcacggcatgcatgaaagggacagttgaacatgactacaacaccgccaaagtatccgtttctccgaccacacatggccttcaagatattttgggtccatctgacaaagatggccactggtggcgactctacatcaacccgatggactggga

SEQ ID NO: 20726 - DNA, 1503 bp, Muscodor strobelii
  misc_feature: SGI cDNA ID NO. 567003
  misc_feature: Encodes the peptide sequence at SEQ ID NO 20727
atgccctcttccattccctacgatccgtcgctcgtgctggctaatatcgtcggaaacgaggcgctgaagttggtcgaacagatatccgccctacagggaccagtggatgccgcccaggaacaactcaacacgcttctagcggccaagcgaagcttgcaaatgaccaggactgagctcctcaacctcggcatcaagacgggaaaagtcgacaagtcaatcgagagccttgatgaaaagattgaagaggctgcagccgattatgcagaccacaagatagaggctgaggataaaatccagccgcttcgtgcctccatcagagccgtccatgttgaaatggaaagtcctgtcgactatgtcaaatcacagatcaaatcgatgcctctcgcgtctgactccataaacatggacgtgcagtacttttccaacgacaccaatgaggaggcggcctcgtcacttgccacgaatgtctcttcatatgtgtcggcatcgatgagctggttgggcaaagacgtggcgaaccagatgacccgagcagcagcgagtcaggtcaacgatcaggtgcagaagcacagtatctccggtacattagtcatttccgtctcttgcactcacaagaacgcctctatcctcgcgcctctcgttctcaacgtcgacaaggcgatcaaagtgtggaatcacctcttcaaagacgacaagctcgttcccacgagtaccaagagcatgcaagaagtgatagccaagagcgagtcactctccgaggagaacaagttcagcattatttctggcatgacatacggatctagtttcgtgggaatggtacacatcctcaacagcaacagcacggccgttagtgagaagatgaacaccgtcgtgtcaacacttcaatcgcagatggataatgcggcatggtatgccaaggcatcgggtggctttggtgttaatgagtctatggccaatagtgtcaagagcttactgagctcacagaacatcaactctcatgttaccatgatttgcatgggagctattccctccattgtcgctaacgaagtcaagatcggtgtggacaagttcgcaaatttcgaccccaagaccagtctcgatgctcttgctactatacagaacgcgactgttgccgaccaggatacagttaagcagtcggcggatgcggcacgcacaggtgcccaaatggtatcgatgaaggctggcgaggtgaaggccgccttgaccgccctagcagaaattgacgacggcaacaacaagatcatcgacatcaattctatgatgacagcattggaggactatctcaagaaggcagcagacggcacttccggtgtaccgctgaactattacctaaaagatatcaccaagagcatgttggcggaaatgtgggttgcgaagtactatcctggcaagtatatggccatctcgtacgacgacgaagctcccaagcaggccgccgcaagctcatctgaagctcctagcgcgcccgctctctcttcataa

SEQ ID NO: 20727 - protein, 500 aa, Muscodor strobelii
  misc_feature: SGI Peptide ID NO. 567003
  misc_feature (1)..(479): NCBI GI: 171681373 Blast Desc: protein product [Podospora anserina] gi|170940645|emb|CAP65873.1| protein product [Podospora anserina]
  misc_feature (1)..(479): NCBI GI: 171679155 Blast Desc: protein product [Podospora anserina] gi|170937649|emb|CAP62307.1| protein product [Podospora anserina]
  misc_feature (1)..(469): NCBI GI: 163788467 Blast Desc: FBALC1_08798 [Flavobacteriales bacterium ALC-1] gi|159876787|gb|EDP70845.1| FBALC1_08798 [Flavobacteriales bacterium ALC-1]
  misc_feature (339)..(468): NCBI GI: 256726453 Blast Desc: NECHADRAFT_79680 [Nectria haematococca mpVI 77-13-4]
  misc_feature (317)..(467): NCBI GI: 154308739 Blast Desc: BC1G_07792 [Botryotinia fuckeliana B05.10] gi|150852743|gb|EDN27935.1| BC1G_07792 [Botryotinia fuckeliana B05.10]
MPSSIPYDPSLVLANIVGNEALKLVEQISALQGPVDAAQEQLNTLLAAKRSLQMTRTELLNLGIKTGKVDKSIESLDEKIEEAAADYADHKIEAEDKIQPLRASIRAVHVEMESPVDYVKSQIKSMPLASDSINMDVQYFSNDTNEEAASSLATNVSSYVSASMSWLGKDVANQMTRAAASQVNDQVQKHSISGTLVISVSCTHKNASILAPLVLNVDKAIKVWNHLFKDDKLVPTSTKSMQEVIAKSESLSEENKFSIISGMTYGSSFVGMVHILNSNSTAVSEKMNTVVSTLQSQMDNAAWYAKASGGFGVNESMANSVKSLLSSQNINSHVTMICMGAIPSIVANEVKIGVDKFANFDPKTSLDALATIQNATVADQDTVKQSADAARTGAQMVSMKAGEVKAALTALAEIDDGNNKIIDINSMMTALEDYLKKAADGTSGVPLNYYLKDITKSMLAEMWVAKYYPGKYMAISYDDEAPKQAAASSSEAPSAPALSS

SEQ ID NO: 20728 - DNA, 364 bp, Muscodor strobelii
  misc_feature: SGI EST ID NO. CUFF.48652.0
  misc_feature: Variant of the nucleotide sequence at SEQ ID NO 20726
gtctcgatgctcttgctactatacagaacgcgactgttgccgaccaggatacagttaagcagtcggcggatgcggcacgcacaggtgcccaaatggtatcgatgaaggctggcgaggtgaaggccgccttgaccgccctagcagaaattgacgacggcaacaacaagatcatcgacatcaattctatgatgacagcattggaggactatctcaagaaggcagcagacggcacttccggtgtaccgctgaactattacctaaaagatatcaccaagagcatgttggcggaaatgtgggttgcgaagtactatcctggcaagtatatggccatctcgtacgacgacgaagctcccaagcaggccgc

SEQ ID NO: 20729 - DNA, 372 bp, Muscodor strobelii
  misc_feature: SGI cDNA ID NO. 567004
  misc_feature: Reduced expression when VOC is produced
  misc_feature: Encodes the peptide sequence at SEQ ID NO 20730
atgaagaccacttctgtcattctctctctcgttgccagcgcatacgccggctgctatggcggcgaggtcttcgctgataagaataacgccaaatataacatccagcgggcttgcgagggctatgacggcaattctggagctttccagggtttcttcaatcccggagaggctaagaatgtctgtgttcaatctacggccacccagagactcgacatgacggtccagaacctgaacaatggtcagggcttcgacatcgcggatggagattgcaccacccgcctcgatgacattgtcaattcctgcgaccgtggaggagaaagcagtgtttccggctggtacttcaaggttgatcctaacttgggcacctgctga

SEQ ID NO: 20730 - protein, 123 aa, Muscodor strobelii
  misc_feature: SGI Peptide ID NO. 567004
  misc_feature (1)..(123): NCBI GI: 171693607 Blast Desc: protein product [Podospora anserina] gi|170946752|emb|CAP73556.1| protein product [Podospora anserina]
  misc_feature (16)..(115): NCBI GI: 145609782 Blast Desc: [Magnaporthe grisea 70-15] gi|145017172|gb|EDK01535.1| [Magnaporthe grisea 70-15]
  misc_feature (47)..(123): NCBI GI: 226292240 Blast Desc: PADG_03744 [Paracoccidioides brasiliensis Pb18]
  misc_feature (47)..(123): NCBI GI: 225681061 Blast Desc: [Paracoccidioides brasiliensis Pb03]
  misc_feature (16)..(115): NCBI GI: 149210593 Blast Desc: [Magnaporthe grisea 70-15]
  misc_feature (47)..(123): NCBI GI: 226282594 Blast Desc: PAAG_01081 [Paracoccidioides brasiliensis Pb01]
  misc_feature (5)..(123): NCBI GI: 169618764 Blast Desc: SNOG_12574 [Phaeosphaeria nodorum SN15] gi|111058752|gb|EAT79872.1| SNOG_12574 [Phaeosphaeria nodorum SN15]
  misc_feature: Useful for introducing or modulating the production of volatile compounds
MKTTSVILSLVASAYAGCYGGEVFADKNNAKYNIQRACEGYDGNSGAFQGFFNPGEAKNVCVQSTATQRLDMTVQNLNNGQGFDIADGDCTTRLDDIVNSCDRGGESSVSGWYFKVDPNLGTC

SEQ ID NO: 20731 - DNA, 2063 bp, Muscodor strobelii
  misc_feature: SGI EST ID NO. CUFF.48678.1
  misc_feature: Variant of the nucleotide sequence at SEQ ID NO 20729
cgtcgggcgacaacacgagatttcaacgctgatcagtcgcgaatgcgcaaacctgtatctgccacctcggaaaggcgtagatattattggccaaatttacgaggagcgtcatgccaccgtgagatctgacaagcgtttcatatatatgagaaatttggtacgcttcgcggcgtcgcaagaattgagcgacgacgcgaaaagaagcattaaagaaaagtagcccgtctaatcctcttggcagagttttgtcaagcgaatccgacgattttctgtgcctcacttattgtgcgacagtgagatcatctcacagtcctaaactctaggaccagagccagcccccaccatgcgataatttcggggccaagaggtcaacaaatttctaacttcaggacttgcactgacgatgcatagtacacagcaaaagaagcagtgtgacttgggttgatctcctacatcgagatgatgatgatgaagggcactgcgcccgaggagattttagtataaaagcagatgcggtccccgtccaaagatgtaattctcctgttccattccaacctccagcagcatacaatcttcgatccgagcaaatcacagacttcgtcgacgagcataaccttctgttatcttctcttttttcaaagccaacatgaagaccacttctgtcattctctctctcgttgccagcgcatacgccggctgctatggcggcgaggtcttcgctgataagaataacgccaaatataacatccagcgggcttgcgagggctatgacggcaattctggagctttccagggtttcttcaatcccggagaggctaagaatgtctgtgttcaatctacggccacccagagactcgacatgacggtccagaacctgaacaatggtcagggcttcgacatcgcggatggagattgcaccacccgcctcgatgacattgtcaattcctgcgaccgtggaggagaaagcagtgtttccggctggtacttcaaggttgatcctaacttgggcacctgctgaagagcacgacacgaccaataatgaacaatgcgttctaggtgaaggtttcagagcttaccttaccgccatgagctacttgtaaaggctcgaaacggacttatacatgtgctggacatcgtatgcgttatggagatgtattatagaaaattcggaggcctccgatttgcgatttgttattcatttcttttgcttgcacgatcattatctaccaagctgcctcttactacacactcgttagccaaaacatatctgcagaattaaaagcatattgaacattgcttcaaaattttgttgcgaggtggaatgcctatggattaaacgtcatctcgtgctctagtgttaagtaggtattgaatgtagattgtgagttctgttgcggctgatccgtggctgaaaagcgccaaaaacgccaacttcttcgtaaagtccctcaccacgacaggtcctcatctgaaccaatcgcaccaaacgcaccaaccgagcgttcggtacatccggcacatcggccaagacgatgacgccgccgaactctaaacctattcctggggtacgacttcgttagctctcccaagcattggcgtaaagcttggtctcaacacacgatgccgatgccgggaatgttcttcttagcatggtgagcgagaggccctgtggcaatcggcagttcggcaggttggcaggcacagaacacgatggatttattctaatgcatcagggtctgcgcagccctgcctgctaggttggcgcatgagttgccgtccctctgcgccacagttccttttcagcccccaagacccgctcgtcaatctctactggaacgacatgaatactgtaatcccgtcttgttagtgggtggcatagtgacgcatcgcagacacacaaatggccaggcgggcaggcaagcaggacatgcgccgtcagacccgtccctctgcccgtactctgggcgtcttctggccgcctgagcagctgcaccgaggcattcgaacagttgcgactattcgacacttaagccagccccatgttctagtaatgccaatcggag

SEQ ID NO: 20732 - DNA, 1452 bp, Muscodor strobelii
  misc_feature: SGI cDNA ID NO. 567005
  misc_feature: Reduced expression when VOC is produced
  misc_feature: Encodes the peptide sequence at SEQ ID NO 20733
atgaagcacgccgccgctgccatcgcgacgggctcgctgctcgcctccgttgcctccgcggcctcaggcgttgtaacgtgggacattgctaagagaggtggcaagcttcctacaaagatcagcaagcgcgcaagcagcgacagcaccgtcaccgaaatcatcgacaacaagttccaactgggcggctactttgcaaccgttaccgttggcacgcccccacagaacctaactttgcagttggatactggctccagtgatatttgggtaccctccaccgaggcttgtgatgcgttagaatcgtcgccgcggtcgagtgatcagtgcaacctgggctcatacgagtctagtaattccaagacatacaaactcgtgaacaacgatttcgacattcaatatgttgacggcagttcttcgcgaggtgattacattgccgagaccttcgccatcggtgatgtctcgttgccaaatgtgacgatgggtttggccgacacgactgacattccctacggtctcgtcggtgttggctacaagaccaacgaagcatcgcgccagatatacgacaacttgcccgttgtcatgttcaacgaaggcaagatcaacacgatcgcctacagcttgtggctaaacgatctggactccagcaccggatcgatcatgtttggtggtattgacactgacaaatatacgggcgatctgatccgtgtcgacgtgcagcccgacgagcgccttcaaaccagcacaatcacgtcgttcattgtgcaattgtctgggctcacagcacattcgtcttcgggcgatgacagcctcgggggtactttccccgtctcggttgtgctcgattccggcacgaccctgtcctacctccctaacgaattggctagtgacatctataacgaagttggcgcagtcttttatcagggcgctcctctggttccctgctccctggctaataaggagggctacttcgcatttgaattcggtggtaaagatggtcccgtcattcaggttggccttgacgagctggtcttggatgccggcctaggcccattccaaagtggacagtacaacggacaggaggcgtgtgaattcggtatcttcaacacgactgaagccccgtacctgctcggagacacattcctccgctcagcttacgtggtgtacgatctggagaacaacgaggttgctttggccaacactgacttcaacgccacgtcctcaaacatcatggcattcagcagccagggagccaccatcccctcgtcaactgccgctcctaaccagaacgacgttgcctcgaccggtagcaactcggataatgccggctccggcttccaggatggcggcgactcggctgccatgtctttgccggccatgacatggacgcagatggtgacgatcggtgcgacgatgagcttcatgatggtcggtggagcgttctcgattctgttctaa

SEQ ID NO: 20733 - protein, 483 aa, Muscodor strobelii
  misc_feature: SGI Peptide ID NO. 567005
  misc_feature (62)..(399): Pfam Id: PF00026 Pfam Desc: Eukaryotic aspartyl protease
  misc_feature (7)..(483): NCBI GI: 116181454 Blast Desc: CHGG_01355 [Chaetomium globosum CBS 148.51] gi|88185652|gb|EAQ93120.1| CHGG_01355 [Chaetomium globosum CBS 148.51]
  misc_feature (1)..(482): NCBI GI: 171695874 Blast Desc: protein product [Podospora anserina] gi|170948179|emb|CAP60343.1| protein product [Podospora anserina]
  misc_feature (12)..(482): NCBI GI: 85117939 Blast Desc: NCU02956 [Neurospora crassa OR74A] gi|28927151|gb|EAA36107.1| conserved [Neurospora crassa OR74A] gi|38566948|emb|CAE76250.1| related to acid proteinase PEPI
  misc_feature (12)..(477): NCBI GI: 46109016 Blast Desc: FG01390.1 [Gibberella zeae PH-1]
  misc_feature (13)..(481): NCBI GI: 256730864 Blast Desc: NECHADRAFT_98619 [Nectria haematococca mpVI 77-13-4]
  misc_feature (39)..(441): NCBI GI: 154312485 Blast Desc: BC1G_05845 [Botryotinia fuckeliana B05.10] gi|114149216|gb|AAR87746.3| aspartic proteinase precursor [Botryotinia fuckeliana] gi|150849946|gb|EDN25139.1| BC1G_05845
  misc_feature (29)..(441): NCBI GI: 156035531 Blast Desc: SS1G_12969 [Sclerotinia sclerotiorum 1980] gi|154698374|gb|EDN98112.1| SS1G_12969 [Sclerotinia sclerotiorum 1980]
  misc_feature (17)..(419): NCBI GI: 261355354 Blast Desc: candidapepsin-3 [Verticillium albo-atrum VaMs.102]
  misc_feature (49)..(474): NCBI GI: 156065227 Blast Desc: SS1G_00624 [Sclerotinia sclerotiorum 1980] gi|154691483|gb|EDN91221.1| SS1G_00624 [Sclerotinia sclerotiorum 1980]
  misc_feature (24)..(474): NCBI GI: 154311375 Blast Desc: BC1G_06540 [Botryotinia fuckeliana B05.10] gi|114149215|gb|AAR87747.3| aspartic proteinase precursor [Botryotinia fuckeliana] gi|150850937|gb|EDN26130.1| BC1G_06540
  misc_feature (63)..(406): SWISSPROT Homolog: EC 3.4.23.24 Candidapepsin
  misc_feature: Useful for introducing or modulating the production of volatile compounds
MKHAAAAIATGSLLASVASAASGVVTWDIAKRGGKLPTKISKRASSDSTVTEIIDNKFQLGGYFATVTVGTPPQNLTLQLDTGSSDIWVPSTEACDALESSPRSSDQCNLGSYESSNSKTYKLVNNDFDIQYVDGSSSRGDYIAETFAIGDVSLPNVTMGLADTTDIPYGLVGVGYKTNEASRQIYDNLPVVMFNEGKINTIAYSLWLNDLDSSTGSIMFGGIDTDKYTGDLIRVDVQPDERLQTSTITSFIVQLSGLTAHSSSGDDSLGGTFPVSVVLDSGTTLSYLPNELASDIYNEVGAVFYQGAPLVPCSLANKEGYFAFEFGGKDGPVIQVGLDELVLDAGLGPFQSGQYNGQEACEFGIFNTTEAPYLLGDTFLRSAYVVYDLENNEVALANTDFNATSSNIMAFSSQGATIPSSTAAPNQNDVASTGSNSDNAGSGFQDGGDSAAMSLPAMTWTQMVTIGATMSFMMVGGAFSILF

SEQ ID NO: 20734 - DNA, 2092 bp, Muscodor strobelii
  misc_feature: SGI EST ID NO. CUFF.48687.0
  misc_feature: Variant of the nucleotide sequence at SEQ ID NO 20732
attttttaccacgcccgcagcttggcacaccgggtctttcctacccattgagtctaagcctcctttgcctcaagaagacgtttcatcatatacaatccctcaaacgtctcacctttcttgtttccatttgtacttgatctttcttcatattacttcttgctgactttcgctctttctgtgaagccttggtttttggtctcctttccatcagaaagtctgagtgtcgtcgttgctgcttctgaccatcgtctttgcgtacttccttttccattacgcatacccctgtcgagccgcaactatcccttttcctggtcggctgccgaacattcctgcctgaaaatatactccatctagccgaatttatcaatcgaattgctgcatttcgatcgtttgcttcttagataataccacatttgtgtgcgaaaatgaagcacgccgccgctgccatcgcgacgggctcgctgctcgcctccgttgcctccgcggcctcaggcgttgtaacgtgggacattgctaagagaggtggcaagcttcctacaaagatcagcaagcgcgcaagcagcgacagcaccgtcaccgaaatcatcgacaacaagttccaactgggcggctactttgcaaccgttaccgttggcacgcccccacagaacctaactttgcagttggatactggctccagtgatatttgggtaccctccaccgaggcttgtgatgcgttagaatcgtcgccgcggtcgagtgatcagtgcaacctgggctcatacgagtctagtaattccaagacatacaaactcgtgaacaacgatttcgacattcaatatgttgacggcagttcttcgcgaggtgattacattgccgagaccttcgccatcggtgatgtctcgttgccaaatgtgacgatgggtttggccgacacgactgacattccctacggtctcgtcggtgttggctacaagaccaacgaagcatcgcgccagatatacgacaacttgcccgttgtcatgttcaacgaaggcaagatcaacacgatcgcctacagcttgtggctaaacgatctggactccagcaccggatcgatcatgtttggtggtattgacactgacaaatatacgggcgatctgatccgtgtcgacgtgcagcccgacgagcgccttcaaaccagcacaatcacgtcgttcattgtgcaattgtctgggctcacagcacattcgtcttcgggcgatgacagcctcgggggtactttccccgtctcggttgtgctcgattccggcacgaccctgtcctacctccctaacgaattggctagtgacatctataacgaagttggcgcagtcttttatcagggcgctcctctggttccctgctccctggctaataaggagggctacttcgcatttgaattcggtggtaaagatggtcccgtcattcaggttggccttgacgagctggtcttggatgccggcctaggcccattccaaagtggacagtacaacggacaggaggcgtgtgaattcggtatcttcaacacgactgaagccccgtacctgctcggagacacattcctccgctcagcttacgtggtgtacgatctggagaacaacgaggttgctttggccaacactgacttcaacgccacgtcctcaaacatcatggcattcagcagccagggagccaccatcccctcgtcaactgccgctcctaaccagaacgacgttgcctcgaccggtagcaactcggataatgccggctccggcttccaggatggcggcgactcggctgccatgtctttgccggccatgacatggacgcagatggtgacgatcggtgcgacgatgagcttcatgatggtcggtggagcgttctcgattctgttctaattcggagaaaataggtgtacagaagaagaatgatatcatatacctgcttttggattggagtttttggtataggcgcacggctcatgttcataaactaggcttcgaatattcatttagcggactggagatacgctgcaagcatctcggtacataagtaaaccgaatataaagaatgagtaaaagactattacataataccatgcaatagatggaca

SEQ ID NO: 20735 - DNA, 2406 bp, Muscodor strobelii
  misc_feature: SGI cDNA ID NO. 567006
  misc_feature: Reduced expression when VOC is produced
  misc_feature: Encodes the peptide sequence at SEQ ID NO 20736
atgagggtacagcgggctgttgcgctgcttaatgacagccgcatcgtcgctgcgagatgcagcgcaccacagatcaacgtcgcctcgaggacgttagccagccgtgcgccttcacgtttcatggtcgccccgctgcgtgtagagggaaggagatacttcagcttgacgagaccgagatttgctgcagctagcagtgctgctgccagtgcagccatcaagaaggccgccgaagaggctgctaatctcacccccgaagccgtctttgccaacatgagccctgaagagaagcatcggttatcgagagtacgaaacatcggcatagctgcacacatcgactcaggaaagaccacggtcaccgaacgagtcctcttctacaccggccggatcaaggccatacacgaagtccgcggtcgcgatggacagggcgccaagatggactcgatggatctcgagcgtgagaagggcatcaccatccagtctgccgccaccttttgcgactggaagaagaccgaggacggcgaggagcagacataccacatgaacttgatcgatacccctggccacatagactttaccatcgaggtcgagcgtgccctgcgcgtcttggacggcgccgtcatgattctctgcgccgtcagcggtgtccagtcccagactgttactgtcgaccgacagatgaagcgctacaacatcccccgtatcagcttcgtcaataagatggaccgcatgggcgccaatccctggaaggccgtcgagcagatcaactccaagcttaagatccccgccgccgccatccaggtccccatcggctctgaggacgagttcaagggtgtcgtcgaccttatcgacatgaaggcgatttacagcgagggtcccaagggaactatcgtccgcgtcgagaacaccatccctgaagaagtcagacagcttgccgaagagaagcgacaggtcctaatagagaaattggctgatgtcgatgacgagattggcgagatcttcttaatggaggagacgccaacgccagagcagatcaaggcggctatccgaagagccaccatcgccctcaaattctcacccgtcatgatgggatcagccttggctgacaaatccattcaacccatgctggacgctgtgtgcgactatctgccgaatcccgccgatgtcgagaacttggctcttgacaagagtcagagcgaggccaagaccaagttggtcccttataactcgctcccctttgtcggtctggctttcaagctcgaggagaacaactatggtcagctcacctatatccgagtataccagggtagcctgaaaaagggcacatatcttttcaactctcgaaacgacaaaaaagtccgtattccgcgtatcgtgcgcatgcactcgaatgaaatggaagacgttagcgaggtcggtgccggagagatctgcgccgtgttcggtgtcgactgttcatccggtgataccttcacagacggcaatttaccctacaccatgtcttccatgttcgtccccgatgccgtcatgtcgctctccattaagccgaagcgcagcacggacgccgataacttcagtaaggccatgaaccgcttccaacgtgaggatcctaccttcagattatttgtcgacgaggagagtgaagagacgattatctccggtatgggtgaactgcatctcgagatttacgttgagcgtctgcgccgagagtacaaggtcgagtgtatcactggtcaacctcgcgttgcctatcgtgagacaatcgggcagcgcgctgacttcgactacctcctcaagaagcagtctggtggtcctggtgattatgcccgtgtcggaggttggatcgagccaagcgagagtcccgaacagaataccttcgagaaccaagtcgtcggtggagtcattcccgacaagttcatttctgcatgtggcaagggtttcgaaatagcctgtgaaaagggtcctctgctaggccacaaggtcatcggtaccaagatggtcgtaaacgacggcgcaacccacgtaacggattcttccgattacgccttcagtcttgcagcgcagatggcgttcaagaaagtcttccacgaagccggtggtcaggtcctcgagcctctaatgaagactacgatcatggcgcccaatgagttccagggtaatatcctcatgttgatgaataagcgtaatgctacgatcatcgatacggagattggcgctgaggactttacgttactttgtgatgttagtctgaactcgatgtttgggttttcgtcgcagattagggccgccacgcagggcaagggagagtttagtatggagtttagtcattatgcgcctgcgccgccgcatttgcagaaggaattggtcgccaagcaccagaaggagatcgaggctgcgagaaagcattga

SEQ ID NO: 20736 - protein, 801 aa, Muscodor strobelii
  misc_feature: SGI Peptide ID NO. 567006
  misc_feature (425)..(491): Pfam Id: PF03144 Pfam Desc: Elongation factor Tu domain 2
  misc_feature (700)..(787): Pfam Id: PF00679 Pfam Desc: Elongation factor G C-terminus
  misc_feature (579)..(698): Pfam Id: PF03764 Pfam Desc: Elongation factor G, domain IV
  misc_feature (100)..(384): Pfam Id: PF00009 Pfam Desc: Elongation factor Tu GTP binding domain
  misc_feature (1)..(799): NCBI GI: 46109018 Blast Desc: FG01391.1 [Gibberella zeae PH-1]
  misc_feature (1)..(799): NCBI GI: 261355353 Blast Desc: elongation factor G 1 [Verticillium albo-atrum VaMs.102]
  misc_feature (1)..(799): NCBI GI: 164427601 Blast Desc: elongation factor G 1, mitochondrial precursor [Neurospora crassa OR74A] gi|261263181|sp|Q7SH14.2|EFGM_NEUCR RecName: Full=Elongation factor G, mitochondrial; Short=EF-Gmt; G
  misc_feature (1)..(799): NCBI GI: 116181452 Blast Desc: CHGG_01354 [Chaetomium globosum CBS 148.51] gi|121932799|sp|Q2HEK0.1|EFGM_CHAGB RecName: Full=Elongation factor G, mitochondrial; Short=EF-Gmt; AltName: Full=Elongation G
  misc_feature (71)..(799): NCBI GI: 145613524 Blast Desc: MGG_01565 [Magnaporthe grisea 70-15] gi|145020591|gb|EDK04720.1| MGG_01565 [Magnaporthe grisea 70-15]
  misc_feature (1)..(799): NCBI GI: 171695854 Blast Desc: protein product [Podospora anserina] gi|170948169|emb|CAP60333.1| protein product [Podospora anserina]
  misc_feature (1)..(794): NCBI GI: 189202074 Blast Desc: elongation factor G 2 [Pyrenophora tritici-repentis Pt-1C-BFP] gi|261263157|sp|B2WBM8.1|EFGM_PYRTR RecName: Full=Elongation factor G, mitochondrial; Short=EF-Gmt; AltName: G
  misc_feature (2)..(793): NCBI GI: 154322290 Blast Desc: BC1G_01292 [Botryotinia fuckeliana B05.10] gi|261263140|sp|A6RLH0.1|EFGM_BOTFB RecName: Full=Elongation factor G, mitochondrial; Short=EF-Gmt; AltName: Full=Elongation G
  misc_feature (7)..(793): NCBI GI: 242808371 Blast Desc: translation elongation factor G1, [Talaromyces stipitatus ATCC 10500] gi|261263160|sp|B8MJJ5.1|EFGM_TALSN RecName: Full=Elongation factor G, mitochondrial; Short=EF-Gmt; G
  misc_feature (65)..(793): NCBI GI: 156046769 Blast Desc: SS1G_09468 [Sclerotinia sclerotiorum 1980] gi|261263159|sp|A7EVV9.1|EFGM_SCLS1 RecName: Full=Elongation factor G, mitochondrial; Short=EF-Gmt; AltName: Full=Elongation G
  misc_feature: Useful for introducing or modulating the production of volatile compounds
MRVQRAVALLNDSRIVAARCSAPQINVASRTLASRAPSRFMVAPLRVEGRRYFSLTRPRFAAASSAAASAAIKKAAEEAANLTPEAVFANMSPEEKHRLSRVRNIGIAAHIDSGKTTVTERVLFYTGRIKAIHEVRGRDGQGAKMDSMDLEREKGITIQSAATFCDWKKTEDGEEQTYHMNLIDTPGHIDFTIEVERALRVLDGAVMILCAVSGVQSQTVTVDRQMKRYNIPRISFVNKMDRMGANPWKAVEQINSKLKIPAAAIQVPIGSEDEFKGVVDLIDMKAIYSEGPKGTIVRVENTIPEEVRQLAEEKRQVLIEKLADVDDEIGEIFLMEETPTPEQIKAAIRRATIALKFSPVMMGSALADKSIQPMLDAVCDYLPNPADVENLALDKSQSEAKTKLVPYNSLPFVGLAFKLEENNYGQLTYIRVYQGSLKKGTYLFNSRNDKKVRIPRIVRMHSNEMEDVSEVGAGEICAVFGVDCSSGDTFTDGNLPYTMSSMFVPDAVMSLSIKPKRSTDADNFSKAMNRFQREDPTFRLFVDEESEETIISGMGELHLEIYVERLRREYKVECITGQPRVAYRETIGQRADFDYLLKKQSGGPGDYARVGGWIEPSESPEQNTFENQVVGGVIPDKFISACGKGFEIACEKGPLLGHKVIGTKMVVNDGATHVTDSSDYAFSLAAQMAFKKVFHEAGGQVLEPLMKTTIMAPNEFQGNILMLMNKRNATIIDTEIGAEDFTLLCDVSLNSMFGFSSQIRAATQGKGEFSMEFSHYAPAPPHLQKELVAKHQKEIEAARKH

SEQ ID NO: 20737 - DNA, 3811 bp, Muscodor strobelii
  misc_feature: SGI EST ID NO. CUFF.48817.1
  misc_feature: Variant of the nucleotide sequence at SEQ ID NO 20735
gctccattgagaacctaattccctcttttcgttgttcttttccattgtaattatttgtgtggtttctgatatttgattcttcactatgagggtacagcgggctgttgcgctgcttaatgacagccgcatcgtcgctgcgagatgcagcgcaccacagatcaacgtcgcctcgaggacgttagccagccgtgcgccttcacgtttcatggtcgccccgctgcgtgtagagggaaggagatacttcagcttgacgagaccgagatttgctgcagctagcagtgctgctgccagtgcagccatcaagaaggccgccgaagaggctgctaatctcacccccgaagccgtctttgccaacatgagccctgaagagaagcatcggttatcgagagtacgaaacatcggcatagctgtacgtctcgccctcctaaatacgcccattcacctgcctcgacaatcccacaacatatgaagaaatcatccggctaagtagagtcaacaggcacacatcgactcaggaaagaccacggtcaccgaacgagtcctcttctacaccggccggatcaaggccatacacgaagtccgcggtcgcgatggacagggcgccaagatggactcgatggatctcgagcgtgagaagggcatcaccatccagtctgccgccaccttttgcgactggaagaagaccgaggacggcgaggagcagacataccacatgaacttgatcgatacccctggccacatagactttaccatcgaggtcgagcgtgccctgcgcgtcttggacggcgccgtcatgattctctgcgccgtcagcggtgtccagtcccagactgttactgtcgaccgacagatgaagcgctacaacatcccccgtatcagcttcgtcaataagatggaccgcatgggcgccaatccctggaaggccgtcgagcagatcaactccaagcttaagatccccgccgccgccatccaggtccccatcggctctgaggacgagttcaagggtgtcgtcgaccttatcgacatgaaggcgatttacagcgagggtcccaagggaactatcgtccgcgtcgagaacaccatccctgaagaagtcagacagcttgccgaagagaagcgacaggtcctaatagagaaattggctgatgtcgatgacgagattggcgagatcttcttaatggaggagacgccaacgccagagcagatcaaggcggctatccgaagagccaccatcgccctcaaattctcacccgtcatgatgggatcagccttggctgacaaatccattcaacccatgctggacgctgtgtgcgactatctgccgaatcccgccgatgtcgagaacttggctcttgacaagagtcagagcgaggccaagaccaagttggtcccttataactcgctcccctttgtcggtctggctttcaagctcgaggagaacaactatggtcagctcacctatatccgagtataccagggtagcctgaaaaagggcacatatcttttcaactctcgaaacgacaaaaaagtccgtattccgcgtatcgtgcgcatgcactcgaatgaaatggaagacgttagcgaggtcggtgccggagagatctgcgccgtgttcggtgtcgactgttcatccggtgataccttcacagacggcaatttaccctacaccatgtcttccatgttcgtccccgatgccgtcatgtcgctctccattaagccgaagcgcagcacggacgccgataacttcagtaaggccatgaaccgcttccaacgtgaggatcctaccttcagattatttgtcgacgaggagagtgaagagacgattatctccggtatgggtgaactgcatctcgagatttacgttgagcgtctgcgccgagagtacaaggtcgagtgtatcactggtcaacctcgcgttgcctatcgtgagacaatcgggcagcgcgctgacttcgactacctcctcaagaagcagtctggtggtcctggtgattatgcccgtgtcggaggttggatcgagccaagcgagagtcccgaacagaataccttcgagaaccaagtcgtcggtggagtcattcccgacaagttcatttctgcatgtggcaagggtttcgaaatagcctgtgaaaagggtcctctgctaggccacaaggtcatcggtaccaagatggtcgtaaacgacggcgcaacccacgtaacggattcttccgattacgccttcagtcttgcagcgcagatggcgttcaagaaagtcttccacgaagccggtggtcaggtcctcgagcctctaatgaagactacgatcatggcgcccaatgagttccagggtaatatcctcatgttgatgaataagcgtaatgctacgatcatcgatacggagattggcgctgaggactttacgttactttgtgatgttagtctgaactcgatgtttgggttttcgtcgcagattagggccgccacgcagggcaagggagagtttagtatggagtttagtcattatgcgcctgcgccgccgcatttgcagaaggaattggtcgccaagcaccagaaggagatcgaggctgcgagaaagcattgagcggcttgatcgagtattcaagtgctgtattgtacttggttgagtgtcctacgatacgtatcacgggatactgcattttctctgagcccaatggggcgaatgagtagtatattacttgtaccaatactgtcttgtcatcagagctctttatacagaagagatacggtagagacaagatgagatgagatcaaagcagtagagtatgccgagagcatgtgtatagatctacggacttagatttcttgtataaaagataagatgggtgggtggtcatagaaagtaagataaagttagcttgagagatatatacctagctgagacattgagtagttgaagtacgtctaagctttgtaggaaagaatgagaaaggatatgcaatgggtatgcatagacctgtaggaaatgcgaagaacagtcaccacttctttgcctttgtcatttattatgtaagaactggcattgtgcgctaggcatgatatgtgggcgtctatatctaagtggtgaggttgttataagtcaatagggacgttttgtttataggcaatactgtcacagccaccctaggtcatgcgtattttacttctgaagtcgattcggaagagggcgggatgtctatccgaaagagtcaaatagcggttggtggctgagagagaaatgtggaaagagaagtcggatgggcagccagcgtgagactagatggtggttgtgagccggtggcaggtgggtggaatgagcgtcggtaagatggtcaagaacggacacccaatagatgtcatcgatctgtacgccgctcagatgtaaccccatgcagatatttcggcggatgttcgtcgactgctcgtcctgatatagcaacgagttcagcatgattgctgagcgaggcttccggagattcacttgaacggcagaccaatgctcggccttgtggtacaccggaaagtatatcttacggcactgttacgcgtcgcgggtacgagaggaagtaaaatgtctttggatggtgtatgtagtgataaaaccaagtgacagacgaggaagcgataggagggtagacgacaggataactggagctggcggagaagttaacccagtcgatggagtagtagggtcagtggtacgtgttgaaattgttggggcctcatgtgtaggcgaggtaatcgagacaacttttgtggtcactgccttgtcactggtgctagcactgctatcaatttccttctggggtttcgt

SEQ ID NO: 20738 - DNA, 1638 bp, Muscodor strobelii
  misc_feature: SGI cDNA ID NO. 567007
  misc_feature: Encodes the peptide sequence at SEQ ID NO 20739
caattactgcaggcgtatcgcaatccagtgttcgattcacccccgagccacactcgaaagacagacactccgggatcgggttcatccggcggtacaactccaaatcggcgcaaatggtatgatcaggaaaaggagaataggtcacaagaaacgctcgcaagactagtaggagcatcggcgaagttggcaaatccgaatgccaagcagtccacgtcacctgaagcgttcgaaatgcggaaacgccctggccacaagcggactaccagcggcaaaattatgtcgatgcttacaccccgtgacaacgaggtgaaaattacgattcatgtcgccgatatcctaaaacgccaaaattatatcatcaagatgtgtagagctttgatgctgtttggcgctccgactcaccgtctcgaggaataccttgctacgacggcgaaggttttggagattgacagtcaatttctctacattccaggttgtatggtcatctctttcgacgatgtcctcacccataccaccgaagtaaggattgtccgtacagcccaaggtgtgaacttgggcaagttgaaagatgtacacgagatttataaagaagtcttgcatgacattatcggtctcgacgatgcactatttcgattagatcaagttatcagcaagaaggagctctatccgacctggctcaccgtcgcaatgtacggctttgcaagtgctgccgtctcgatcttcttcaaagcccgtcttattgatatgcccattgtcttcgcaatgggtacgctcctcggatttcttcaactcgttgtcgcacctaggtccaaaacgtacgccactgtttttgaagttagcgcagccattctgttcagcttcctctcgcgcgctttggctagcatcaatgatgggaaactgttctgtttctcggcacttactcagggatcgatagctatgattctaccggggtttcttgttctttccagtgcccttgagttacagtctaaggctattgtacccggatccatcagattggtctatgcgattatttactcggcatttttagcttatggcatcactgtcggtaccgcattgtatggtgccattgacgcaaacgccgtcaaagacacaacatgtcataacccccttaactcctattaccagtttctttttgtccctctatatctctttttcgtttctttcactgtacaggccaaatggaagcagatgccagcgatgattctcgtcgcgctagccggatacacagtcaatttctttaccagccagaaatttgctgctgacggcgcaattgcatacacattcggagctttcacggttggcgtcctagcaaatctgtacagtcgaatcagacatggtgtcgcagcagcagtcttgcttccggctgtctacgtccaagtgccaggttctcttgccagctcaggagctattacctccggtttgaaagtggcagctcagctcaccaaccaaaacggaacatcgagttcaaattcgtcaaattcggaattgaatacagttgtttttgaagtggctgctagcatgattcagatatccattggaatcactgttggcttgcttatgtctgctttgatcatctatccatttggcaaaaagcgtagcggcttatggactctgtaa

SEQ ID NO: 20739 - protein, 545 aa, Muscodor strobelii
  misc_feature: SGI Peptide ID NO. 567007
  misc_feature (122)..(317): Pfam Id: PF06738 Pfam Desc: Domain of function (DUF1212)
  misc_feature (1)..(545): NCBI GI: 169620974 Blast Desc: SNOG_13690 [Phaeosphaeria nodorum SN15] gi|111058017|gb|EAT79137.1| SNOG_13690 [Phaeosphaeria nodorum SN15]
  misc_feature (1)..(545): NCBI GI: 189194135 Blast Desc: conserved [Pyrenophora tritici-repentis Pt-1C-BFP] gi|187978970|gb|EDU45596.1| conserved [Pyrenophora tritici-repentis Pt-1C-BFP]
  misc_feature (27)..(545): NCBI GI: 156066067 Blast Desc: SS1G_01045 [Sclerotinia sclerotiorum 1980] gi|154691903|gb|EDN91641.1| SS1G_01045 [Sclerotinia sclerotiorum 1980]
  misc_feature (2)..(545): NCBI GI: 154294230 Blast Desc: BC1G_13801 [Botryotinia fuckeliana B05.10] gi|150844811|gb|EDN20004.1| BC1G_13801 [Botryotinia fuckeliana B05.10]
  misc_feature (116)..(545): NCBI GI: 261357886 Blast Desc: pheromone-regulated membrane protein [Verticillium albo-atrum VaMs.102]
  misc_feature (17)..(545): NCBI GI: 115391421 Blast Desc: conserved [Aspergillus terreus NIH2624] gi|114194139|gb|EAU35839.1| conserved [Aspergillus terreus NIH2624]
  misc_feature (10)..(545): NCBI GI: 145242321 Blast Desc: An09g04780 [Aspergillus niger] gi|134078339|emb|CAK40332.1| protein product [Aspergillus niger]
  misc_feature (17)..(545): NCBI GI: 121706174 Blast Desc: DUF1212 domain membrane protein Prm10, [Aspergillus clavatus NRRL 1] gi|119399496|gb|EAW09924.1| DUF1212 domain membrane protein Prm10, [Aspergillus clavatus NRRL 1]
  misc_feature (17)..(545): NCBI GI: 70999017 Blast Desc: DUF1212 domain membrane protein Prm10 [Aspergillus fumigatus Af293] gi|66851867|gb|EAL92192.1| DUF1212 domain membrane protein Prm10, [Aspergillus fumigatus Af293] DUF1212
  misc_feature (17)..(545): NCBI GI: 119490693 Blast Desc: NFIA_063330 [Neosartorya fischeri NRRL 181] gi|119411229|gb|EAW21172.1| conserved [Neosartorya fischeri NRRL 181]
QLLQAYRNPVFDSPPSHTRKTDTPGSGSSGGTTPNRRKWYDQEKENRSQETLARLVGASAKLANPNAKQSTSPEAFEMRKRPGHKRTTSGKIMSMLTPRDNEVKITIHVADILKRQNYIIKMCRALMLFGAPTHRLEEYLATTAKVLEIDSQFLYIPGCMVISFDDVLTHTTEVRIVRTAQGVNLGKLKDVHEIYKEVLHDIIGLDDALFRLDQVISKKELYPTWLTVAMYGFASAAVSIFFKARLIDMPIVFAMGTLLGFLQLVVAPRSKTYATVFEVSAAILFSFLSRALASINDGKLFCFSALTQGSIAMILPGFLVLSSALELQSKAIVPGSIRLVYAIIYSAFLAYGITVGTALYGAIDANAVKDTTCHNPLNSYYQFLFVPLYLFFVSFTVQAKWKQMPAMILVALAGYTVNFFTSQKFAADGAIAYTFGAFTVGVLANLYSRIRHGVAAAVLLPAVYVQVPGSLASSGAITSGLKVAAQLTNQNGTSSSNSSNSELNTVVFEVAASMIQISIGITVGLLMSALIIYPFGKKRSGLWTL

SEQ ID NO: 20740 - DNA, 2360 bp, Muscodor strobelii
  misc_feature: SGI EST ID NO. CUFF.49049.0
  misc_feature: Variant of the nucleotide sequence at SEQ ID NO 20738
gttctgtttctcggcacttactcagggatcgatagctatgattctaccggggtttcttgttctttccagtgcccttgagttacagtctaaggctattgtacccggatccatcagattggtctatgcgattatttactcggcatttttagcttatggcatcactgtcggtaccgcattgtatggtgccattgacgcaaacgccgtcaaagacacaacatgtcataacccccttaactcctattaccagtttctttttgtccctctatatctctttttcgtttctttcactgtacaggccaaatggaagcagatgccagcgatgattctcgtcgcgctagccggatacacagtcaatttctttaccagccagaaatttgctgctgacggcgcaattgcatacacattcggagctttcacggttggcgtcctagcaaatctgtacagtcgaatcagacatggtgtcgcagcagcagtcttgcttccggctgtctacgtccaagtgccaggttctcttgccagctcaggagctattacctccggtttgaaagtggcagctcagctcaccaaccaaaacggaacatcgagttcaaattcgtcaaattcggaattgaatacagttgtttttgaagtggctgctagcatgattcagatatccattggaatcactgttggcttgcttatgtctgctttgatcatctatccatttggcaaaaagcgtagcggcttatggactctgtaaacccaccataagaataacgtagcacttacaaccgagctttgattttcagcgacggacaaagggtcatgaaaattggattctgggtacagggaaagggtttaacatagcattccggaaatagatggctttgcaactggcgtaataggtagatctagaataaatagcaggtagatacttaattagacgaaaccttagtgcttaacagtacaacctgcgttggaatgccgagaatcgtagccgtacttcttacccagcccaagacggaggtcataccgccccgaattgcctcagtgcctcagccacagcagtaacatcctcaaacacatgccaatatcccacattctctaaaagaacaagacgtgagccttgaattcgccgtacatattcttcgcagtctcttggtgacgaccactcatcatctcttcccgtaactatccgcgtcttcgtttctggtgatatcttttcaaattctagtggtactatgacctccgccagtccttaaaaagccttggaatacgcccccggatcttgacttattatattaagacaaagtgccgtgatttaacgatttgggacgaagcacaggattagattcgatgtccggttacgaggtacgttgcagaagagagtagaagagtacggagctggcagggacgcgaattaatcaccgaagaaccagaaacaagtcgatgacagggttggaggttgttccttaaaggtcagttcaccaggtcagggcactctattttggagacctgatattcaagctggccagggtgaaaacgacagtaaaggccaccccaatgcacaagtgtattagatctgaagcccgcgctcactcaagacgatagttaaatagaaatccaggtcctcagaaaacacgtcgatccgagacaacgcctgtctctaaccccctcgatcccttcagctaaagaactcccctgcgatgtacgcaagatgagcccattctttccacccaagccgaaatcctggtcaccgccgtatttcgctagcgaaacgacgcggatcaccaacacacagctggcttcgagaggtcgtcccgcgtcttggctctgccaatccgccttggctggccgctctcgtggtcgctcctgtgttcagaggaagacccgaatgtggtcttggatgcattgccgctgctctggctatcgaatgtgtgtttcctctccggcgcgaccggagcgtcgcgcatcgctcgtacgattctcattatcccgaaggtcattctcggtctgcgataaccgtctgtggtgtttgtttcgcgttgtcaaggctcaagcatcgtcgatcggggcagcttgacggtagagaagctaccaatgtagttgcgactgaacaccgaattgatggctggtagtcaaacgcatactgtgtaggaagatgctgatgagagtatggagatgtcgaggcaaaggaaagctaggtgccggtggggggatgactaagaagcctttcagtgaatgtggcggtgatgaatgagtggctacttacaaagcctgatctcgcccaaggcggattttcttttcccgcacatcacgagtactccgtcagctctgcatatcccgcgtaaaccagtggcgtctggttggctgcacatgtg

SEQ ID NO: 20741 - DNA, 801 bp, Muscodor strobelii
  misc_feature: SGI cDNA ID NO. 567008
  misc_feature: Elevated expression when VOC is produced
  misc_feature: Encodes the peptide sequence at SEQ ID NO 20742
atggatatatgcagcaccagatgctcgccccagaaacaggcaaagccgacgcccggagaaccgatcccccccagagtccacaatctgggcgtgcagagaggctctcgttggaataacgggcagcgattgacggttaagttgatgggctgcccgtcgtccagcgtgcgcgcgaaagtgaaagaatacgccaacgaatggacagagcacgcaaacatcaagttcgtcttcgtcaggtatggcagagcgaacatccgcgtgaccttcaacaagggggcttgctggtctctcgtgggcagagagtgtgggccggcgaggaggaagggcgcaaccatgaacctagattgcgacgacaagaccgccgacgccatagtcaggcggattgtcctgcacgagtttgggcacgccctcggctgcatccacgagcaccagcagcccaacgggcgcatacagtgggacaaggccagagtcatcgagcattttgaccagacgctgggttgggatgaagagacgacccagcaaaacgtcatcgactactataacgaagacacggcgcatgcttccgaattcgacaggcactccatcatgatctatgcctttcccgagcacctgaccacggacggctactcggtcgagtggaacgacgagctgtcggaggccgacaagaagttcatagcgaccatgtacccgaagaactcggctgctcctacgaagcgaaaggagtgggtccagaggctagagctcttcctgccggagactaccggtcggatcaagggacagtgggtacgccggacggcaaagtag

SEQ ID NO: 20742 - protein, 266 aa, Muscodor strobelii
  misc_feature: SGI Peptide ID NO. 567008
  misc_feature (35)..(230): Pfam Id: PF01400 Pfam Desc: Astacin (Peptidase family M12A)
  misc_feature (3)..(229): NCBI GI: 46127641 Blast Desc: FG08198.1 [Gibberella zeae PH-1]
  misc_feature (30)..(231): NCBI GI: 195957725 Blast Desc: myroilysin precursor [Myroides profundi]
  misc_feature (36)..(230): NCBI GI: 118499463 Blast Desc: metalloprotease [uncultured bacterium]
  misc_feature (2)..(239): NCBI GI: 46133915 Blast Desc: FG09097.1 [Gibberella zeae PH-1]
  misc_feature (29)..(229): NCBI GI: 228925039 Blast Desc: bthur0011_59190 [Bacillus thuringiensis serovar huazhongensis BGSC 4BD1] gi|228834616|gb|EEM80126.1| bthur0011_59190 [Bacillus thuringiensis serovar huazhongensis
  misc_feature (29)..(230): NCBI GI: 46127395 Blast Desc: FG08075.1 [Gibberella zeae PH-1]
  misc_feature (29)..(232): NCBI GI: 256724226 Blast Desc: NECHADRAFT_53546 [Nectria haematococca mpVI 77-13-4]
  misc_feature (34)..(230): NCBI GI: 237653640 Blast Desc: peptidase domain protein [Thauera sp. MZ1T] gi|237624887|gb|ACR01577.1| peptidase domain protein [Thauera sp. MZ1T]
  misc_feature (37)..(262): NCBI GI: 170094961 Blast Desc: [Laccaria bicolor S238N-H82] gi|164646005|gb|EDR10251.1| [Laccaria bicolor S238N-H82]
  misc_feature (26)..(230): NCBI GI: 71906460 Blast Desc: peptidase, metallopeptidase [Dechloromonas aromatica RCB] gi|71846081|gb|AAZ45577.1| Peptidase, metallopeptidases [Dechloromonas aromatica RCB]
  misc_feature: Useful for introducing or modulating the production of volatile compounds
MDICSTRCSPQKQAKPTPGEPIPPRVHNLGVQRGSRWNNGQRLTVKLMGCPSSSVRAKVKEYANEWTEHANIKFVFVRYGRANIRVTFNKGACWSLVGRECGPARRKGATMNLDCDDKTADAIVRRIVLHEFGHALGCIHEHQQPNGRIQWDKARVIEHFDQTLGWDEETTQQNVIDYYNEDTAHASEFDRHSIMIYAFPEHLTTDGYSVEWNDELSEADKKFIATMYPKNSAAPTKRKEWVQRLELFLPETTGRIKGQWVRRTAK

SEQ ID NO: 20743 - DNA, 2098 bp, Muscodor strobelii
  misc_feature: SGI EST ID NO. CUFF.49052.0
  misc_feature: Variant of the nucleotide sequence at SEQ ID NO 20741
ttcaccgcaaacattgttctgctcgaaaattttgatatatatttaaaattagtacgtaaacaatggtttgatttcagaatcttttattttggtgatggttagcattggatgtggtcaattaggtgtaatgtagttgtcctggtgtctcatctcttgtgctcacagcctcgcgcggagagcctcgctggcttgtcgcccatgcaggctggtcaggtcggtagtgctgaaggcaattggtcgctgcatctggaggcatcccccacttctggcctgcgagcagcgccgacgagggccggcttgggacatggcgtctcattgcatctggagtcgcagtgcagaataggcaccctcgacaccctccgtcgctttcggtctgtcaatgcctacctgagcagaaatcaagctagccaagggtgattgacgatgcaggcgagcgcagccttgtcgagtctgctggctcgtgagggggatgaccagacgagaaatagtcgcgaatttccctcctccattgaccatgaacagctctgacggcccatcgcagtactgggcattgggccgggccgctacaacctgaacagcatcccctcaccatggatatatgcagcaccagatgctcgccccagaaacaggcaaagccgacgcccggagaaccgatcccccccagagtccacaatctgggcgtgcagagaggctctcgttggaataacgggcagcgattgacggttaagttgatgggctgcccgtcgtccagcgtgcgcgcgaaagtgaaagaatacgccaacgaatggacagagcacgcaaacatcaagttcgtcttcgtcaggtatggcagagcgaacatccgcgtgaccttcaacaagggggcttgctggtctctcgtgggcagagagtgtgggccggcgaggaggaagggcgcaaccatgaacctagattgcgacgacaagaccgccgacgccatagtcaggcggattgtcctgcacgagtttgggcacgccctcggctgcatccacgagcaccagcagcccaacgggcgcatacagtgggacaaggccagagtcatcgagcattttgaccagacgctgggttgggatgaagagacgacccagcaaaacgtcatcgactactataacgaagacacggcgcatgcttccgaattcgacaggcactccatcatgatctatgcctttcccgagcacctgaccacggacggctactcggtcgagtggaacgacgagctgtcggaggccgacaagaagttcatagcgaccatgtacccgaagaactcggctgctcctacgaagcgaaaggagtgggtccagaggctagagctcttcctgccggagactaccggtcggatcaagggacagtgggtacgccggacggcaaagtagaagtcggggaggccactaagttgggattgagttgagctacgggttggctacgactaggtcgggctgcttgccattgatggttttttcggaggtcatgtgccaacgcgggcacattcatcaactaccctcgctagctacttaagcacttaacctagatactttcttacttcgtgcctcacaaaaaacgtgaatcccttctggggtccaagatgccacctcccgtgcttccgacccctgcttcctacttgcaatgcgtgggtcttccccgccattagtgcccgggttaccgactggatagcgattaggcggacagatgtgggggagataggacgcgctccctccctgggtgcacctaaaccttggtgccctctgtgcctgcctcggaactcctcgccaccaaaggccctccacgtagccgagcgatcgcgaggagtaacactgttgcagaacactgcttcgcagatgtcccaggagcctctaatcctcgttcttcgagaggctggtcgacacctgccagggcctccacgagtggtggccgaccgtcgattccgagacggtgctagagcagccagattttcggcccaaggcgcacctcaagctctgctacgacctcgtcgagatatacgtcggccgactattcgtcttctacgactcgcagaacccgcactcgtcgcccgcagcagccgcctccgccgccgccaccagta

SEQ ID NO: 20744 - DNA, 1092 bp, Muscodor strobelii
  misc_feature: SGI cDNA ID NO. 567009
  misc_feature: Reduced expression when VOC is produced
  misc_feature: Encodes the peptide sequence at SEQ ID NO 20745
atgagccacatagtcgttgtaggtgccggcgtcattggtcttagctgtgctttacggatacaagactccggccacaatgtaacaataatcgcaaaagactttccaggcggctttgagacaattgatgcgacaacgcaaatcaacttcacatcgccatggggcggtgcacacaaccgcttcatcctgcccgctcctggcgcatcgccagactcgccagaagcacgtgagcatgccatgtcacttgtgacatgggacacgatgcacgcattacaggctcgccatcctgaagctggaatcacactcatgaaatcaatcgattattgggagacacctgaggaagctcagacgacagtgacagcagagaaggcgtccaaggaatatggtatgaagggtttcaggctcctcagtaaggaggaattgccgaagggcgtgaacttcgggtatgagtacgattcgtggtgcgtgaatccgatggtatactgcgggttcctgctacgacgctttgcttttcgcggaggaaaaatcatcaagagagagattagagaccctttagaagtcttccatatgaaagacctggttccaattgatgtgctcataaatgcttcgggcattgggttcaatgacagcaacatcttcatcacgacaggtcaaacatgtttagtcgcaaatccgtgtcctgtgacaatcacgaagataccgagtgcaggccgacatggttcgttcaatgtcccgcgcggcttcgaaggcggtaccatcatcggaggcacgaaagttccaaataattgggacatgaatccctcgttagaactcagagaggaattactatggaactttgccgcaatataccccgatattctcggtcctgatggaaaattcactgtcatcaaggacattgttggcagaaggccaacgcggaaaggcggcatgagactcgagaaagagatggcccaaggaaacaggtgcatcatacacgcatatggattgggtgggcgcggttacgaactaagcggcggtgtggcagagaaggttgcgagcttactttctgcgcatctcggctcaacaggcacacatcggagacagtcaagactgtga

SEQ ID NO: 20745 - protein, 363 aa, Muscodor strobelii
  misc_feature: SGI Peptide ID NO. 567009
  misc_feature (3)..(346): Pfam Id: PF01266 Pfam Desc: FAD dependent oxidoreductase
  misc_feature (4)..(33): Pfam Id: PF02558 Pfam Desc: Ketopantoate reductase PanE/ApbA
  misc_feature (3)..(37): Pfam Id: PF00890 Pfam Desc: FAD binding domain
  misc_feature (3)..(30): Pfam Id: PF00070 Pfam Desc: Pyridine nucleotide-disulphide oxidoreductase
  misc_feature (3)..(37): Pfam Id: PF07992 Pfam Desc: Pyridine nucleotide-disulphide oxidoreductase
  misc_feature (2)..(358): NCBI GI: 39951341 Blast Desc: MGG_01313 [Magnaporthe grisea 70-15] gi|145020871|gb|EDK05000.1| MGG_01313 [Magnaporthe grisea 70-15]
  misc_feature (3)..(353): NCBI GI: 164427278 Blast Desc: NCU03131 [Neurospora crassa OR74A] gi|157071679|gb|EAA35754.2| conserved [Neurospora crassa OR74A]
  misc_feature (14)..(343): NCBI GI: 116180500 Blast Desc: CHGG_00878 [Chaetomium globosum CBS 148.51] gi|88185175|gb|EAQ92643.1| CHGG_00878 [Chaetomium globosum CBS 148.51]
  misc_feature (3)..(358): NCBI GI: 38567273 Blast Desc: related to D-amino acid oxidase [Neurospora crassa]
  misc_feature (4)..(347): NCBI GI: 70997015 Blast Desc: FAD dependent oxidoreductase superfamily [Aspergillus fumigatus Af293] gi|66850898|gb|EAL91224.1| FAD dependent oxidoreductase superfamily [Aspergillus fumigatus Af293] FAD
  misc_feature (4)..(347): NCBI GI: 169779617 Blast Desc: [Aspergillus oryzae RIB40] gi|238500297|ref|XP_002381383.1| FAD dependent oxidoreductase superfamily [Aspergillus flavus NRRL3357] protein product oryzae]
  misc_feature (9)..(344): NCBI GI: 171687763 Blast Desc: protein product [Podospora anserina] gi|170943843|emb|CAP69495.1| protein product [Podospora anserina]
  misc_feature (4)..(347): NCBI GI: 119477558 Blast Desc: FAD dependent oxidoreductase superfamily [Neosartorya fischeri NRRL 181] gi|119407439|gb|EAW17388.1| FAD dependent oxidoreductase superfamily [Neosartorya fischeri NRRL 181]
  misc_feature (4)..(347): NCBI GI: 259480550 Blast Desc: TPA: FAD dependent oxidoreductase superfamily (AFU_orthologue; AFUA_5G13940) [Aspergillus nidulans FGSC A4]
  misc_feature (4)..(347): NCBI GI: 115399442 Blast Desc: conserved [Aspergillus terreus NIH2624] gi|114192193|gb|EAU33893.1| conserved [Aspergillus terreus NIH2624]
  misc_feature (1)..(324): SWISSPROT Homolog: EC 1.4.3.3 D-amino-acid oxidase
  misc_feature: Useful for introducing or modulating the production of volatile compounds
MSHIVVVGAGVIGLSCALRIQDSGHNVTIIAKDFPGGFETIDATTQINFTSPWGGAHNRFILPAPGASPDSPEAREHAMSLVTWDTMHALQARHPEAGITLMKSIDYWETPEEAQTTVTAEKASKEYGMKGFRLLSKEELPKGVNFGYEYDSWCVNPMVYCGFLLRRFAFRGGKIIKREIRDPLEVFHMKDLVPIDVLINASGIGFNDSNIFITTGQTCLVANPCPVTITKIPSAGRHGSFNVPRGFEGGTIIGGTKVPNNWDMNPSLELREELLWNFAAIYPDILGPDGKFTVIKDIVGRRPTRKGGMRLEKEMAQGNRCIIHAYGLGGRGYELSGGVAEKVASLLSAHLGSTGTHRRQSRL

SEQ ID NO: 20746 - DNA, 3467 bp, Muscodor strobelii
  misc_feature: SGI EST ID NO. CUFF.48760.1
  misc_feature: Variant of the nucleotide sequence at SEQ ID NO 20744
caagaagcttcctgagaactttttgctattgggtgttacattcttcttcttagccttctgagatttcatttgtactgtctcagtcgttctcaatactccaacagtattcagactaagcttcctatcgcagcatcatatctttagttttagaacagcgcactataatacatgagagttattttatatcctcacaatcatgagccacatagtcgttgtaggtgccggcgtcattggtcttagctgtgctttacggatacaagactccggccacaatgtaacaataatcgcaaaagactttccaggcggctttgagacaattgatgcgacaacgcaaatcaacttcacatcgccatggggcggtgcacacaaccgcttcatcctgcccgctcctggcgcatcgccagactcgccagaagcacgtgagcatgccatgtcacttgtgacatgggacacgatgcacgcattacaggctcgccatcctgaagctggaatcacactcatgaaatcaatcgattattgggagacacctgaggaagctcagacgacagtgacagcagagaaggcgtccaaggaatatggtatgaagggtttcaggctcctcagtaaggaggaattgccgaagggcgtgaacttcgggtatgagtacgattcgtggtgcgtgaatccgatggtatactgcgggttcctgctacgacgctttgcttttcgcggaggaaaaatcatcaagagagagattagagaccctttagaagtcttccatatgaaagacctggttccaattgatgtgctcataaatgcttcgggcattgggttcaatgacagcaacatcttcatcacgacaggtcaaacatgtttagtcgcaaatccgtgtcctgtgacaatcacgaagataccgagtgcaggccgacatggttcgttcaatgtcccgcgcggcttcgaaggcggtaccatcatcggaggcacgaaagttccaaataattgggacatgaatccctcgttagaactcagagaggaattactatggaactttgccgcaatataccccgatattctcggtcctgatggaaaattcactgtcatcaaggacattgttggcagaaggccaacgcggaaaggcggcatgagactcgagaaagagatggcccaaggaaacaggtgcatcatacacgcatatggattgggtgggcgcggttacgaactaagcggcggtgtggcagagaaggttgcgagcttactttctgcgcatctcggctcaacaggcacacatcggagacagtcaagactgtgacgatttttccagtcgtcgtacttgcatcaccaaagaatgcatttccggagttgttgtgcctcatcgataataatattgtaaatattgatataaggcttcatctattgaagtctacatgactcaaacgtacctaaagtttgagagcgttgtagagccaggaacagaaatataatatagggctttaatgctcttttcataacttccccttcatcgcagatctcctcgcggcctttttgatttcctctttaaaggctaaatccccgagaatctcctctgagcctccacccactaccatcatccgtaggtctcgtgtgatttgctcaacacgacctccgcctccaggtccgcctcgctgatatgcaacgccgcccatgacctgctgtgcctctctagcagcaagctcaagtattcgaccaccggagatcttagacattgcgatcggacctgcgatatctttgctctgccagccatgcttctgtacgtgataggcgatctgctcaagccaagcccagtgggactcaacctcacgagcaagattcacgattttgtggcgaatgacctgatggcttgctagtggaactccgaacgtttcacgctcatgcgcatatgccagggcagtcgaaagacacgttcgcgctttgcgattgcaccccacagccataatgaagcgctcactattgaaatttgtcatgatgtacatgaagcccgcattctcaactcccagcaaatggtctgcggggaccttgacggcatcaagccgcacccaacttgcgcctcctgcattctgtccactattcgagatcttctctatcgaaacgccaggtgacgaaagaggtatgaccagaagtgaaattccagcgaagccagatcctccggtgcgtactgcagtcgtcatgtgcgtcgcccattgacttccagtgatccacttcttagtaccagagacgatgtagtgcgagccgtctgcgctcttcctggctgccgtcttgatgttgcttacgtcactgcctccgcttggttctgttatgccaagacagaagttcgtctgttgtgtgaagagaccaggtacccacctctgtttttgcgccttggtgccatgtttcaagattggcggcaacccaattgcatttgcgccgtttgacattgccatcagcacgccgccttcgaccctcgagctctcatctgaaagtatcatgtgatgaaacatatcaaagtcctcgattggaatgccggcaactgtgttgaactctgctggccggtactcctttggtacgttgacgaacgccaggcctgattttgcatatgcctcctttgcagacttcgggcaatctcctgctgcttcccattctagcatgtgagggatgattttgtcgtcgtagaatttcctcgtatatgcctgcaaccttctgtgcgagtcgttgtaatacggtgattcaagcgaggacagccacgccggctccgcccatggaaactcttgctcctgttccatcttctagatagggccaggttgatttatcgacacacagaagatgtttttgttaattttgccaaggtgctatgagatttacgaagaaacagaatgtaacatgggaatacaagaaacacacgctccctttgcgactcagcgcacccagaagtgaagttggagatgccgaggcaatcctacctacatccctagttgagagtcacgcctgttgattggctcttaacctcacatcccagcacgcttaggctacttggtttccggggttagctcccgcctttgctcaaacatcaggttcagtcctattgccgggtaagtaatctcaacttagggggagatagtccagaatttctggtcgcaatcatcgcggagcaagataggcgatcgccgatgatgttcgttggcaatctaagctgtatagataggttactctcgccatcaatctggcgttcaccctgacagaagggcaaacgaagaagcgaatttgccgaatctaggccaatgtagatcccaagaaacacgaatgtcgttgctaaatggggtgtgataaaccatgatcgacatttgatgcatgcctgggttcttcattgcatatcattcaagtaacccgaagtgacagcctcgccggaaggcaaacgactgtatccgcgcgcggcttagacaaacttgcgactcgcaatcaattttgctcggattctt

SEQ ID NO: 20747 - DNA, 1293 bp, Muscodor strobelii
  misc_feature: SGI cDNA ID NO. 567010
  misc_feature: Encodes the peptide sequence at SEQ ID NO 20748
atggaacaggagcaagagtttccatgggcggagccggcgtggctgtcctcgcttgaatcaccgtattacaacgactcgcacagaaggttgcaggcatatacgaggaaattctacgacgacaaaatcatccctcacatgctagaatgggaagcagcaggagattgcccgaagtctgcaaaggaggcatatgcaaaatcaggcctggcgttcgtcaacgtaccaaaggagtaccggccagcagagttcaacacagttgccggcattccaatcgaggactttgatatgtttcatcacatgatactttcagatgagagctcgagggtcgaaggcggcgtgctgatggcaatgtcaaacggcgcaaatgcaattgggttgccgccaatcttgaaacatggcaccaaggcgcaaaaacagaggtgggtacctggtctcttcacacaacagacgaacttctgtcttggcataacagaaccaagcggaggcagtgacgtaagcaacatcaagacggcagccaggaagagcgcagacggctcgcactacatcgtctctggtactaagaagtggatcactggaagtcaatgggcgacgcacatgacgactgcagtacgcaccggaggatctggcttcgctggaatttcacttctggtcatacctctttcgtcacctggcgtttcgatagagaagatctcgaatagtggacagaatgcaggaggcgcaagttgggtgcggcttgatgccgtcaaggtccccgcagaccatttgctgggagttgagaatgcgggcttcatgtacatcatgacaaatttcaatagtgagcgcttcattatggctgtggggtgcaatcgcaaagcgcgaacgtgtctttcgactgccctggcatatgcgcatgagcgtgaaacgttcggagttccactagcaagccatcaggtcattcgccacaaaatcgtgaatcttgctcgtgaggttgagtcccactgggcttggcttgagcagatcgcctatcacgtacagaagcatggctggcagagcaaagatatcgcaggtccgatcgcaatgtctaagatctccggtggtcgaatacttgagcttgctgctagagaggcacagcaggtcatgggcggcgttgcatatcagcgaggcggacctggaggcggaggtcgtgttgagcaaatcacacgagacctacggatgatggtagtgggtggaggctcagaggagattctcggggatttagcctttaaagaggaaatcaaaaaggccgcgaggagatctgcgatgaaggggaagttatga

SEQ ID NO: 20748 - protein, 430 aa, Muscodor strobelii
  misc_feature: SGI Peptide ID NO. 567010
  misc_feature (152)..(205): Pfam Id: PF02770 Pfam Desc: Acyl-CoA dehydrogenase, middle domain
  misc_feature (259)..(417): Pfam Id: PF00441 Pfam Desc: Acyl-CoA dehydrogenase, C-terminal domain
  misc_feature (24)..(148): Pfam Id: PF02771 Pfam Desc: Acyl-CoA dehydrogenase, N-terminal domain
  misc_feature (8)..(423): NCBI GI: 169624459 Blast Desc: SNOG_15489 [Phaeosphaeria nodorum SN15] gi|111056034|gb|EAT77154.1| SNOG_15489 [Phaeosphaeria nodorum SN15]
  misc_feature (1)..(429): NCBI GI: 238482905 Blast Desc: acyl-CoA dehydrogenase [Aspergillus flavus NRRL3357] gi|220700741|gb|EED57079.1| acyl-CoA dehydrogenase [Aspergillus flavus NRRL3357]
  misc_feature (8)..(417): NCBI GI: 169766208 Blast Desc: [Aspergillus oryzae RIB40] gi|83765430|dbj|BAE55573.1| protein product [Aspergillus oryzae]
  misc_feature (8)..(423): NCBI GI: 189209716 Blast Desc: acyl-CoA dehydrogenase [Pyrenophora tritici-repentis Pt-1C-BFP] gi|187977283|gb|EDU43909.1| acyl-CoA dehydrogenase [Pyrenophora tritici-repentis Pt-1C-BFP]
  misc_feature (8)..(418): NCBI GI: 258573887 Blast Desc: conserved [Uncinocarpus reesii 1704] gi|237901391|gb|EEP75792.1| conserved [Uncinocarpus reesii 1704]
  misc_feature (8)..(427): NCBI GI: 239611235 Blast Desc: acyl-CoA dehydrogenase [Ajellomyces dermatitidis ER-3]
  misc_feature (8)..(427): NCBI GI: 261205638 Blast Desc: acyl-CoA dehydrogenase [Ajellomyces dermatitidis SLH14081] gi|239592615|gb|EEQ75196.1| acyl-CoA dehydrogenase [Ajellomyces dermatitidis SLH14081]
  misc_feature (8)..(430): NCBI GI: 119192516 Blast Desc: CIMG_00635 [Coccidioides immitis RS]
  misc_feature (8)..(418): NCBI GI: 226281030 Blast Desc: acyl-CoA dehydrogenase [Paracoccidioides brasiliensis Pb01]
  misc_feature (8)..(418): NCBI GI: 226289910 Blast Desc: acyl-CoA dehydrogenase [Paracoccidioides brasiliensis Pb18]
  misc_feature (24)..(328): SWISSPROT Homolog: EC 1.3.99.3 Acyl-CoA dehydrogenase
  misc_feature: Useful for introducing or modulating the production of volatile compounds
  misc_feature: Useful for fungicidal and/or biocontrol applications
MEQEQEFPWAEPAWLSSLESPYYNDSHRRLQAYTRKFYDDKIIPHMLEWEAAGDCPKSAKEAYAKSGLAFVNVPKEYRPAEFNTVAGIPIEDFDMFHHMILSDESSRVEGGVLMAMSNGANAIGLPPILKHGTKAQKQRWVPGLFTQQTNFCLGITEPSGGSDVSNIKTAARKSADGSHYIVSGTKKWITGSQWATHMTTAVRTGGSGFAGISLLVIPLSSPGVSIEKISNSGQNAGGASWVRLDAVKVPADHLLGVENAGFMYIMTNFNSERFIMAVGCNRKARTCLSTALAYAHERETFGVPLASHQVIRHKIVNLAREVESHWAWLEQIAYHVQKHGWQSKDIAGPIAMSKISGGRILELAAREAQQVMGGVAYQRGGPGGGGRVEQITRDLRMMVVGGGSEEILGDLAFKEEIKKAARRSAMKGKL

SEQ ID NO: 20749 - DNA, 1230 bp, Muscodor strobelii
  misc_feature: SGI cDNA ID NO. 567011
  misc_feature: Encodes the peptide sequence at SEQ ID NO 20750
atgctacacttcgttcagaggaccactatcgccatcttccatctcataacagccggctttttcaagcaacctactctcgttcccaatacaagcaccttaccgcctgtcatgaagcacatagtaatcgttggaggctcctttggcggtgtcagcacagcacatcggtttctgaagcagtctgccaaagtacccagcgggtccttcaaggtgacactggtctcccaagacagccatttctactggaatattgctgctccgcgtgctttgattcccggccagatttcggacgaaaaactctttcaacctattgcctcaggtttcgctcattacccgaagacggattttgaaattatactcggcagtgcaaccggcgtcgacgtagacgacaagaaacttcaagtcacaagcccagacggccaaatcgaaaacctccaatacgactacctcgttcttgcaactggctcgcgtactcgagaagatacacctttaaagtcaatcggctcgaccgaagcgacacgagccgcccttcataaactccaagagcagatcaaaagcgcaaagaatattgtcatcgttggcgcaggggccactggtgtcgagatagccggggagttggcattcgagtacgaacgcggaaaacccgttacactcgtatctagcggttcagctgtcctaagtggccggcccgccaaggtgtctcaaacagcagagaagcagctcgcagcgctgaacgtagacctcagactggctacgaaggtcatagatacggcgcatcgagatgatggttcacaagaactgaccctttccgacgggaagaagcttatcgctgatgtcgtcattctaacacatggcattgtgccaaattcatcttttgtcccgtcccaattcttgaatgccgatggttacatacgagtcgacgaaaccttccaagttaccggcgcgaacagtgtattcgcgattggagatgtgtcagattgcgagccaacgcaattcctatgcgtcgagaatcaatcaattcacatggccaagaacattgtccttgcgctcaacgggaagatcatggttccttacaaagcctcaaagacagctgcaatgggtctccagatagggaagaaaactggcacaggtcattttgggaatttcaagttgccatcggtcctagtggcgatgattcgaaagacgctgttcatagatagactccctaagaccgtagatggatcgatgctttga

SEQ ID NO: 20750 - protein, 409 aa, Muscodor strobelii
  misc_feature: SGI Peptide ID NO. 567011
  misc_feature (188)..(284): Pfam Id: PF00070 Pfam Desc: Pyridine nucleotide-disulphide oxidoreductase
  misc_feature (39)..(328): Pfam Id: PF07992 Pfam Desc: Pyridine nucleotide-disulphide oxidoreductase
  misc_feature (37)..(407): NCBI GI: 212526130 Blast Desc: apoptosis-inducing factor, [Penicillium marneffei ATCC 18224] gi|210072620|gb|EEA26707.1| apoptosis-inducing factor, [Penicillium marneffei ATCC 18224]
  misc_feature (36)..(407): NCBI GI: 156053928 Blast Desc: SS1G_05812 [Sclerotinia sclerotiorum 1980] gi|154703592|gb|EDO03331.1| SS1G_05812 [Sclerotinia sclerotiorum 1980]
  misc_feature (38)..(409): NCBI GI: 154295649 Blast Desc: BC1G_13095 [Botryotinia fuckeliana B05.10] gi|150843975|gb|EDN19168.1| BC1G_13095 [Botryotinia fuckeliana B05.10]
  misc_feature (37)..(408): NCBI GI: 242780069 Blast Desc: disulfide oxidoreductase, [Talaromyces stipitatus ATCC 10500] gi|218719664|gb|EED19083.1| disulfide oxidoreductase, [Talaromyces stipitatus ATCC 10500]
  misc_feature (38)..(409): NCBI GI: 256726095 Blast Desc: NECHADRAFT_42979 [Nectria haematococca mpVI 77-13-4]
  misc_feature (38)..(407): NCBI GI: 156045061 Blast Desc: SS1G_09719 [Sclerotinia sclerotiorum 1980] gi|154694114|gb|EDN93852.1| SS1G_09719 [Sclerotinia sclerotiorum 1980]
  misc_feature (36)..(407): NCBI GI: 261352348 Blast Desc: conserved [Verticillium albo-atrum VaMs.102]
  misc_feature (38)..(409): NCBI GI: 46111627 Blast Desc: FG02695.1 [Gibberella zeae PH-1]
  misc_feature (38)..(408): NCBI GI: 116194578 Blast Desc: CHGG_03887 [Chaetomium globosum CBS 148.51] gi|88179800|gb|EAQ87268.1| CHGG_03887 [Chaetomium globosum CBS 148.51]
  misc_feature (38)..(277): NCBI GI: 154295651 Blast Desc: BC1G_13096 [Botryotinia fuckeliana B05.10] gi|150843976|gb|EDN19169.1| BC1G_13096 [Botryotinia fuckeliana B05.10]
  misc_feature (69)..(358): SWISSPROT Homolog: EC 1.6.99.3 NADH dehydrogenase
MLHFVQRTTIAIFHLITAGFFKQPTLVPNTSTLPPVMKHIVIVGGSFGGVSTAHRFLKQSAKVPSGSFKVTLVSQDSHFYWNIAAPRALIPGQISDEKLFQPIASGFAHYPKTDFEIILGSATGVDVDDKKLQVTSPDGQIENLQYDYLVLATGSRTREDTPLKSIGSTEATRAALHKLQEQIKSAKNIVIVGAGATGVEIAGELAFEYERGKPVTLVSSGSAVLSGRPAKVSQTAEKQLAALNVDLRLATKVIDTAHRDDGSQELTLSDGKKLIADVVILTHGIVPNSSFVPSQFLNADGYIRVDETFQVTGANSVFAIGDVSDCEPTQFLCVENQSIHMAKNIVLALNGKIMVPYKASKTAAMGLQIGKKTGTGHFGNFKLPSVLVAMIRKTLFIDRLPKTVDGSML

SEQ ID NO: 20751 - DNA, 1832 bp, Muscodor strobelii
  misc_feature: SGI EST ID NO. CUFF.48703.0
  misc_feature: Variant of the nucleotide sequence at SEQ ID NO 20749
ttatactcggcagtgcaaccggcgtcgacgtagacgacaagaaacttcaagtcacaagcccagacggccaaatcgaaaacctccaatacgactacctcgttcttgcaactggctcgcgtactcgagaagatacacctttaaagtcaatcggctcgaccgaagcgacacgagccgcccttcataaactccaagagcagatcaaaagcgcaaagaatattgtcatcgttggcgcaggggccactggtgtcgagatagccggggagttggcattcgagtacgaacgcggaaaacccgttacactcgtatctagcggttcagctgtcctaagtggccggcccgccaaggtgtctcaaacagcagagaagcagctcgcagcgctgaacgtagacctcagactggctacgaaggtcatagatacggcgcatcgagatgatggttcacaagaactgaccctttccgacgggaagaagcttatcgctgatgtcgtcattctaacacatggcattgtgccaaattcatcttttgtcccgtcccaattcttgaatgccgatggttacatacgagtcgacgaaaccttccaagttaccggcgcgaacagtgtattcgcgattggagatgtgtcagattgcgagccaacgcaattcctatgcgtcgagaatcaatcaattcacatggccaagaacattgtccttgcgctcaacgggaagatcatggttccttacaaagcctcaaagacagctgcaatgggtctccagatagggaagaaaactggcacaggtcattttgggaatttcaagttgccatcggtcctagtggcgatgattcgaaagacgctgttcatagatagactccctaagaccgtagatggatcgatgctttgaacctgtattatattacctctggctagtcgcattagatatagtagccgagggagcttgggtgattagaagagaaacagatgttgtgcgattgttattgcgtccccccaagagaaattcgggttgcatcgtgtttgccgccatacttcattgagtgccgatagaattgattcgcgtcgtttgataaaagggcctgggatagctcgcgaagagaaaatttgacggaagcgtgactgctcttcttctcttaccgatatgcaccccagaagaaatagcggagctatgagggatgggagcagatgagatgaaatttgctgttgaatgatttctaaggcttgagctttgaccgtatcgagtgtttctattctttgaaagccatgatcgacgagatgcaggtatatagatgccatgtgagcaaagacctgagtgatcagtgccgtttggtccatggtcgtgcttgtaaaccccggaacaggagtgtctgatacaactagcgccaccaaagcctcccgcgccagtccgcagtctatttcgacggaaatatcttgggacatatccttggatgctgtatctttgtggctccgcgtattagcaatatggttcccatgcaaggtagctattcgacctatttggtgcacgacccaattccgacaccccattacgttttcaacctttgtttgggagttttttgcgaaagcgcgttcatgatgagctgccagcctcggagcattgcccgacgtaatcgcagcaaggatgtcgagccataatatggtagatccgaagaagcgtagcgcattcacgtcttccatcccgagagtgccatcaagtggaaattgtagatcttcacgaagaattcgtcttccgaattgactcattgaaacagtgtcgaacccatcagtcagtagcttggcgtaaatatcggttgcagcatagagatgtactctccaagcatcg

SEQ ID NO: 20752 - DNA, 771 bp, Muscodor strobelii
  misc_feature: SGI cDNA ID NO. 567012
  misc_feature: Elevated expression when VOC is produced
  misc_feature: Encodes the peptide sequence at SEQ ID NO 20753
atgcgtacacactttcctctcgctcttctcacgctctacagtgggctagctgctgggcaaggtgcttccggatcaggtcaaacaacgcgatattgggattgctgcaaaccttcatgtggttggacgcagaagacgaacagcgggaaattgatcggaacatgcagcaaatccgacagtccattgaacgacaacggggcgactaagtccggttgcgatagcggcggttctgcttatatgtgctcgaaccaaagtccttgggcaatcgatgagaacacttcgtacgggtgggccgctgtcaggatcagtggacagacagagactacatggtgttgtgcgtgctatgagcttacgttcacgagtggtcctgttagtggaaagaagatgattgtgcaggccagcaatacaggaggtgatttgggcaataaccacttcgatcttgcgatacccggtggcggtgtaggtcttttcaatgcctgtacagcgcaatacggtgcacctccccaaggctggggacagcagtacggtggtatttcgtctcggtctgaatgtgatggcttccctgaggcgctcaaggctggctgttactggcgctttgactggttcggtggcgcagacaacccatctgttactttcaagcaggttgcttgtcctgcggctctcacggccaagagtggatgttcacgcaacaacgacgcaatagacgagacgcctacgggacctagtagtgtttctacttggacacctgctgccactggttcagctagtatctaa

SEQ ID NO: 20753 - protein, 256 aa, Muscodor strobelii
  misc_feature: SGI Peptide ID NO. 567012
  misc_feature (25)..(227): Pfam Id: PF02015 Pfam Desc: Glycosyl hydrolase family 45
  misc_feature (7)..(248): NCBI GI: 171687659 Blast Desc: protein product [Podospora anserina] gi|170943791|emb|CAP69443.1| protein product [Podospora anserina]
  misc_feature (9)..(228): NCBI GI: 116180480 Blast Desc: CHGG_00868 [Chaetomium globosum CBS 148.51] gi|88185165|gb|EAQ92633.1| CHGG_00868 [Chaetomium globosum CBS 148.51]
  misc_feature (1)..(238): NCBI GI: 169616266 Blast Desc: SNOG_11303 [Phaeosphaeria nodorum SN15] gi|111059891|gb|EAT81011.1| SNOG_11303 [Phaeosphaeria nodorum SN15]
  misc_feature (1)..(228): NCBI GI: 189197649 Blast Desc: endoglucanase-5 [Pyrenophora tritici-repentis Pt-1C-BFP] gi|187981110|gb|EDU47736.1| endoglucanase-5 [Pyrenophora tritici-repentis Pt-1C-BFP]
  misc_feature (5)..(255): NCBI GI: 156063420 Blast Desc: SS1G_01828 [Sclerotinia sclerotiorum 1980] gi|154697162|gb|EDN96900.1| SS1G_01828 [Sclerotinia sclerotiorum 1980]
  misc_feature (8)..(228): NCBI GI: 39951371 Blast Desc: MGG_01328 [Magnaporthe grisea 70-15] gi|145020856|gb|EDK04985.1| MGG_01328 [Magnaporthe grisea 70-15]
  misc_feature (7)..(254): NCBI GI: 154294519 Blast Desc: BC1G_13862 [Botryotinia fuckeliana B05.10] gi|150844702|gb|EDN19895.1| BC1G_13862 [Botryotinia fuckeliana B05.10]
  misc_feature (7)..(237): NCBI GI: 156032908 Blast Desc: SS1G_13860 [Sclerotinia sclerotiorum 1980] gi|154699262|gb|EDN99000.1| SS1G_13860 [Sclerotinia sclerotiorum 1980]
  misc_feature (1)..(255): NCBI GI: 37732125 Blast Desc: glycoside hydrolase 45 [Gibberella zeae]
  misc_feature (1)..(255): NCBI GI: 46111553 Blast Desc: FG02658.1 [Gibberella zeae PH-1]
  misc_feature (28)..(248): SWISSPROT Homolog: EC 3.2.1.4 Cellulase
  misc_feature: Useful for introducing or modulating the production of volatile compounds
MRTHFPLALLTLYSGLAAGQGASGSGQTTRYWDCCKPSCGWTQKTNSGKLIGTCSKSDSPLNDNGATKSGCDSGGSAYMCSNQSPWAIDENTSYGWAAVRISGQTETTWCCACYELTFTSGPVSGKKMIVQASNTGGDLGNNHFDLAIPGGGVGLFNACTAQYGAPPQGWGQQYGGISSRSECDGFPEALKAGCYWRFDWFGGADNPSVTFKQVACPAALTAKSGCSRNNDAIDETPTGPSSVSTWTPAATGSASI

SEQ ID NO: 20754 - DNA, 1525 bp, Muscodor strobelii
  misc_feature: SGI EST ID NO. CUFF.48731.0
  misc_feature: Variant of the nucleotide sequence at SEQ ID NO 20752
aagagaaccaagcccgcgtacggagccccttccgcagacttcttgaaacaggtagatcaactaccaatgattcgcggacaacggcagctaaggtcacgccaagtcggcgagcatcaatatgttcccgctcatgaaagagtaacctgtaattatgtcgtcggccatttggcccgctaaccatggatccccatcaaatggttcttgaagtatgagctcattcagacagtgatgacaacaaacgaagagactatatccctgactttagctccttttataactcacgtttcccgctatctgtgcattgagaagtgtgtcgtgccacgtctacaacccggtactagaactaacagagcttacgggagttttacatcacgcacttgctcttctcagccacatatcacgaacagtcaaggcatcagtcattaccatgcgtacacactttcctctcgctcttctcacgctctacagtgggctagctgctgggcaaggtgcttccggatcaggtcaaacaacgcgatattgggattgctgcaaaccttcatgtggttggacgcagaagacgaacagcgggaaattgatcggaacatgcagcaaatccgacagtccattgaacgacaacggggcgactaagtccggttgcgatagcggcggttctgcttatatgtgctcgaaccaaagtccttgggcaatcgatgagaacacttcgtacgggtgggccgctgtcaggatcagtggacagacagagactacatggtgttgtgcgtgctatgagcttacgttcacgagtggtcctgttagtggaaagaagatgattgtgcaggccagcaatacaggaggtgatttgggcaataaccacttcgatcttgcgatacccggtggcggtgtaggtcttttcaatgcctgtacagcgcaatacggtgcacctccccaaggctggggacagcagtacggtggtatttcgtctcggtctgaatgtgatggcttccctgaggcgctcaaggctggctgttactggcgctttgactggttcggtggcgcagacaacccatctgttactttcaagcaggttgcttgtcctgcggctctcacggccaagagtggatgttcacgcaacaacgacgcaatagacgagacgcctacgggacctagtagtgtttctacttggacacctgctgccactggttcagctagtatctaaagtatgatagcaatagtatggttatgcagttgccctggacttatctacggaggaggcgcgaaatggatcatgctgggcatataaaataatgccgctatcgaataacttgtcaagtctatgagagcatactgatgaccatcaatggcgtaaatctagaatccattttagtatctagtttcaatcggttacaaagtcgcccgcctattccggtccactttgaggtgctacggtacgctcttcgcgggataatacacgagattttacgtgtatagattgtaacgttattcgccggttcattcagtagtcagttagaaatcgatccgatta

SEQ ID NO: 20755 - DNA, 2643 bp, Muscodor strobelii
  misc_feature: SGI cDNA ID NO. 567013
  misc_feature: Elevated expression when VOC is produced
  misc_feature: Encodes the peptide sequence at SEQ ID NO 20756
atgatctccttcaaaccatatcctgccctcctcgggctcatccttcttgtcacattcgcccgcccggcgttggccttcggcgctggcaatgttgccggcatttcaaaggttgagggccagaactggcgccatggcgatatcgaagatacgctcctctcaatcttaatggctcgagctgttggagggaagaagttcgataagctgatggtctcacgtgtctacttcgggaactggctgcgcgactactcgcaggctattgatacaggcattgtgaagtctgtgtcttctgaggcagtccgtcttctgctttgcgttctaggcttcatgactttcggctttggttccaaagaatttgaagtcactgccgaccgtctcggatgctatcgacctgaagatcatatcgacaaccccaagaactacgctgataatcaggatgccagacgatatgatcgaagactgagaggtcctattgacgaggaagtcgaattggccgttgatgagagaactggcatgaagaactacattgccaatgagagagatggttcgagccgccatcgacccttcatgacttctgctcagcatgtccgaaatctatttggaaagtgcatccagcttggtcgtagctatcaacgcaacaaccgaaaggccgacttttacgaagctctacggttaatgggaaccggtttacattgtctcgaagatttccttgcgcacagcaactatcttgagttagcattgatcgagatgggcgagagagatgtgttccctcacgttgggcgccgtacacagatgacgattcccaccggccgcgacgaggctagagtttggccattggtcacaggaacttttggaggtgtcgattttctccattcagttgccggcgaagtatcggataagttgacacaaaatgagatccaagagctcgaaggcgctctccaacagaactcgcacaacgataccagctacatcgccgaactactggacaagattcccgacggaatattcggtggcgatgataagaaggaaaagatgaacgatattcaacaaaatgcacagaatgcgcagatggagaacacatcgatctcacctcgtgaccctgaagagttcacccaatatgcgggacaaattttccagcagatcatgcctgcaatcgaattccacgatgaactaatgaagagcatttccgaagccatcgacaaaattccgatcttgcctaagattatcgaacagctagaagatcaaatgtcgatgtgggtttttacaatcattgcgcctttcgtcctacctatcatctcccaagtcaagaatgagctcaataccggctcgcaggagattattgccagcagtgaagccgaacaactcatcgtctggaacgacgaccgctctacggacccaacacactctatgctctccaaggatcacttctccaacatcctaaatgagcccgcgggcaagactgcgagtcaggtcctcaaatgggttgtacctcagctgatggaggcctgggatgatgagggagtggatgtcgacagacttctgacccgcattatcaatggtgtcttgcaccaccctgcccagcgcgatgaaggtgaagatagagcccaagaaggtcgtgaaatcatgttccgtagcgtcgaaggctggtggagtgagatggacgagggcgccaaggatgaatacagacaaaagctgtccagcgagggtgttcgacgcggcgagaaccacaaggaaggcgtccacgactccggtcatggatgtggcaagccattgggtatgcacaagaactttggcagtggtggctccatggaagacagaatcgcaggcgctgcggctggggcaatctttgagggcgtgactggtggcatctcggacttcgtcgaacagtcaagtggtggccaagtcaaacttcccgactcagaaggccgaggtgaatcattcagcggggctggcattctaggcgaaattggcaactcgcttcttggaggaggattcaagaaggacgagaccgaattcgagaacaggcgacacaacgatgatggctcttacacagaaagccgaaccgagtatggacgctccggagaccgctatggccaggcccaatacagcgaaactcgcagacacgacgggagtgagcgtaccgaatatcaacgctacgagcaggacaacgatggtagaggttacgggtaccaagagcgaaccgaaacccgcgccaactacagcggtggctatgaggagcgtactgaacgtcgatatgagagcaatgaagactcttatcaagagagcagtggttggcagcgtcagcagcgtgaggacaatgacggtgagcgccagcaccatggaggccaccacggtcgccgagacgaagaccgagacgatagctatggccgccaagatgacaactatggacgtcgagacgacggatatggccgacaagaggagagacaagagtatggtcgcagtgacgaatatggcggcagacaagagtatggccgagatgagcgtcgcgaggaacgccgtgaagatcgtgaagacgagtcctctgttggcggtttcctaggaggactcgttgaccgagttggcgaggaactgtcggatgaccgccgccgccgtgatggagatggtggtggtggctggttttcttag

SEQ ID NO: 20756 - protein, 880 aa, Muscodor strobelii
  misc_feature: SGI Peptide ID NO. 567013
  misc_feature (1)..(621): Pfam Id: PF07217 Pfam Desc: Heterokaryon incompatibility protein Het-C
  misc_feature (1)..(321): Pfam Id: PF07217 Pfam Desc: Heterokaryon incompatibility protein Het-C
  misc_feature (378)..(621): Pfam Id: PF07217 Pfam Desc: Heterokaryon incompatibility protein Het-C
  misc_feature (1)..(850): NCBI GI: 46107690 Blast Desc: FG00728.1 [Gibberella zeae PH-1]
  misc_feature (1)..(724): NCBI GI: 85116042 Blast Desc: NCU03125 [Neurospora crassa OR74A] gi|28926783|gb|EAA35748.1| NCU03125 [Neurospora crassa OR74A] gi|38567279|emb|CAE76569.1| related to Het-c protein [Neurospora
  misc_feature (1)..(760): NCBI GI: 39951367 Blast Desc: MGG_01326 [Magnaporthe grisea 70-15] gi|145020858|gb|EDK04987.1| MGG_01326 [Magnaporthe grisea 70-15]
  misc_feature (1)..(774): NCBI GI: 256735483 Blast Desc: [Nectria haematococca mpVI 77-13-4]
  misc_feature (1)..(736): NCBI GI: 116180482 Blast Desc: CHGG_00869 [Chaetomium globosum CBS 148.51] gi|88185166|gb|EAQ92634.1| CHGG_00869 [Chaetomium globosum CBS 148.51]
  misc_feature (1)..(618): NCBI GI: 171687657 Blast Desc: protein product [Podospora anserina] gi|170943790|emb|CAP69442.1| protein product [Podospora anserina]
  misc_feature (39)..(783): NCBI GI: 156053868 Blast Desc: SS1G_05782 [Sclerotinia sclerotiorum 1980] gi|154703562|gb|EDO03301.1| SS1G_05782 [Sclerotinia sclerotiorum 1980]
  misc_feature (11)..(702): NCBI GI: 225562540 Blast Desc: NIMA-interacting protein TinC [Ajellomyces capsulatus G186AR]
  misc_feature (11)..(702): NCBI GI: 240281027 Blast Desc: NIMA interacting protein [Ajellomyces capsulatus H143]
  misc_feature (13)..(634): NCBI GI: 119177578 Blast Desc: CIMG_07708 [Coccidioides immitis RS]
  misc_feature: Useful for introducing or modulating the production of volatile compounds
MISFKPYPALLGLILLVTFARPALAFGAGNVAGISKVEGQNWRHGDIEDTLLSILMARAVGGKKFDKLMVSRVYFGNWLRDYSQAIDTGIVKSVSSEAVRLLLCVLGFMTFGFGSKEFEVTADRLGCYRPEDHIDNPKNYADNQDARRYDRRLRGPIDEEVELAVDERTGMKNYIANERDGSSRHRPFMTSAQHVRNLFGKCIQLGRSYQRNNRKADFYEALRLMGTGLHCLEDFLAHSNYLELALIEMGERDVFPHVGRRTQMTIPTGRDEARVWPLVTGTFGGVDFLHSVAGEVSDKLTQNEIQELEGALQQNSHNDTSYIAELLDKIPDGIFGGDDKKEKMNDIQQNAQNAQMENTSISPRDPEEFTQYAGQIFQQIMPAIEFHDELMKSISEAIDKIPILPKIIEQLEDQMSMWVFTIIAPFVLPIISQVKNELNTGSQEIIASSEAEQLIVWNDDRSTDPTHSMLSKDHFSNILNEPAGKTASQVLKWVVPQLMEAWDDEGVDVDRLLTRIINGVLHHPAQRDEGEDRAQEGREIMFRSVEGWWSEMDEGAKDEYRQKLSSEGVRRGENHKEGVHDSGHGCGKPLGMHKNFGSGGSMEDRIAGAAAGAIFEGVTGGISDFVEQSSGGQVKLPDSEGRGESFSGAGILGEIGNSLLGGGFKKDETEFENRRHNDDGSYTESRTEYGRSGDRYGQAQYSETRRHDGSERTEYQRYEQDNDGRGYGYQERTETRANYSGGYEERTERRYESNEDSYQESSGWQRQQREDNDGERQHHGGHHGRRDEDRDDSYGRQDDNYGRRDDGYGRQEERQEYGRSDEYGGRQEYGRDERREERREDREDESSVGGFLGGLVDRVGEELSDDRRRRDGDGGGGWFS

SEQ ID NO: 20757 - DNA, 2955 bp, Muscodor strobelii
  misc_feature: SGI EST ID NO. CUFF.48734.0
  misc_feature: Variant of the nucleotide sequence at SEQ ID NO 20755
ctgtggcctcttttttcagtcgcgcagtagtaaagcttttctctcctcgtcactacagcatcatctataacacaaaaatcatttctctgtctatcttttcgcctggagcctgaagataacgtgagggcacaattgccatgatctccttcaaaccatatcctgccctcctcgggctcatccttcttgtcacattcgcccgcccggcgttggccttcggcgctggcaatgttgccggcatttcaaaggttgagggccagaactggcgccatggcgatatcgaagatacgctcctctcaatcttaatggctcgagctgttggagggaagaagttcgataagctgatggtctcacgtgtctacttcgggaactggctgcgcgactactcgcaggctattgatacaggcattgtgaagtctgtgtcttctgaggcagtccgtcttctgctttgcgttctaggcttcatgactttcggctttggttccaaagaatttgaagtcactgccgaccgtctcggatgctatcgacctgaagatcatatcgacaaccccaagaactacgctgataatcaggatgccagacgatatgatcgaagactgagaggtcctattgacgaggaagtcgaattggccgttgatgagagaactggcatgaagaactacattgccaatgagagagatggttcgagccgccatcgacccttcatgacttctgctcagcatgtccgaaatctatttggaaagtgcatccagcttggtcgtagctatcaacgcaacaaccgaaaggccgacttttacgaagctctacggttaatgggaaccggtttacattgtctcgaagatttccttgcgcacagcaactatcttgagttagcattgatcgagatgggcgagagagatgtgttccctcacgttgggcgccgtacacagatgacgattcccaccggccgcgacgaggctagagtttggccattggtcacaggaacttttggaggtgtcgattttctccattcagttgccggcgaagtatcggataagttgacacaaaatgagatccaagagctcgaaggcgctctccaacagaactcgcacaacgataccagctacatcgccgaactactggacaagattcccgacggaatattcggtggcgatgataagaaggaaaagatgaacgatattcaacaaaatgcacagaatgcgcagatggagaacacatcgatctcacctcgtgaccctgaagagttcacccaatatgcgggacaaattttccagcagatcatgcctgcaatcgaattccacgatgaactaatgaagagcatttccgaagccatcgacaaaattccgatcttgcctaagattatcgaacagctagaagatcaaatgtcgatgtgggtttttacaatcattgcgcctttcgtcctacctatcatctcccaagtcaagaatgagctcaataccggctcgcaggagattattgccagcagtgaagccgaacaactcatcgtctggaacgacgaccgctctacggacccaacacactctatgctctccaaggatcacttctccaacatcctaaatgagcccgcgggcaagactgcgagtcaggtcctcaaatgggttgtacctcagctgatggaggcctgggatgatgagggagtggatgtcgacagacttctgacccgcattatcaatggtgtcttgcaccaccctgcccagcgcgatgaaggtgaagatagagcccaagaaggtcgtgaaatcatgttccgtagcgtcgaaggctggtggagtgagatggacgagggcgccaaggatgaatacagacaaaagctgtccagcgagggtgttcgacgcggcgagaaccacaaggaaggcgtccacgactccggtcatggatgtggcaagccattgggtatgcacaagaactttggcagtggtggctccatggaagacagaatcgcaggcgctgcggctggggcaatctttgagggcgtgactggtggcatctcggacttcgtcgaacagtcaagtggtggccaagtcaaacttcccgactcagaaggccgaggtgaatcattcagcggggctggcattctaggcgaaattggcaactcgcttcttggaggaggattcaagaaggacgagaccgaattcgagaacaggcgacacaacgatgatggctcttacacagaaagccgaaccgagtatggacgctccggagaccgctatggccaggcccaatacagcgaaactcgcagacacgacgggagtgagcgtaccgaatatcaacgctacgagcaggacaacgatggtagaggttacgggtaccaagagcgaaccgaaacccgcgccaactacagcggtggctatgaggagcgtactgaacgtcgatatgagagcaatgaagactcttatcaagagagcagtggttggcagcgtcagcagcgtgaggacaatgacggtgagcgccagcaccatggaggccaccacggtcgccgagacgaagaccgagacgatagctatggccgccaagatgacaactatggacgtcgagacgacggatatggccgacaagaggagagacaagagtatggtcgcagtgacgaatatggcggcagacaagagtatggccgagatgagcgtcgcgaggaacgccgtgaagatcgtgaagacgagtcctctgttggcggtttcctaggaggactcgttgaccgagttggcgaggaactgtcggatgaccgccgccgccgtgatggagatggtggtggtggctggttttcttagatagtcgaccactgaacacaagctcagtgtttgccctgtaatcaagatggtacttaatgaagtcgctaggtctctacattgctggttatgcttgaaaattggcgagatacctaaaactatcattgatcaatgtagaaattaactctataatcgcagagcatcggtactactcgat

SEQ ID NO: 20758 - DNA, 1056 bp, Muscodor strobelii
  misc_feature: SGI cDNA ID NO. 567014
  misc_feature: Elevated expression when VOC is produced
  misc_feature: Encodes the peptide sequence at SEQ ID NO 20759
atggctcgccccaagaaagcagacgcactcaagcagcctgcacctgttgctcctgcacccgccatggtccccatgcctactatgcccatccagcaaggccatcaacagcttcagcatcagatgacgccccagcatcacttggctccgcaggctattgcccagcagcctcccatccaccagcagcccatgcagaataccatgcccctccagcagcgcaccattggcgtcgaggagttcgtccgcgttcgcgatagcgtccatcaacgatttaacacaatcattgcgcttatgaagaacttctcggatgacttcgttcgtcagactaacctgctaattggcgaacctgctccgttcgacaacaacactggtgccgctatgcagtctcttgttgccactcttgacggcctcggtggccagctttccgagcttgtccctcacggcgaggagaagaaggagcgcaagaagcgcacccatgatcctaacgctccgaagcgccctctcaccccgtacttcttgtacatgcagaccgctcgacccatcattgctaatgaccttggtcccgatgctcccaagggcgctgtccaggaagagggtcagcgtcgctggtcctccatgacgcccagcgagaagatggcctggaacaacgcttatcagttcaatttacgcctttacaatgctcgagtgcactcgtacaaggccggcaacatggctgctcgtgacatgaccgatgctgatgccatgcaatacgctgatacccacggcattgctcaggccgagatgagcaccgaggagaccttgatgcccaatgaccaggaagctattgcagagcagctgcagatggccaccccttcaatggctcttgacgacggcactaagacccccaagtctaagaacacacgcaagcgaaagagtaccgctggtgacgtcgacgatggtgagagtagcgccgctaagaacgcgacaccggccagtcccgacaagaagcgcaagcgtgcctcaaaggcagccgataccgccgaggagcccaagaagtccgctcgtaagaagaagaactga

SEQ ID NO: 20759 - protein, 351 aa, Muscodor strobelii
  misc_feature: SGI Peptide ID NO. 567014
  misc_feature (163)..(232): Pfam Id: PF00505 Pfam Desc: HMG (high mobility group) box
  misc_feature (72)..(349): NCBI GI: 85116046 Blast Desc: NCU03126 [Neurospora crassa OR74A] gi|28926784|gb|EAA35749.1| [Neurospora crassa OR74A] gi|38567278|emb|CAE76568.1| related to nonhistone chromosomal
  misc_feature (1)..(349): NCBI GI: 46107692 Blast Desc: FG00729.1 [Gibberella zeae PH-1]
  misc_feature (86)..(349): NCBI GI: 116180486 Blast Desc: CHGG_00871 [Chaetomium globosum CBS 148.51] gi|88185168|gb|EAQ92636.1| CHGG_00871 [Chaetomium globosum CBS 148.51]
  misc_feature (57)..(349): NCBI GI: 171687655 Blast Desc: protein product [Podospora anserina] gi|170943789|emb|CAP69441.1| protein product [Podospora anserina]
  misc_feature (1)..(349): NCBI GI: 256734769 Blast Desc: NECHADRAFT_75367 [Nectria haematococca mpVI 77-13-4]
  misc_feature (71)..(351): NCBI GI: 145613848 Blast Desc: MGG_01325 [Magnaporthe grisea 70-15] gi|145020859|gb|EDK04988.1| MGG_01325 [Magnaporthe grisea 70-15]
  misc_feature (74)..(337): NCBI GI: 154295571 Blast Desc: high mobility group protein [Botryotinia fuckeliana B05.10] gi|150843936|gb|EDN19129.1| high mobility group protein [Botryotinia fuckeliana B05.10]
  misc_feature (151)..(337): NCBI GI: 156053870 Blast Desc: SS1G_05783 [Sclerotinia sclerotiorum 1980] gi|154703563|gb|EDO03302.1| SS1G_05783 [Sclerotinia sclerotiorum 1980]
  misc_feature (73)..(234): NCBI GI: 121702881 Blast Desc: HMG box protein, [Aspergillus clavatus NRRL 1] gi|119397848|gb|EAW08279.1| HMG box protein, [Aspergillus clavatus NRRL 1]
  misc_feature (71)..(234): NCBI GI: 119496871 Blast Desc: HMG box protein, [Neosartorya fischeri NRRL 181] gi|119413371|gb|EAW23312.1| HMG box protein, [Neosartorya fischeri NRRL 181]
  misc_feature: Useful for introducing or modulating the production of volatile compounds
MARPKKADALKQPAPVAPAPAMVPMPTMPIQQGHQQLQHQMTPQHHLAPQAIAQQPPIHQQPMQNTMPLQQRTIGVEEFVRVRDSVHQRFNTIIALMKNFSDDFVRQTNLLIGEPAPFDNNTGAAMQSLVATLDGLGGQLSELVPHGEEKKERKKRTHDPNAPKRPLTPYFLYMQTARPIIANDLGPDAPKGAVQEEGQRRWSSMTPSEKMAWNNAYQFNLRLYNARVHSYKAGNMAARDMTDADAMQYADTHGIAQAEMSTEETLMPNDQEAIAEQLQMATPSMALDDGTKTPKSKNTRKRKSTAGDVDDGESSAAKNATPASPDKKRKRASKAADTAEEPKKSARKKKN

SEQ ID NO: 20760 - DNA, 2040 bp, Muscodor strobelii
  misc_feature: SGI EST ID NO. CUFF.49172.1
  misc_feature: Variant of the nucleotide sequence at SEQ ID NO 20758
cacagcagcaggaaaagagtgatcgcgcaaaatcagccaggccacatccaccgtatttagaggtcaccccctcccgcacccagcgcgcgcccgctgtctgacttttctctcatttctcccctgtttccattgtcccattaggtccgtcccccaacggtatgattcaggcccctcctacgccctctgcaattagcaatttgggagacacagagcaccggtaaagccaagcgacacccaacccgccaggctcacaggtaaataagacaaacgccacaaattgccccgaattcctcgtcggcacacacccccgacctgacaccaacacgtcgccaacgcgcgcaccctgctggagcatcgcattgcatcagcaaaacaggttgtacctacaatcaacctgctcccggtataaacaggcccgcacaccccaccacaaccaccctgctatcttcccttatggctcgccccaagaaagcagacgcactcaagcagcctgcacctgttgctcctgcacccgccatggtccccatgcctactatgcccatccagcaaggccatcaacagcttcagcatcagatgacgccccagcatcacttggctccgcaggctattgcccagcagcctcccatccaccagcagcccatgcagaataccatgcccctccagcagcgcaccattggcgtcgaggagttcgtccgcgttcgcgatagcgtccatcaacgatttaacacaatcattgcgcttatgaagaacttctcggatgacttcgttcgtcagactaacctgctaattggcgaacctgctccgttcgacaacaacactggtgccgctatgcagtctcttgttgccactcttgacggcctcggtggccagctttccgagcttgtccctcacggcgaggagaagaaggagcgcaagaagcgcacccatgatcctaacgctccgaagcgccctctcaccccgtacttcttgtacatgcagaccgctcgacccatcattgctaatgaccttggtcccgatgctcccaagggcgctgtccaggaagagggtcagcgtcgctggtcctccatgacgcccagcgagaagatggcctggaacaacgcttatcagttcaatttacgcctttacaatgctcgagtgcactcgtacaaggccggcaacatggctgctcgtgacatgaccgatgctgatgccatgcaatacgctgatacccacggcattgctcaggccgagatgagcaccgaggagaccttgatgcccaatgaccaggaagctattgcagagcagctgcagatggccaccccttcaatggctcttgacgacggcactaagacccccaagtctaagaacacacgcaagcgaaagagtaccgctggtgacgtcgacgatggtgagagtagcgccgctaagaacgcgacaccggccagtcccgacaagaagcgcaagcgtgcctcaaaggcagccgataccgccgaggagcccaagaagtccgctcgtaagaagaagaactgaggtgactcctcattgtgtatctggcttccgttcatattgctttcaccgttaagatacctctttcgttctggaacgcggtctgtgttccattcatggagaatgcctgcgatcaggggcaatgtctgggttctcaactgtcccatattgtctcgtctcggcctccctgtttctgtccattaagtggcagctgtatgaattacgaaaatgtggcatggcccttcggtcatgggataggtcaatgtttctacttgtccctggggttcagggctgtctctttgtaggctggtaggagtttcgggtggtctggttgggctaattcggatttcgttgcgttgttcaacgagtatacatacagaacaatagcacattatagcctgctacaagtttagtgagctgagaatgaacgtttcactgactgtaccctgatgttcgatgttgatgcctgtgaagtgacacaagtcgtataagtgatgactacatgcaaagacgtcgtattccttgattggcataataggtatgaagagtgttcgc

SEQ ID NO: 20761 - DNA, 2511 bp, Muscodor strobelii
  misc_feature: SGI cDNA ID NO. 567015
  misc_feature: Elevated expression when VOC is produced
  misc_feature: Encodes the peptide sequence at SEQ ID NO 20762
atgcatttagtgccgaaagagctcgacaagctcgtcatctctcaattaggactcctcgcacagcgacgtctcgcgcgaggcgtcaagttgaaccacacagaggcgacggctctcatcgcgaataacctccaagagcttatccgcgatggccagcacacggtggctgatctcatggggatcgggtcgactatgctcggccgaagacatgtcttgccatccgttgtgagcacgcttcacgagattcaagtcgagggaacgtttcctacgggcacgtaccttgtgacggtgcataatcccatagcgacggaagatggggacttggcgaaagcattgtatggtagtttcctacccattccatccgctgatatattcccggcctctccagtagctgcgtatgaactcgtcaacacaccaggtgctgttatcgcggtcaaaggtcgggtgaaaatcaatgagggccgacgacgcgtcagggttaaagtgacgagtaagggcgatagaccgattcaagtgggcagtcactaccattttgttgagacgaatcctcagcttgaattcgatcgaaaactcgcatacggatgtaggctggatatccctgccggaacaagtgtgcgcttcgagccgggtgatacgaagactgttacacttgtcgagattggcgggaataaggttattagaggtggtaacaacctcgcaagtgggaaagtagatctcagtcttgcggataatattatcacgaaacttcaacaggctggctttgcccatgcgccagagcctggtgctggattgagcagtgatgtcgaggcttactcacttgatcggagtgcgtatcgcgctatgttcggacctacgacgggtgatcttgtgagacttggagctacggacctctggatcaaggtcgagaaggatctcactgtgtatggtgatgagtgcaaattcggcggtggaaagactctccgggagggtatgggacaaatgagtggatgtccggatggcgagtctcttgatctggttgttactaatgcgctgattgtggactatactggtatctacaaggcagatattggtgtcaagaacggtgtaatcgtcggcatcggaaaagctggaaatccggatgttatggacggcgtgactgagggcatgattgttggtagttgtaccgatgttattgccggcgagggaaagatcatcactgctggtggctttgattcccatattcacttcatttgccctcagcaggcgtatgagtctattgcttcaggtatcacgacgatgcttggcggtggtgttgggcctagtgccgggacatcagcgacgacttgcacgcccggcgcgaactatactcgtcaaatgctacaagcttgtgatgagctgcccgtcaacatcggcatcactggaaaaggcaatgatagcaatcctagcgcgcttcgggagcaggtcagcgctggacaatgcggtctgaagcttcacgaagattggggaactacaccagccgccatcgactcatgccttacagtctgcgatgagatggatgtccaatgtctcatccatacagacactctgaacgaatctggctacgtagagtcgacaatcgcagcattcaagaaccgcacaatccacacctaccacaccgaaggcgcgggtggtggccacgcaccagacatcatctctgtagtcgagcacgagagtgtcttaccatcatctacgaatcccacacgaccgtacacacgaaatactcttgatgaacatctcgatatgctgatggtctgccaccacttgtcccgcgacatacccgaagacgtagcattcgccgagtcccgtatccgcgccgagactatcgctgctgaagacgtgctccacgatgttggagccatcagtatgatgtcctcagactcacaagctatgggtcgctgcggtgaggtcgtcctacgaacttggaacacagcacataagaacaaagtccagcgcggaaaactgcctgaagatgagggcacagacgcagataacttccgcgtcaagcgatatgtcagcaaatataccgtgaatcctgctcgtgcgcagggtatgtcgcatctcatcggcagtattgaagttggaaaactggctgatctcgtgctttgggatccggcgtggttcggtgctaagccggttagtgttgtcaagagtgggttgattgcttgggcgcagatgggtgacccgaacgcctctattcccacagtccaaccggtgatcgcacgccctatgttcgcaccgcttgtcccacagacgagtgtactcttcgtctcacaggctagcatatcaagcggtgtcatcgaatcctatgggctgaagaaacgagtggaagccgtgaagggctgtaggtctgtgtctaagaaggatatggcgtacaatgacacgatgccgaagatgaaggtagatccggagaaatatcatgtagaagctgatggaaagctttgtacggctgagccgtcgacggagttgccgttgagtcaagcttggttcgtttattag

SEQ ID NO: 20762 - protein, 836 aa, Muscodor strobelii
  misc_feature: SGI Peptide ID NO. 567015
  misc_feature (396)..(708): Pfam Id: PF01979 Pfam Desc: Amidohydrolase family
  misc_feature (270)..(390): Pfam Id: PF00449 Pfam Desc: Urease alpha-subunit, N-terminal domain
  misc_feature (137)..(236): Pfam Id: PF00699 Pfam Desc: Urease beta subunit
  misc_feature (1)..(100): Pfam Id: PF00547 Pfam Desc: Urease, gamma subunit
  misc_feature (676)..(706): Pfam Id: PF07969 Pfam Desc: Amidohydrolase family
  misc_feature (1)..(836): NCBI GI: 85116050 Blast Desc: urease [Neurospora crassa OR74A] gi|28926785|gb|EAA35750.1| urease [Neurospora crassa OR74A] gi|38567277|emb|CAE76567.1| urease [Neurospora crassa]
  misc_feature (1)..(836): NCBI GI: 256735484 Blast Desc: NECHADRAFT_65875 [Nectria haematococca mpVI 77-13-4]
  misc_feature (1)..(836): NCBI GI: 156053894 Blast Desc: SS1G_05795 [Sclerotinia sclerotiorum 1980] gi|154703575|gb|EDO03314.1| SS1G_05795 [Sclerotinia sclerotiorum 1980]
  misc_feature (1)..(836): NCBI GI: 46107714 Blast Desc: FG00740.1 [Gibberella zeae PH-1]
  misc_feature (1)..(836): NCBI GI: 154295585 Blast Desc: BC1G_13063 [Botryotinia fuckeliana B05.10] gi|150843943|gb|EDN19136.1| BC1G_13063 [Botryotinia fuckeliana B05.10]
  misc_feature (1)..(836): NCBI GI: 171687653 Blast Desc: protein product [Podospora anserina] gi|170943788|emb|CAP69440.1| protein product [Podospora anserina]
  misc_feature (1)..(836): NCBI GI: 39951363 Blast Desc: MGG_01324 [Magnaporthe grisea 70-15] gi|145020860|gb|EDK04989.1| MGG_01324 [Magnaporthe grisea 70-15]
  misc_feature (1)..(836): NCBI GI: 212540166 Blast Desc: urease Ure [Penicillium marneffei ATCC 18224] gi|210067537|gb|EEA21629.1| urease Ure [Penicillium marneffei ATCC 18224]
  misc_feature (1)..(836): NCBI GI: 259489323 Blast Desc: TPA: urease, urea amidohydrolase alpha subunit (Eurofung) [Aspergillus nidulans FGSC A4]
  misc_feature (1)..(836): NCBI GI: 119496869 Blast Desc: urease, [Neosartorya fischeri NRRL 181] gi|119413370|gb|EAW23311.1| urease, [Neosartorya fischeri NRRL 181]
  misc_feature (1)..(836): SWISSPROT Homolog: EC 3.5.1.5 Urease
  misc_feature: Useful for introducing or modulating the production of volatile compounds
MHLVPKELDKLVISQLGLLAQRRLARGVKLNHTEATALIANNLQELIRDGQHTVADLMGIGSTMLGRRHVLPSVVSTLHEIQVEGTFPTGTYLVTVHNPIATEDGDLAKALYGSFLPIPSADIFPASPVAAYELVNTPGAVIAVKGRVKINEGRRRVRVKVTSKGDRPIQVGSHYHFVETNPQLEFDRKLAYGCRLDIPAGTSVRFEPGDTKTVTLVEIGGNKVIRGGNNLASGKVDLSLADNIITKLQQAGFAHAPEPGAGLSSDVEAYSLDRSAYRAMFGPTTGDLVRLGATDLWIKVEKDLTVYGDECKFGGGKTLREGMGQMSGCPDGESLDLVVTNALIVDYTGIYKADIGVKNGVIVGIGKAGNPDVMDGVTEGMIVGSCTDVIAGEGKIITAGGFDSHIHFICPQQAYESIASGITTMLGGGVGPSAGTSATTCTPGANYTRQMLQACDELPVNIGITGKGNDSNPSALREQVSAGQCGLKLHEDWGTTPAAIDSCLTVCDEMDVQCLIHTDTLNESGYVESTIAAFKNRTIHTYHTEGAGGGHAPDIISVVEHESVLPSSTNPTRPYTRNTLDEHLDMLMVCHHLSRDIPEDVAFAESRIRAETIAAEDVLHDVGAISMMSSDSQAMGRCGEVVLRTWNTAHKNKVQRGKLPEDEGTDADNFRVKRYVSKYTVNPARAQGMSHLIGSIEVGKLADLVLWDPAWFGAKPVSVVKSGLIAWAQMGDPNASIPTVQPVIARPMFAPLVPQTSVLFVSQASISSGVIESYGLKKRVEAVKGCRSVSKKDMAYNDTMPKMKVDPEKYHVEADGKLCTAEPSTELPLSQAWFVY

SEQ ID NO: 20763 - DNA, 2773 bp, Muscodor strobelii
  misc_feature: SGI EST ID NO. CUFF.48740.0
  misc_feature: Variant of the nucleotide sequence at SEQ ID NO 20761
gaaatattcatttcttcatataaatatctagaagtataagacgttcgatgtcgctgtcaattctaaagtgacgttaaaatgcatttagtgccgaaagagctcgacaagctcgtcatctctcaattaggactcctcgcacagcgacgtctcgcgcgaggcgtcaagttgaaccacacagaggcgacggctctcatcgcgaataacctccaagagcttatccgcgatggccagcacacggtggctgatctcatggggatcgggtcgactatgctcggccgaagacatgtcttgccatccgttgtgagcacgcttcacgagattcaagtcgagggaacgtttcctacgggcacgtaccttgtgacggtgcataatcccatagcgacggaagatggggacttggcgaaagcattgtatggtagtttcctacccattccatccgctgatatattcccggcctctccagtagctgcgtatgaactcgtcaacacaccaggtgctgttatcgcggtcaaaggtcgggtgaaaatcaatgagggccgacgacgcgtcagggttaaagtgacgagtaagggcgatagaccgattcaagtgggcagtcactaccattttgttgagacgaatcctcagcttgaattcgatcgaaaactcgcatacggatgtaggctggatatccctgccggaacaagtgtgcgcttcgagccgggtgatacgaagactgttacacttgtcgagattggcgggaataaggttattagaggtggtaacaacctcgcaagtgggaaagtagatctcagtcttgcggataatattatcacgaaacttcaacaggctggctttgcccatgcgccagagcctggtgctggattgagcagtgatgtcgaggcttactcacttgatcggagtgcgtatcgcgctatgttcggacctacgacgggtgatcttgtgagacttggagctacggacctctggatcaaggtcgagaaggatctcactgtgtatggtgatgagtgcaaattcggcggtggaaagactctccgggagggtatgggacaaatgagtggatgtccggatggcgagtctcttgatctggttgttactaatgcgctgattgtggactatactggtatctacaaggcagatattggtgtcaagaacggtgtaatcgtcggcatcggaaaagctggaaatccggatgttatggacggcgtgactgagggcatgattgttggtagttgtaccgatgttattgccggcgagggaaagatcatcactgctggtggctttgattcccatattcacttcatttgccctcagcaggcgtatgagtctattgcttcaggtatcacgacgatgcttggcggtggtgttgggcctagtgccgggacatcagcgacgacttgcacgcccggcgcgaactatactcgtcaaatgctacaagcttgtgatgagctgcccgtcaacatcggcatcactggaaaaggcaatgatagcaatcctagcgcgcttcgggagcaggtcagcgctggacaatgcggtctgaagcttcacgaagattggggaactacaccagccgccatcgactcatgccttacagtctgcgatgagatggatgtccaatgtctcatccatacagacactctgaacgaatctggctacgtagagtcgacaatcgcagcattcaagaaccgcacaatccacacctaccacaccgaaggcgcgggtggtggccacgcaccagacatcatctctgtagtcgagcacgagagtgtcttaccatcatctacgaatcccacacgaccgtacacacgaaatactcttgatgaacatctcgatatgctgatggtctgccaccacttgtcccgcgacatacccgaagacgtagcattcgccgagtcccgtatccgcgccgagactatcgctgctgaagacgtgctccacgatgttggagccatcagtatgatgtcctcagactcacaagctatgggtcgctgcggtgaggtcgtcctacgaacttggaacacagcacataagaacaaagtccagcgcggaaaactgcctgaagatgagggcacagacgcagataacttccgcgtcaagcgatatgtcagcaaatataccgtgaatcctgctcgtgcgcagggtatgtcgcatctcatcggcagtattgaagttggaaaactggctgatctcgtgctttgggatccggcgtggttcggtgctaagccggttagtgttgtcaagagtgggttgattgcttgggcgcagatgggtgacccgaacgcctctattcccacagtccaaccggtgatcgcacgccctatgttcgcaccgcttgtcccacagacgagtgtactcttcgtctcacaggctagcatatcaagcggtgtcatcgaatcctatgggctgaagaaacgagtggaagccgtgaagggctgtaggtctgtgtctaagaaggatatggcgtacaatgacacgatgccgaagatgaaggtagatccggagaaatatcatgtagaagctgatggaaagctttgtacggctgagccgtcgacggagttgccgttgagtcaagcttggttcgtttattagactagaaggaggagctttgagggtggtgtatgagctcagggtccgataactcagaagcttgaacggtcgaggttgggtgtatatgtccgatctacatatcatagttggataattttctcgatgaactatttacctgaagctgagttaattctgataaattgaacggaacaagagtgtctggtgc

SEQ ID NO: 20764 - DNA, 1959 bp, Muscodor strobelii
  misc_feature: SGI cDNA ID NO. 567016
  misc_feature: Reduced expression when VOC is produced
  misc_feature: Encodes the peptide sequence at SEQ ID NO 20765
atgccaccgatgccgagccagaagggcacgggcaagaaaggctcgggcgcaaaaccgccgcgcagccgcaacacaacgcccatggccagcctgcccagcggcgccaatatccccgccgtcgacatcgttgagaccgatttcctgcagctgagactagagacacttcggtccatcattaacgatgacatactcgatcagtcgacatccaatgccgtcatccccgactcgcggagcctcaacgggcttctcggccgtctggagatgctgcacgagatcaacgagcgaagaggaacgtgggccgacaaggctatgcgcctcgtcgcagagcagaagaagaatcacgtggacgatgcgtcgagcaagaagagcctacggaaggaaacatcggaggaaggagagaagaagctgaacaagaagaaacggaaggcagcagacaatctggcacctgccgaacaaaatacggagcggtcatctccactacgcgatcctagcagcaagcctcgcaagctgtcccgcgacaacgattccgccagctcgtccctctctcccgtggctcaggcctcacccggcggcgccatggacgtcgacgacaagatgaagctcgacaagaaggaagacgacgaagaggaagaggagagctctgaagacgagggagcccctcctcgccgcgaggcccctcagttccagaccttcggccccgatccgtccaccttccccgaccccaccgtctacgagatccgcgacgcacgaccgggcatgaccgacgacgagcgccgcgagctgtactccgtcgccgtcttccccaggaccgacctggccgacgagatagcgggcgatcctcccgacaaagacttcagtagtgcgaagcctaccaaccagatcagcttcagcaccttctccacccacatcgatacctacttccgccctctagccgaggaagacctcacctttctgcgagagcgcggcgatcgcaccacgcccttccacatgcccaagcgcggcaagaaacactacaccgagatctgggccgaggaagacaacgccatggctatagactcgggtgcacagggcagagacaagctggctcctaaccaaccgcgtggcaacatcgaccacatggacgatgacgtggccgagacagataagctctcagtcggcccagtcttgtcacgcctcatacaagccatgcgtcctgaggctcgcgcccagccgagcgaggacaaacccatgaccaacggcatcaacggcgacactgaggctaaggaggaagtgaatggtgatatcaatggaattgcgccggaaggggagagtaaggcgatcccgccggccacctacatgaccgagtcttccaccgaggcttggaagaaggctacccatcctaaactggactactcacaatgtgatgagcgtatcagacaggaactgcgccacatagggtttttaccagaggacgggttcgatgccgactatgacggccattacgatgacgaagtctgtgcgcgtcttcgtctcctccaaaaccgtctccgcgagcagattctcgtgaatggctctcggaaagcgagactcatggaccttgtccgggagcggatggcgcatcaggagtaccagaccatcctcgaggatttagatacccaagtccagggcgcgtacctcaagcgtactcgtactatgggcaagagcaagaaggccaagagaccaggcggcgcagggggcggcagtcatgctgccggtgccgctgctggcatggcccggccaggaatcggcgacgtgactaagacgctgatggaacgacgtcgacgatggatagattctatcgggacggtgttcgacgacgagaatctgggcaaggtccctcgcgtgacagaccccgacagcagcattttcaaggctgaggttatgaatgatttccttaagaaagagcgacaagcctgggacgaagaggctgaagaggagtga

SEQ ID NO: 20765 - protein, 652 aa, Muscodor strobelii
  misc_feature: SGI Peptide ID NO. 567016
  misc_feature (1)..(646): NCBI GI: 46107716 Blast Desc: FG00741.1 [Gibberella zeae PH-1]
  misc_feature (1)..(652): NCBI GI: 156053898 Blast Desc: SS1G_05797 [Sclerotinia sclerotiorum 1980] gi|154703577|gb|EDO03316.1| SS1G_05797 [Sclerotinia sclerotiorum 1980]
  misc_feature (1)..(652): NCBI GI: 154295593 Blast Desc: BC1G_13067 [Botryotinia fuckeliana B05.10] gi|150843947|gb|EDN19140.1| BC1G_13067 [Botryotinia fuckeliana B05.10]
  misc_feature (20)..(652): NCBI GI: 85091385 Blast Desc: NCU07383 [Neurospora crassa OR74A] gi|28920265|gb|EAA29640.1| conserved [Neurospora crassa OR74A]
  misc_feature (1)..(642): NCBI GI: 145613846 Blast Desc: MGG_01329 [Magnaporthe grisea 70-15] gi|145020855|gb|EDK04984.1| MGG_01329 [Magnaporthe grisea 70-15]
  misc_feature (123)..(646): NCBI GI: 171695196 Blast Desc: protein product [Podospora anserina] gi|170947840|emb|CAP60004.1| protein product [Podospora anserina]
  misc_feature (1)..(601): NCBI GI: 116182250 Blast Desc: CHGG_01753 [Chaetomium globosum CBS 148.51] gi|88186050|gb|EAQ93518.1| CHGG_01753 [Chaetomium globosum CBS 148.51]
  misc_feature (1)..(646): NCBI GI: 261355155 Blast Desc: transcriptional adapter 3 [Verticillium albo-atrum VaMs.102]
  misc_feature (4)..(650): NCBI GI: 119496861 Blast Desc: transcriptional regulator Ngg1, [Neosartorya fischeri NRRL 181] gi|119413366|gb|EAW23307.1| transcriptional regulator Ngg1, [Neosartorya fischeri NRRL 181]
  misc_feature (1)..(650): NCBI GI: 154281383 Blast Desc: conserved [Ajellomyces capsulatus NAm1] gi|150411683|gb|EDN07071.1| conserved [Ajellomyces capsulatus NAm1]
  misc_feature: Useful for introducing or modulating the production of volatile compounds
MPPMPSQKGTGKKGSGAKPPRSRNTTPMASLPSGANIPAVDIVETDFLQLRLETLRSIINDDILDQSTSNAVIPDSRSLNGLLGRLEMLHEINERRGTWADKAMRLVAEQKKNHVDDASSKKSLRKETSEEGEKKLNKKKRKAADNLAPAEQNTERSSPLRDPSSKPRKLSRDNDSASSSLSPVAQASPGGAMDVDDKMKLDKKEDDEEEEESSEDEGAPPRREAPQFQTFGPDPSTFPDPTVYEIRDARPGMTDDERRELYSVAVFPRTDLADEIAGDPPDKDFSSAKPTNQISFSTFSTHIDTYFRPLAEEDLTFLRERGDRTTPFHMPKRGKKHYTEIWAEEDNAMAIDSGAQGRDKLAPNQPRGNIDHMDDDVAETDKLSVGPVLSRLIQAMRPEARAQPSEDKPMTNGINGDTEAKEEVNGDINGIAPEGESKAIPPATYMTESSTEAWKKATHPKLDYSQCDERIRQELRHIGFLPEDGFDADYDGHYDDEVCARLRLLQNRLREQILVNGSRKARLMDLVRERMAHQEYQTILEDLDTQVQGAYLKRTRTMGKSKKAKRPGGAGGGSHAAGAAAGMARPGIGDVTKTLMERRRRWIDSIGTVFDDENLGKVPRVTDPDSSIFKAEVMNDFLKKERQAWDEEAEEE

SEQ ID NO: 20766 - DNA, 2668 bp, Muscodor strobelii
  misc_feature: SGI EST ID NO. CUFF.48873.1
  misc_feature: Variant of the nucleotide sequence at SEQ ID NO 20764
cgcaagatcaatacaccggtcaaaccttatgaggctaatggccagatttacatggatgtatgaggcagatatcggcactgtaatttggggtgaaggggattggacgacatgacggaagcccgaccttgccaagaaactgtgcgacaaggggtgaaccttccatcatcgacgccacggtcggagagagccaacagccgaaccatccacctatctgcagcttgacgcgcgcatcaatggcaaccgatcgagactcgccactatgatgattcaatagctttctgcttaatacacatgttttttccgccttactagggcgtttccaatactgcgacgatgccaccgatgccgagccagaagggcacgggcaagaaaggctcgggcgcaaaaccgccgcgcagccgcaacacaacgcccatggccagcctgcccagcggcgccaatatccccgccgtcgacatcgttgagaccgatttcctgcagctgagactagagacacttcggtccatcattaacgatgacatactcgatcagtcgacatccaatgccgtcatccccgactcgcggagcctcaacgggcttctcggccgtctggagatgctgcacgagatcaacgagcgaagaggaacgtgggccgacaaggctatgcgcctcgtcgcagagcagaagaagaatcacgtggacgatgcgtcgagcaagaagagcctacggaaggaaacatcggaggaaggagagaagaagctgaacaagaagaaacggaaggcagcagacaatctggcacctgccgaacaaaatacggagcggtcatctccactacgcgatcctagcagcaagcctcgcaagctgtcccgcgacaacgattccgccagctcgtccctctctcccgtggctcaggcctcacccggcggcgccatggacgtcgacgacaagatgaagctcgacaagaaggaagacgacgaagaggaagaggagagctctgaagacgagggagcccctcctcgccgcgaggcccctcagttccagaccttcggccccgatccgtccaccttccccgaccccaccgtctacgagatccgcgacgcacgaccgggcatgaccgacgacgagcgccgcgagctgtactccgtcgccgtcttccccaggaccgacctggccgacgagatagcgggcgatcctcccgacaaagacttcagtagtgcgaagcctaccaaccagatcagcttcagcaccttctccacccacatcgatacctacttccgccctctagccgaggaagacctcacctttctgcgagagcgcggcgatcgcaccacgcccttccacatgcccaagcgcggcaagaaacactacaccgagatctgggccgaggaagacaacgccatggctatagactcgggtgcacagggcagagacaagctggctcctaaccaaccgcgtggcaacatcgaccacatggacgatgacgtggccgagacagataagctctcagtcggcccagtcttgtcacgcctcatacaagccatgcgtcctgaggctcgcgcccagccgagcgaggacaaacccatgaccaacggcatcaacggcgacactgaggctaaggaggaagtgaatggtgatatcaatggaattgcgccggaaggggagagtaaggcgatcccgccggccacctacatgaccgagtcttccaccgaggcttggaagaaggctacccatcctaaactggactactcacaatgtgatgagcgtatcagacaggaactgcgccacatagggtttttaccagaggacgggttcgatgccgactatgacggccattacgatgacgaagtctgtgcgcgtcttcgtctcctccaaaaccgtctccgcgagcagattctcgtgaatggctctcggaaagcgagactcatggaccttgtccgggagcggatggcgcatcaggagtaccagaccatcctcgaggatttagatacccaagtccagggcgcgtacctcaagcgtactcgtactatgggcaagagcaagaaggccaagagaccaggcggcgcagggggcggcagtcatgctgccggtgccgctgctggcatggcccggccaggaatcggcgacgtgactaagacgctgatggaacgacgtcgacgatggatagattctatcgggacggtgttcgacgacgagaatctgggcaaggtccctcgcgtgacagaccccgacagcagcattttcaaggctgaggttatgaatgatttccttaagaaagagcgacaagcctgggacgaagaggctgaagaggagtgagcacgttgttgggccactctatgcatgtttgatgagcaagatgcgaagggcgttggtggacttgcgataccagggacggttcaagccggcgttataggaaaggctttactgtcggactgcgttatgaatttgactacttgctatacaacaagaatagccgacatgcagccataggcacttgcaacaaagacttttcacagagacctgcctattacgcttcgctaagtatagcctacgtttttacatcgtgacttgtagtactccgacgtccaccgcggctggcgatagttggcggcgcaatgaaaccgtaagttgcgcaagaggtcgctgtctagatattgccacaagcttcaatgttagtaattatatggcaaga

SEQ ID NO: 20767 - DNA, 3279 bp, Muscodor strobelii
  misc_feature: SGI cDNA ID NO. 567017
  misc_feature: Encodes the peptide sequence at SEQ ID NO 20768
atgtcaatccagaagatcgcgccgtccgtgatcagtgccaatcaggaggctaacttcgggctggcgacaatcaatatcgacttctcactgctgaaggtcgaggcaccaaaagaattccaggcattaggaacacagctgtcgcaatcgcggcgcaaatcggccgaggacggcactcctcatatgattgcacggcgattaggcgcgctatttcgtcagtgtcttgcgtctacgcctcatcttgtgcgaacatacgggttgcgggcttctgagatcgctgggaatccaaaggtaaaccctaaaccgacgcgcgcacatggagtcttcgctgagcacgttggtatcgatggtacgagcatctgggcagccgcgacatcaggcgccgaggccattgctattcatcttcttgcctgcatgctcgcccgcatgtggtcgcggtccgaggccgttgcgatctggaccgagcttgtcttcgagaggaagaagcagctcagtgcaaccagcgacgttgatccgcagtaccaaatggccatgcatgaagctaagatcgaactcacgcaagaccagctggcgtggtgggattcaagcgcccgcgcatggcttcaggcagcggacgaggctatggctgtgaagcagacccagttaatgctagttctcaataatatctcgctgccggtcaacaccaagccgagactgtatgacaacgtcatgcaggcatggatatcagccatgataacaatcgagagtctcctcaaaggcatgccacaggctgtgacgggcggctcaactctgctaggtttatcatcgtggcatctgtatcccgacatgctagtactggaagaagcgactgtagaaatcaaacaaaacgacaacttggtgaattcggctggaattctaacaattgggttaaacgtcttagcagagaatcagtacggtgtgttttggtcgttgccattgggccacctccgcttctacggaaaccccgtggtatctgaatcgtccctagtaaagcaaggcaaccgcgttagtacatctcaacttatgctcatggctgcagggcggatcacagggaaatggcgcatggacgaatctgctatagcccgatttctagcgtacctcgctgcgctgatgaacccagaccctgagttcaagcctgattatgagtccgatcccgaatctgaaccctatagcccaaataactgggtttcttgtcttgctgaagcagcaacacctctattgtccgagaagagcgtcgatggtaagattggcagacagctaatgaagcttggggcgagaagttgttcaacgttcatcccccagactcggctgattcctcgtctttttggtcttaatgatctggatactttcatctcaaaaatgagacgccccgaggacgcagtgtactatcttcgtctgtcattgcaaaacatggatcgtgatcttcttagagatcggactctgttgattggatatcgccaaggctcaggcacagcacagcactaccgccatcaactcgagttcgcaacggtgtttccagttcgatcccagagccgtaagaggtttcgcgatgaagatgaactcatcaatcagcacccggctcgtcataagcgctggatatatccctttcgcccggttgccgatgggaaacaagtatacgatgagtctaggctagagcatttcatagcacaaaatgaagatgctcacgcctaccaagaaaacaccattgatatggttttatcaggcattttagaatggtacggcggacgcgaagaattagatcaacacgggtttaacgtacccatagcggatgcagcgtctacgtaccaatatcaaagccaatattacaaggtcgaggctgaggacgaattcctgaacggacggactttctgggaccctgtactcgaatttgaagtagtaggtggtagtctggacaccgtagctctgttactaagcaaggtgaaagaggacgaccgccagattcacccatccgcgacacggttcatgccacaggtcgtgcccgacacagtgatcttggaagcgctccaatcgaaaagcggcgacttatgccaaaggaaagttgccaagcacttaaacaagttccttgaaaaagatgcctctctatacgcatcgctgaggaccttgtcgactgcggcgatggtctatgatcaattccccgggaccacagtatctctcaacatcatatcacaacccctgactgaaatgtcatgggtccctgtgagggacaacactcaagcacagatcgttggcgaactcgagttgaagccttacgaagtcgacaggtcatcggtcttcgcgtgtatagctctgtttgaaacaggaaatttagtagtccagccatcggcgctccgacatgtgatggccatggcagtaggggattccattttcatctcttccagtctgatcagcgatccaagtgctaaaacacccccatttggagtagtacgcgttggtggaaatattgggaaatcaggaattgctatgctgatcgcgccacggaaccccctcatgcgccaggctgagatagagaacaggcagttaattaaacacgatgcgtttgacggctttctccatgattctttcagctcgacgacactccatctcggctttacagattacattttgccaatcgacgtaggatcacacgggtcacgcggcttcgagatctatttccttgagtctgtcatttcggtccacgagaaaggagagtgggtcgcagacctggacatccagctggcacttgccaacacgagatggcatggaggtcaaaaaaatatgaagccccctcgtctagggtacgttgaggcttgtgaacatgtgcggcacgctaagtgcagtgcagcggaattcgttggatcgcagtttcttacgagcgtagacgactggaatgagattttagaacctccaaacgcagttggtttggtgagatctctaggcaactggctcggtcgcctcgcggccacgaccgtttgtcttcaaaagggccattccgtactggtgttgccagacaggttatgctggccgtgcataatgaaggcatggaggcgtatatcggtttacgaaccaccttctttcactaacacgagggatatctgtgattccgatgcgtggcaggaaatgccccatcaggagaacgatgagagcttctccagctctatgcgaccccaaaacccaattgctgaagacagcgatgcagatttgaagcagatcgaatcggtattagagaatattactagtgagaggcaactattcctcgtttgttag

SEQ ID NO: 20768 - protein, 1092 aa, Muscodor strobelii
  misc_feature: SGI Peptide ID NO. 567017
  misc_feature (1)..(1002): NCBI GI: 238844746 Blast Desc: conserved [Microsporum canis CBS 113480]
  misc_feature (3)..(1015): NCBI GI: 256731930 Blast Desc: NECHADRAFT_80807 [Nectria haematococca mpVI 77-13-4]
  misc_feature (1)..(998): NCBI GI: 169605903 Blast Desc: SNOG_05984 [Phaeosphaeria nodorum SN15] gi|111065928|gb|EAT87048.1| SNOG_05984 [Phaeosphaeria nodorum SN15]
  misc_feature (2)..(1008): NCBI GI: 261360699 Blast Desc: conserved [Verticillium albo-atrum VaMs.102]
  misc_feature (1)..(1016): NCBI GI: 255945597 Blast Desc: Pc20g10770 [Penicillium chrysogenum Wisconsin 54-1255] gi|211588301|emb|CAP86406.1| Pc20g10770 [Penicillium chrysogenum Wisconsin 54-1255]
  misc_feature (2)..(470): NCBI GI: 46137867 Blast Desc: FG10449.1 [Gibberella zeae PH-1]
  misc_feature (1)..(538): NCBI GI: 115492241 Blast Desc: [Aspergillus terreus NIH2624] gi|114197608|gb|EAU39308.1| [Aspergillus terreus NIH2624]
  misc_feature (1)..(363): NCBI GI: 169604668 Blast Desc: SNOG_05349 [Phaeosphaeria nodorum SN15] gi|160706620|gb|EAT87740.2| SNOG_05349 [Phaeosphaeria nodorum SN15]
  misc_feature (2)..(470): NCBI GI: 145244114 Blast Desc: An11g05770 [Aspergillus niger] gi|134079251|emb|CAK40734.1| [Aspergillus niger]
  misc_feature (1)..(354): NCBI GI: 240111731 Blast Desc: CPC735_011940 [Coccidioides posadasii C735 delta SOWgp]
MSIQKIAPSVISANQEANFGLATINIDFSLLKVEAPKEFQALGTQLSQSRRKSAEDGTPHMIARRLGALFRQCLASTPHLVRTYGLRASEIAGNPKVNPKPTRAHGVFAEHVGIDGTSIWAAATSGAEAIAIHLLACMLARMWSRSEAVAIWTELVFERKKQLSATSDVDPQYQMAMHEAKIELTQDQLAWWDSSARAWLQAADEAMAVKQTQLMLVLNNISLPVNTKPRLYDNVMQAWISAMITIESLLKGMPQAVTGGSTLLGLSSWHLYPDMLVLEEATVEIKQNDNLVNSAGILTIGLNVLAENQYGVFWSLPLGHLRFYGNPVVSESSLVKQGNRVSTSQLMLMAAGRITGKWRMDESAIARFLAYLAALMNPDPEFKPDYESDPESEPYSPNNWVSCLAEAATPLLSEKSVDGKIGRQLMKLGARSCSTFIPQTRLIPRLFGLNDLDTFISKMRRPEDAVYYLRLSLQNMDRDLLRDRTLLIGYRQGSGTAQHYRHQLEFATVFPVRSQSRKRFRDEDELINQHPARHKRWIYPFRPVADGKQVYDESRLEHFIAQNEDAHAYQENTIDMVLSGILEWYGGREELDQHGFNVPIADAASTYQYQSQYYKVEAEDEFLNGRTFWDPVLEFEVVGGSLDTVALLLSKVKEDDRQIHPSATRFMPQVVPDTVILEALQSKSGDLCQRKVAKHLNKFLEKDASLYASLRTLSTAAMVYDQFPGTTVSLNIISQPLTEMSWVPVRDNTQAQIVGELELKPYEVDRSSVFACIALFETGNLVVQPSALRHVMAMAVGDSIFISSSLISDPSAKTPPFGVVRVGGNIGKSGIAMLIAPRNPLMRQAEIENRQLIKHDAFDGFLHDSFSSTTLHLGFTDYILPIDVGSHGSRGFEIYFLESVISVHEKGEWVADLDIQLALANTRWHGGQKNMKPPRLGYVEACEHVRHAKCSAAEFVGSQFLTSVDDWNEILEPPNAVGLVRSLGNWLGRLAATTVCLQKGHSVLVLPDRLCWPCIMKAWRRISVYEPPSFTNTRDICDSDAWQEMPHQENDESFSSSMRPQNPIAEDSDADLKQIESVLENITSERQLFLVC

SEQ ID NO: 20769 - DNA, 926 bp, Muscodor strobelii
  misc_feature: SGI EST ID NO. CUFF.48763.0
  misc_feature: Variant of the nucleotide sequence at SEQ ID NO 20767
ctgggaccctgtactcgaatttgaagtagtaggtggtagtctggacaccgtagctctgttactaagcaaggtgaaagaggacgaccgccagattcacccatccgcgacacggttcatgccacaggtcgtgcccgacacagtgatcttggaagcgctccaatcgaaaagcggcgacttatgccaaaggaaagttgccaagcacttaaacaagttccttgaaaaagatgcctctctatacgcatcgctgaggaccttgtcgactgcggcgatggtctatgatcaattccccgggaccacagtatctctcaacatcatatcacaacccctgactgaaatgtcatgggtccctgtgagggacaacactcaagcacagatcgttggcgaactcgagttgaagccttacgaagtcgacaggtcatcggtcttcgcgtgtatagctctgtttgaaacaggaaatttagtagtccagccatcggcgctccgacatgtgatggccatggcagtaggggattccattttcatctcttccagtctgatcagcgatccaagtgctaaaacacccccatttggagtagtacgcgttggtggaaatattgggaaatcaggaattgctatgctgatcgcgccacggaaccccctcatgcgccaggctgagatagagaacaggcagttaattaaacacgatgcgtttgacggctttctccatgattctttcagctcgacgacactccatctcggctttacagattacattttgccaatcgacgtaggatcacacgggtcacgcggcttcgagatctatttccttgagtctgtcatttcggtccacgagaaaggagagtgggtcgcagacctggacatccagctggcacttgccaacacgagatggcatggaggtcaaaaaaatatgaagccccctcgtctag

SEQ ID NO: 20770 - DNA, 1209 bp, Muscodor strobelii
  misc_feature: SGI cDNA ID NO. 567018
  misc_feature: Encodes the peptide sequence at SEQ ID NO 20771
atggcgccctcgaaagagatcacagatgtcggagagactccctacgccctcgtgcgccccttcctcatgaaggtcgacaacgccattcaactgcgcaacctcgagctcaactccccgcatctggaggaggaggactcagaatgctggctgcgcctgatcaacaaacactttgctgcactccacaaacagcactgcttctcgcccaagaaccccaggtcctggcacagagtctacgctaagtacgagaagatgaacgaagagcagaaggctgccgctgcggagaagctcagagccgggttccagaagattaataacaataagcaactgaacaccagcaaggtcgtcaactacgacagccgcaagctgccccgcctcccgcgcgacgtcaaggtagacgtcggccgcagcaagactacggctaccaagatcagccctgacgagagctccctgcgctggactagcggttccaagaccaaggtcaacactcccaagggcgtgctgaagaaggttatgcgggagaccaaggacatcgccgcgcgcaaccgtctcaacaacttcacccccactggtcagcccaaagtgccccagaaccagatccttcgagcccccgaggccatgattcaggagaagatcaacaaggcgcgacccctaggcggcatccgacctcccgctccgaagccactcagcacgctcaagagtcaagagctcgatgatcgcgaggcaaggctccgcaaggcgaagcagtcaagcaccaagtcctcgcgcgagaacttcatcgacgatgacgacctggaggaattcgacatcaagaacaacgacgcagacacggccggggacgaacatgtcggcctggatgccgacgacctggaggcctacttcgacgaagccgaagacccagctcccgagccgctcgagcagaagaagcccgccaagatccatcaccaacgcggcggtatcttcggccgcaacccgaacagagtcccgaaccctagaagagtcgagaccatcagcgtcagcgccaagtcgtctcccacgccttcttcttcctcgtcgtcgcgcaaagatccgccgaagagtagcagcatgtcgcctcctgctcccagccccaagacggagggctcaccacctacctctggaggagccccgcagcagcgcaagaggaagcctcctgtcgatatcttcatgcctaggaaaaaccagcgacgttga

SEQ ID NO: 20771 - protein, 402 aa, Muscodor strobelii
  misc_feature: SGI Peptide ID NO. 567018
  misc_feature (7)..(268): NCBI GI: 39964847 Blast Desc: MGG_09888 [Magnaporthe grisea 70-15] gi|145013215|gb|EDJ97856.1| MGG_09888 [Magnaporthe grisea 70-15]
  misc_feature (5)..(395): NCBI GI: 256735123 Blast Desc: NECHADRAFT_74646 [Nectria haematococca mpVI 77-13-4]
  misc_feature (7)..(246): NCBI GI: 154318690 Blast Desc: BC1G_02734 [Botryotinia fuckeliana B05.10] gi|150857864|gb|EDN33056.1| BC1G_02734 [Botryotinia fuckeliana B05.10]
  misc_feature (6)..(267): NCBI GI: 261357316 Blast Desc: conserved [Verticillium albo-atrum VaMs.102]
  misc_feature (15)..(235): NCBI GI: 46108470 Blast Desc: FG01117.1 [Gibberella zeae PH-1]
  misc_feature (7)..(257): NCBI GI: 156045351 Blast Desc: SS1G_09864 [Sclerotinia sclerotiorum 1980] gi|154694259|gb|EDN93997.1| SS1G_09864 [Sclerotinia sclerotiorum 1980]
  misc_feature (5)..(395): NCBI GI: 171695992 Blast Desc: protein product [Podospora anserina] gi|170948238|emb|CAP60402.1| protein product [Podospora anserina]
  misc_feature (5)..(207): NCBI GI: 116181904 Blast Desc: CHGG_01580 [Chaetomium globosum CBS 148.51] gi|88185877|gb|EAQ93345.1| CHGG_01580 [Chaetomium globosum CBS 148.51]
  misc_feature (4)..(303): NCBI GI: 85113224 Blast Desc: NCU03308 [Neurospora crassa OR74A] gi|28926269|gb|EAA35249.1| [Neurospora crassa OR74A]
  misc_feature (5)..(251): NCBI GI: 145236014 Blast Desc: protein product [Aspergillus niger] gi|134075104|emb|CAK39115.1| protein product [Aspergillus niger]
MAPSKEITDVGETPYALVRPFLMKVDNAIQLRNLELNSPHLEEEDSECWLRLINKHFAALHKQHCFSPKNPRSWHRVYAKYEKMNEEQKAAAAEKLRAGFQKINNNKQLNTSKVVNYDSRKLPRLPRDVKVDVGRSKTTATKISPDESSLRWTSGSKTKVNTPKGVLKKVMRETKDIAARNRLNNFTPTGQPKVPQNQILRAPEAMIQEKINKARPLGGIRPPAPKPLSTLKSQELDDREARLRKAKQSSTKSSRENFIDDDDLEEFDIKNNDADTAGDEHVGLDADDLEAYFDEAEDPAPEPLEQKKPAKIHHQRGGIFGRNPNRVPNPRRVETISVSAKSSPTPSSSSSSRKDPPKSSSMSPPAPSPKTEGSPPTSGGAPQQRKRKPPVDIFMPRKNQRR

SEQ ID NO: 20772 - DNA, 1314 bp, Muscodor strobelii
  misc_feature: SGI cDNA ID NO. 567020
  misc_feature: Encodes the peptide sequence at SEQ ID NO 20773
atgcggctattgaagatcgagagttcaggggagctcagcttcacaaaagacctagtagctggtcagataccgccgtacgctatcttgtcgcacacctggggcgctgatgaggacgaggtgactcaccatgatttcaacaatcgtttcacgggcacagctcacccaaaacctggttacggaaagcttcttttctgtcgagatatggcacgaaagcatgggctccagtatttttgggccgatacctgctgcatcaacaaggctgatcattctgagctctcagaggctatagtctccatattccaatggtatgcaaactctgagaggtgctttgtgtatctctcagacgttgccgcccctaggcacatgcaaagtcaggcagcgtccgtgtgggagtcatcgttctgccaaagccgatggttcacacgaggctggaccttgcaggagcttcttgccccgaagtcagtcgaattcttttcctacaagggagagcccctaggcaataagaatacactagctgagtgcatacatcgcgccactggcatcccgcttacagctctctggggtgctcctctgctcggttacaccgtcaaggagcgcctgcagtgggcagaacggcgtgaaaccaagaagatcaaagataaagcatactgtctattaggaatttttggtgtatatatgtggctctgttatggagagggagaaaatgcctggaagcgtttacgagcggccatcgatatgcaagatgcgtccaagtacaaacaacaaatccttcaaagcctcgacgctgggagcccgtttacgcgcttcactaacattgccaaggcttcagacgatacatttacttggatcttcgaccccgagtgctcaactcggccgcatgactttctggaatggctaaaatacaaacatggcctcttttgggtcaaaggcatcccaggctcaggcaagagcacattcatcaagttcctgcacggcgcaggtcaacaaaatgaatggaccctgagttatctcaatgcttgggctagtcctaaaagcccgcagattatcacattctacctttggcttaccgatgataccaacatgcaaaacagtttccgaggcttcgcttgtcatctgttgtatcagctcctcgtagaccagactccagaacttgtcttggaccttatcccgctgaatggaggaactttgacacgtactatccgcaattgggatgcagacgagctccagaaattgcttagtgtcgccacaactcgcatcgcgtttgcgtatcctcacgaccagaacgttcaatcgaaagccgccttcgaagaataa

SEQ ID NO: 20773 - protein, 437 aa, Muscodor strobelii
  misc_feature: SGI Peptide ID NO. 567020
  misc_feature (26)..(148): Pfam Id: PF06985 Pfam Desc: Heterokaryon incompatibility protein (HET)
  misc_feature (1)..(385): NCBI GI: 171685532 Blast Desc: protein product [Podospora anserina] gi|170942727|emb|CAP68380.1| protein product [Podospora anserina]
  misc_feature (1)..(385): NCBI GI: 154936832 Blast Desc: HNWD3 [Podospora anserina]
  misc_feature (1)..(385): NCBI GI: 171677728 Blast Desc: protein product [Podospora anserina] gi|154936838|emb|CAL30215.1| HET-E [Podospora anserina] gi|170936932|emb|CAP61591.1| protein product [Podospora anserina]
  misc_feature (1)..(323): NCBI GI: 154294222 Blast Desc: BC1G_13797 [Botryotinia fuckeliana B05.10] gi|150844807|gb|EDN20000.1| BC1G_13797 [Botryotinia fuckeliana B05.10]
  misc_feature (1)..(385): NCBI GI: 17225202 Blast Desc: AF323581_1 beta transducin-like protein HET-E4s [Podospora anserina]
  misc_feature (1)..(385): NCBI GI: 17225206 Blast Desc: AF323583_1 beta transducin-like protein HET-E2C*4 [Podospora anserina]
  misc_feature (1)..(385): NCBI GI: 3023956 Blast Desc: HETE1_PODAN RecName: Full=Vegetative incompatibility protein HET-E-1 gi|607003|gb|AAA85775.1| beta transducin-like protein [Podospora anserina]
  misc_feature (1)..(385): NCBI GI: 17225204 Blast Desc: AF323582_1 beta transducin-like protein HET-E2C [Podospora anserina]
  misc_feature (1)..(385): NCBI GI: 17225208 Blast Desc: AF323584_1 beta transducin-like protein HET-E2C*40 [Podospora anserina]
  misc_feature (1)..(271): NCBI GI: 154312957 Blast Desc: BC1G_05480 [Botryotinia fuckeliana B05.10] gi|150849565|gb|EDN24758.1| BC1G_05480 [Botryotinia fuckeliana B05.10]
MRLLKIESSGELSFTKDLVAGQIPPYAILSHTWGADEDEVTHHDFNNRFTGTAHPKPGYGKLLFCRDMARKHGLQYFWADTCCINKADHSELSEAIVSIFQWYANSERCFVYLSDVAAPRHMQSQAASVWESSFCQSRWFTRGWTLQELLAPKSVEFFSYKGEPLGNKNTLAECIHRATGIPLTALWGAPLLGYTVKERLQWAERRETKKIKDKAYCLLGIFGVYMWLCYGEGENAWKRLRAAIDMQDASKYKQQILQSLDAGSPFTRFTNIAKASDDTFTWIFDPECSTRPHDFLEWLKYKHGLFWVKGIPGSGKSTFIKFLHGAGQQNEWTLSYLNAWASPKSPQIITFYLWLTDDTNMQNSFRGFACHLLYQLLVDQTPELVLDLIPLNGGTLTRTIRNWDADELQKLLSVATTRIAFAYPHDQNVQSKAAFEE

SEQ ID NO: 20774 - DNA, 1294 bp, Muscodor strobelii
  misc_feature: SGI EST ID NO. CUFF.48796.0
  misc_feature: Variant of the nucleotide sequence at SEQ ID NO 20772
gccgagcaggcaaagctgcaggaaagccgcttgaatccatgaacgcgacttcgttcaacaccaaagttgaagatctgaaattctcaatgtgcgcacaggaacaacacaaccaccatgcggctattgaagatcgagagttcaggggagctcagcttcacaaaagacctagtagctggtcagataccgccgtacgctatcttgtcgcacacctggggcgctgatgaggacgaggtgactcaccatgatttcaacaatcgtttcacgggcacagctcacccaaaacctggttacggaaagcttcttttctgtcgagatatggcacgaaagcatgggctccagtatttttgggccgatacctgctgcatcaacaaggctgatcattctgagctctcagaggctatagtctccatattccaatggtatgcaaactctgagaggtgctttgtgtatctctcagacgttgccgcccctaggcacatgcaaagtcaggcagcgtccgtgtgggagtcatcgttctgccaaagccgatggttcacacgaggctggaccttgcaggagcttcttgccccgaagtcagtcgaattcttttcctacaagggagagcccctaggcaataagaatacactagctgagtgcatacatcgcgccactggcatcccgcttacagctctctggggtgctcctctgctcggttacaccgtcaaggagcgcctgcagtgggcagaacggcgtgaaaccaagaagatcaaagataaagcatactgtctattaggaatttttggtgtatatatgtggctctgttatggagagggagaaaatgcctggaagcgtttacgagcggccatcgatatgcaagatgcgtccaagtacaaacaacaaatccttcaaagcctcgacgctgggagcccgtttacgcgcttcactaacattgccaaggcttcagacgatacatttacttggatcttcgaccccgagtgctcaactcggccgcatgactttctggaatggctaaaatacaaacatggcctcttttgggtcaaaggcatcccaggctcaggcaagagcacattcatcaagttcctgcacggcgcaggtcaacaaaatgaatggaccctgagttatctcaatgcttgggctagtcctaaaagcccgcagattatcacattctacctttggcttaccgatgataccaacatgcaaaacagtttccgaggcttcgcttgtcatctgttgtatcagctcctcgtagaccagactccagaacttgtcttggaccttatcccgctgaatggag

SEQ ID NO: 20775 - DNA, 816 bp, Muscodor strobelii
  misc_feature: SGI cDNA ID NO. 567021
  misc_feature: Elevated expression when VOC is produced
  misc_feature: Encodes the peptide sequence at SEQ ID NO 20776
atggattcagacattattttggaacaacgctttgaggcgaaatggaacgaactcaatcacccaatgtttgacaatatcaaatccacaatcctaggcggacctacgacagagtcgaagtccgcaaagctcgctgacgacatcaagtctctctgccaaactgaagactgcaatgggcgccttgcaaacatactctataaagtatggtcgcttctcattgaaatcgcccggtgcatggagccgcaccatcgatcgctagattgtattgtgcaagtcatccaaaacctccgtcagtcggcgggcaacatgccgagtacggaggtgggcaattgggaagacttgccgtcgctagggaggagcatggacgacctgtggatagatcccacacactgttgtgacagtgaattcgatagttgcaagagccagaactcgcttgcagcccggcttgcgacgccctcctatcaagtctggttgaatcgatctatcgagcagctcgcagcagcactcgaggagccactagttgaagatatagctgaggagtgccgcctctgggtagcctgtgaatggctcatacgcgcgggagaaatcatacgacagcatatgacggaagtacaaaggcctgaagattttattccctacgggtctctctatagtggagactctacacattctggaaagcgtcgctgggagttctggaaggctcagcttgccacacttgttggcaatacgggatcatccaaactcgatcaggctaccgtagaccgaatgaaacaggtgcttagcgtcatggagaagcttgatacaactgaagcgaagtag

SEQ ID NO: 20776 - protein, 271 aa, Muscodor strobelii
  misc_feature: SGI Peptide ID NO. 567021
  misc_feature (22)..(271): NCBI GI: 256724127 Blast Desc: NECHADRAFT_86380 [Nectria haematococca mpVI 77-13-4]
  misc_feature (36)..(241): NCBI GI: 238497730 Blast Desc: conserved [Aspergillus flavus NRRL3357] gi|220693374|gb|EED49719.1| conserved [Aspergillus flavus NRRL3357]
  misc_feature (36)..(241): NCBI GI: 169768424 Blast Desc: [Aspergillus oryzae RIB40] gi|83766540|dbj|BAE56680.1| protein product [Aspergillus oryzae]
  misc_feature (60)..(258): NCBI GI: 169786111 Blast Desc: [Aspergillus oryzae RIB40] gi|238507055|ref|XP_002384729.1| conserved [Aspergillus flavus NRRL3357] gi|83776264|dbj|BAE66383.1| protein product oryzae]
  misc_feature (63)..(202): NCBI GI: 238844347 Blast Desc: conserved [Microsporum canis CBS 113480]
  misc_feature (40)..(171): NCBI GI: 171681245 Blast Desc: protein product [Podospora anserina] gi|170940581|emb|CAP65808.1| protein product [Podospora anserina]
  misc_feature (34)..(238): NCBI GI: 119479339 Blast Desc: NFIA_077350 [Neosartorya fischeri NRRL 181] gi|119407852|gb|EAW17801.1| conserved [Neosartorya fischeri NRRL 181]
  misc_feature (34)..(261): NCBI GI: 70997830 Blast Desc: conserved [Aspergillus fumigatus Af293] gi|66851283|gb|EAL91609.1| conserved [Aspergillus fumigatus Af293] gi|159126620|gb|EDP51736.1| conserved [Aspergillus A1163]
  misc_feature (38)..(238): NCBI GI: 121713380 Blast Desc: conserved [Aspergillus clavatus NRRL 1] gi|119402454|gb|EAW12875.1| conserved [Aspergillus clavatus NRRL 1]
  misc_feature (22)..(238): NCBI GI: 46139349 Blast Desc: FG11189.1 [Gibberella zeae PH-1]
  misc_feature: Useful for introducing or modulating the production of volatile compounds
MDSDIILEQRFEAKWNELNHPMFDNIKSTILGGPTTESKSAKLADDIKSLCQTEDCNGRLANILYKVWSLLIEIARCMEPHHRSLDCIVQVIQNLRQSAGNMPSTEVGNWEDLPSLGRSMDDLWIDPTHCCDSEFDSCKSQNSLAARLATPSYQVWLNRSIEQLAAALEEPLVEDIAEECRLWVACEWLIRAGEIIRQHMTEVQRPEDFIPYGSLYSGDSTHSGKRRWEFWKAQLATLVGNTGSSKLDQATVDRMKQVLSVMEKLDTTEAK

SEQ ID NO: 20777 - DNA, 1373 bp, Muscodor strobelii
  misc_feature: SGI EST ID NO. CUFF.48808.0
  misc_feature: Variant of the nucleotide sequence at SEQ ID NO 20775
cgttctttgtccaaagagtatcacaaggctatatcagagtgcgacgtcccacttaaacatgccaaagcttggaacaaagaaaaaatatcccgttggcatgctggtatcgttttcttccatttttatgtatatcaacaaccccatgtgcaatctttcccgtataattccttgtcactacctgctccatcgccttccaatatcttatcactttggcttctactctgtgtccagttgacgccgaactaggatacggcaaaatggattcagacattattttggaacaacgctttgaggcgaaatggaacgaactcaatcacccaatgtttgacaatatcaaatccacaatcctaggcggacctacgacagagtcgaagtccgcaaagctcgctgacgacatcaagtctctctgccaaactgaagactgcaatgggcgccttgcaaacatactctataaagtatggtcgcttctcattgaaatcgcccggtgcatggagccgcaccatcgatcgctagattgtattgtgcaagtcatccaaaacctccgtcagtcggcgggcaacatgccgagtacggaggtgggcaattgggaagacttgccgtcgctagggaggagcatggacgacctgtggatagatcccacacactgttgtgacagtgaattcgatagttgcaagagccagaactcgcttgcagcccggcttgcgacgccctcctatcaagtctggttgaatcgatctatcgagcagctcgcagcagcactcgaggagccactagttgaagatatagctgaggagtgccgcctctgggtagcctgtgaatggctcatacgcgcgggagaaatcatacgacagcatatgacggaagtacaaaggcctgaagattttattccctacgggtctctctatagtggagactctacacattctggaaagcgtcgctgggagttctggaaggctcagcttgccacacttgttggcaatacgggatcatccaaactcgatcaggctaccgtagaccgaatgaaacaggtgcttagcgtcatggagaagcttgatacaactgaagcgaagtaggatttgggagaactagcatgattttagatatgacttctttgtctgataacttcgaggagtctggttaggaaggttgaaggtcggtagatttgcagtcctcgttcttgtttccttctccttttctttttcttttccttccctttgttgggattatctacctagagtgcttctcctttactttcgacagcgacgtcgcattcgaatcaagcattcgcgaagatttaatctcattgccgtagcaagctttatcttatttgaattcaacgcgttattctgtctatttagggccaagtagttgaa

SEQ ID NO: 20778 - DNA, 924 bp, Muscodor strobelii
  misc_feature: SGI cDNA ID NO. 567022
  misc_feature: Reduced expression when VOC is produced
  misc_feature: Encodes the peptide sequence at SEQ ID NO 20779
atgtcgcgcaacccgatcgacgagtacatgtccaaggcgcgcgagatggtccgcaacacgcagcgtggcgccggcttgcctggaggacggcctcccccgggcatggctggcctcgtgctcggcattggtgctttgatcggtggcggtatcttgattcagaactccctgttcaacgtcgacggtggtcacagagccatcaagtacaagaggataagtggtgtctccaaggaaatctacagcgaaggaactcaccttgccatcccctggttcgagtctccagtagtcttcgacgtccgcgccaagcccagaaacatctcctccctcaccggcaccaaggacttgcagatggtcaacataacctgtcgtgtgctgtcccgccctgaggtcaacgccctcccccagatctacagaaccctcggccaagactacgacgagcgtgttttaccttccatcgtgaatgaagtcttgaagagtgtcgtcgcccagttcaacgccagtcagctcattacccagcgtgagagtgtagccagacttgtccgcgacaacctgtcgataagagcagcccgcttcaacatcaagctcgacgatgtctctctcacacacctcgccttctctcccgaattcaccgcagccgtcgaagcgaagcaagtcgcccagcaagaggcccagcgcgctgccttcgtagtagacaaggcaaggcaggagaagcaggccatggtcgtcaaggcacagggtgaggccagatcagcagagctcatcggtgaggccatcaagaagaacaaggcctatctagaactcaagaagattgagaacgcacgagccatcgccacacaactccaggaggctggcggcaggaacaagctcttgctcgactcagagggcctgggcttgaatgtattcggtgatgacgagaggaagaactga

SEQ ID NO: 20779 - protein, 307 aa, Muscodor strobelii
  misc_feature: SGI Peptide ID NO. 567022
  misc_feature (57)..(236): Pfam Id: PF01145 Pfam Desc: SPFH domain / Band 7 family
  misc_feature (1)..(307): NCBI GI: 39964829 Blast Desc: conserved [Magnaporthe grisea 70-15] gi|145013217|gb|EDJ97858.1| conserved [Magnaporthe grisea 70-15]
  misc_feature (2)..(306): NCBI GI: 171695988 Blast Desc: protein product [Podospora anserina] gi|170948236|emb|CAP60400.1| protein product [Podospora anserina]
  misc_feature (32)..(307): NCBI GI: 256734410 Blast Desc: [Nectria haematococca mpVI 77-13-4]
  misc_feature (1)..(307): NCBI GI: 85113233 Blast Desc: prohibitin-2 [Neurospora crassa OR74A] gi|28926271|gb|EAA35251.1| prohibitin-2 [Neurospora crassa OR74A]
  misc_feature (53)..(306): NCBI GI: 116181908 Blast Desc: conserved [Chaetomium globosum CBS 148.51] gi|88185879|gb|EAQ93347.1| conserved [Chaetomium globosum CBS 148.51]
  misc_feature (1)..(307): NCBI GI: 154290310 Blast Desc: prohibitin [Botryotinia fuckeliana B05.10] gi|150847800|gb|EDN22993.1| prohibitin [Botryotinia fuckeliana B05.10]
  misc_feature (54)..(305): NCBI GI: 46108474 Blast Desc: FG01119.1 [Gibberella zeae PH-1]
  misc_feature (1)..(307): NCBI GI: 156045439 Blast Desc: SS1G_09908 [Sclerotinia sclerotiorum 1980] gi|154694303|gb|EDN94041.1| SS1G_09908 [Sclerotinia sclerotiorum 1980]
  misc_feature (41)..(299): NCBI GI: 119193290 Blast Desc: prohibitin [Coccidioides immitis RS] gi|240105775|gb|EER23968.1| SPFH domain / Band 7 family protein [Coccidioides posadasii C735 delta SOWgp]
  misc_feature (21)..(299): NCBI GI: 258574539 Blast Desc: prohibitin-2 [Uncinocarpus reesii 1704] gi|237901717|gb|EEP76118.1| prohibitin-2 [Uncinocarpus reesii 1704]
  misc_feature: Useful for introducing or modulating the production of volatile compounds
MSRNPIDEYMSKAREMVRNTQRGAGLPGGRPPPGMAGLVLGIGALIGGGILIQNSLFNVDGGHRAIKYKRISGVSKEIYSEGTHLAIPWFESPVVFDVRAKPRNISSLTGTKDLQMVNITCRVLSRPEVNALPQIYRTLGQDYDERVLPSIVNEVLKSVVAQFNASQLITQRESVARLVRDNLSIRAARFNIKLDDVSLTHLAFSPEFTAAVEAKQVAQQEAQRAAFVVDKARQEKQAMVVKAQGEARSAELIGEAIKKNKAYLELKKIENARAIATQLQEAGGRNKLLLDSEGLGLNVFGDDERKN

SEQ ID NO: 20780 - DNA, 1338 bp, Muscodor strobelii
  misc_feature: SGI EST ID NO. CUFF.48815.0
  misc_feature: Variant of the nucleotide sequence at SEQ ID NO 20778
gcctgccactctagagctcatcgactgcagctcagctctccacatcccaacattgacttctgtcgagcgcacccccgaccaaaacttcaatactactagcagctttcacgagtagtcgtcggttccttgctcgcccaacatgtcgcgcaacccgatcgacgagtacatgtccaaggcgcgcgagatggtccgcaacacgcagcgtggcgccggcttgcctggaggacggcctcccccgggcatggctggcctcgtgctcggcattggtgctttgatcggtggcggtatcttgattcagaactccctgttcaacgtcgacggtggtcacagagccatcaagtacaagaggataagtggtgtctccaaggaaatctacagcgaaggaactcaccttgccatcccctggttcgagtctccagtagtcttcgacgtccgcgccaagcccagaaacatctcctccctcaccggcaccaaggacttgcagatggtcaacataacctgtcgtgtgctgtcccgccctgaggtcaacgccctcccccagatctacagaaccctcggccaagactacgacgagcgtgttttaccttccatcgtgaatgaagtcttgaagagtgtcgtcgcccagttcaacgccagtcagctcattacccagcgtgagagtgtagccagacttgtccgcgacaacctgtcgataagagcagcccgcttcaacatcaagctcgacgatgtctctctcacacacctcgccttctctcccgaattcaccgcagccgtcgaagcgaagcaagtcgcccagcaagaggcccagcgcgctgccttcgtagtagacaaggcaaggcaggagaagcaggccatggtcgtcaaggcacagggtgaggccagatcagcagagctcatcggtgaggccatcaagaagaacaaggcctatctagaactcaagaagattgagaacgcacgagccatcgccacacaactccaggaggctggcggcaggaacaagctcttgctcgactcagagggcctgggcttgaatgtattcggtgatgacgagaggaagaactgagaggatagaggcttgagctgttgaaaagatggaggtgaggcaaatctccactgtacgtctagaaccaacccataatccgtgtacaaataccgcttgtttttatatgtgggaaatataaggatctcaaaatgaagcattttctggaggttgtgagatttcggcatttttaatgattcaaacgcttgttttcgagcttttgttccgcatgaggtcgacgctatggtatatctgcattctccctcagtttttgcaaaaactaagtctgtccactgccg

SEQ ID NO: 20781 - DNA, 930 bp, Muscodor strobelii
  misc_feature: SGI cDNA ID NO. 567023
  misc_feature: Reduced expression when VOC is produced
  misc_feature: Encodes the peptide sequence at SEQ ID NO 20782
atgtccatcaaaccgccctcgcgcgttgtctttgttggcaacattccttatggtctttccgaagagcagatcaccgacatatttggttccgcgggcacagtccttaacttccgacttgtgtacgatcgtgaaacaggtcggcccaagggctttggttttgctgagtacccagacgcagactcggctgcttctgccgtccgaaacctcaacgaccacgagatcatgggtcgcaagctgcgtgtcgactatagcacagagggccgagtcgacggagacgatgccaacaacatggccaccaactacgcccaagcaaccaatggcaacacatactctgcgcccccgcccgtcgcagttgcaggctcgctccctcctctgccgccgggcaaggagctcccaccaggcatgacagcgaccgatgccatctcgcgcacactcaacaccctcccgccctcgcaactgctcgacatcctgtcccagatgaagtctctcgctaccaccgatcccgcacgcgccaccgagctcctcacccaagccccgcagctctcctacgccatcttccaagctctactgctcatgggcctggtctcgcccgaggccatccagtcagtcttggatactagcgctgctcctcctccacccatggcccagcccgctgcttcatttactccgtctgccgtgcctggctatgcagcaccctcaaccgcgacagtcacaccacccgtctctgcaccctatgcgcctcctcccgcggcatcggcaccccaaaccagttatgcgcagcctgctgctgccgctcccgcggctcaagatcctgaagccctgatgcatgcagttatgaacctgccccaggagacgatcgaccaactgcccgatgctgagagacagcagattctagcacttcgagcaagctttgcagcgcagcggcgctga

SEQ ID NO: 20782 - protein, 309 aa, Muscodor strobelii
  misc_feature: SGI Peptide ID NO. 567023
  misc_feature (10)..(81): Pfam Id: PF00076 Pfam Desc: RNA recognition motif. (a.k.a. RRM, RBD, or RNP domain)
  misc_feature (1)..(307): NCBI GI: 164427135 Blast Desc: NCU03311 [Neurospora crassa OR74A] gi|157071622|gb|EAA35252.2| conserved [Neurospora crassa OR74A]
  misc_feature (1)..(309): NCBI GI: 46105484 Blast Desc: FG00370.1 [Gibberella zeae PH-1]
  misc_feature (1)..(309): NCBI GI: 256735318 Blast Desc: [Nectria haematococca mpVI 77-13-4]
  misc_feature (1)..(309): NCBI GI: 116181910 Blast Desc: CHGG_01583 [Chaetomium globosum CBS 148.51] gi|88185880|gb|EAQ93348.1| CHGG_01583 [Chaetomium globosum CBS 148.51]
  misc_feature (1)..(307): NCBI GI: 171695986 Blast Desc: protein product [Podospora anserina] gi|170948235|emb|CAP60399.1| protein product [Podospora anserina]
  misc_feature (1)..(304): NCBI GI: 154290312 Blast Desc: BC1G_15665 [Botryotinia fuckeliana B05.10] gi|150847801|gb|EDN22994.1| BC1G_15665 [Botryotinia fuckeliana B05.10]
  misc_feature (4)..(304): NCBI GI: 156045437 Blast Desc: SS1G_09907 [Sclerotinia sclerotiorum 1980] gi|154694302|gb|EDN94040.1| SS1G_09907 [Sclerotinia sclerotiorum 1980]
  misc_feature (1)..(205): NCBI GI: 39964821 Blast Desc: MGG_09885 [Magnaporthe grisea 70-15] gi|145013218|gb|EDJ97859.1| MGG_09885 [Magnaporthe grisea 70-15]
  misc_feature (7)..(292): NCBI GI: 261356175 Blast Desc: RNA-binding protein [Verticillium albo-atrum VaMs.102]
  misc_feature (7)..(304): NCBI GI: 255941180 Blast Desc: Pc16g10490 [Penicillium chrysogenum Wisconsin 54-1255] gi|211585982|emb|CAP93719.1| Pc16g10490 [Penicillium chrysogenum Wisconsin 54-1255]
  misc_feature: Useful for introducing or modulating the production of volatile compounds
MSIKPPSRVVFVGNIPYGLSEEQITDIFGSAGTVLNFRLVYDRETGRPKGFGFAEYPDADSAASAVRNLNDHEIMGRKLRVDYSTEGRVDGDDANNMATNYAQATNGNTYSAPPPVAVAGSLPPLPPGKELPPGMTATDAISRTLNTLPPSQLLDILSQMKSLATTDPARATELLTQAPQLSYAIFQALLLMGLVSPEAIQSVLDTSAAPPPPMAQPAASFTPSAVPGYAAPSTATVTPPVSAPYAPPPAASAPQTSYAQPAAAAPAAQDPEALMHAVMNLPQETIDQLPDAERQQILALRASFAAQRR

SEQ ID NO: 20783 - DNA, 1860 bp, Muscodor strobelii
  misc_feature: SGI EST ID NO. CUFF.48845.0
  misc_feature: Variant of the nucleotide sequence at SEQ ID NO 20781
cgattgcaaatcagaggcaaatggagactcactgtgatcttgagcttgatcaagtgccagctgctcgataaggtagctattgagattatcgatacggtctgtggaggtagcagtcagtacagtgttgctactaccaaatcaccgcaacacaaggaccgtcagtttagatgcagacgagcttgattcattagcgcgaccgcaaactacatccgcaaccagcatcataccttaatctgcagtagcacttttcgcatctcacggtcagaacaactcagcttgaacattgagtcaagaccagtcacataattctacagtagaccgacgcattcactgctgcttgacactataagtagctacttattttgatatccccgtgctcgagctcctttgcttcgcagctttgtttgcgaccctttgcgggccttcacgacccattgccctgggtgcgggagcacctgcctccatcgccatgtccatcaaaccgccctcgcgcgttgtctttgttggcaacattccttatggtctttccgaagagcagatcaccgacatatttggttccgcgggcacagtccttaacttccgacttgtgtacgatcgtgaaacaggtcggcccaagggctttggttttgctgagtacccagacgcagactcggctgcttctgccgtccgaaacctcaacgaccacgagatcatgggtcgcaagctgcgtgtcgactatagcacagagggccgagtcgacggagacgatgccaacaacatggccaccaactacgcccaagcaaccaatggcaacacatactctgcgcccccgcccgtcgcagttgcaggctcgctccctcctctgccgccgggcaaggagctcccaccaggcatgacagcgaccgatgccatctcgcgcacactcaacaccctcccgccctcgcaactgctcgacatcctgtcccagatgaagtctctcgctaccaccgatcccgcacgcgccaccgagctcctcacccaagccccgcagctctcctacgccatcttccaagctctactgctcatgggcctggtctcgcccgaggccatccagtcagtcttggatactagcgctgctcctcctccacccatggcccagcccgctgcttcatttactccgtctgccgtgcctggctatgcagcaccctcaaccgcgacagtcacaccacccgtctctgcaccctatgcgcctcctcccgcggcatcggcaccccaaaccagttatgcgcagcctgctgctgccgctcccgcggctcaagatcctgaagccctgatgcatgcagttatgaacctgccccaggagacgatcgaccaactgcccgatgctgagagacagcagattctagcacttcgagcaagctttgcagcgcagcggcgctgaaatatttaacatagaaatccagacttgacagaaattacggtccactagagggatgatccaggtcgcatggcaagcgaaggatagtcacgccagtattggcatcttgagaggcgccttttgagagctagggacaaatctgagcatgactggggaggtgcggtgaaggataagtgcgtctcggtggagaacggtgtaatgtggcttgcaactggacagttgcatccatggatagtgataccatacggaactgggttaaaaggcatggcgtagagagaaagctcgcggtgccatatcaacgcgtatgggcttgattcttcaggcagcaaaaaaagcagagagcaacggtgtccaccttgattggcatttggcatatctgataatgtaacatcatgatgaaatgaaattttaatatcatcaagttgactccagctagcagtttaggaagttcaataatgagtttc

SEQ ID NO: 20784 - DNA, 921 bp, Muscodor strobelii
  misc_feature: SGI cDNA ID NO. 567024
  misc_feature: Encodes the peptide sequence at SEQ ID NO 20785
atgattagtgaggaacaacagccccttgggtcatgcgtagcagcggctatacattcatcaggcaaggtaatatgggagtccgcaaaaggcctatcagatatcattggtggtcagtctcttaacacaaaccaccatttcggtatcgggagcatcaccaaagtattcgtggccatagtcatcctacaactgatcgatgagtccaagctcactttatccacgactgtcggcgaactcttagaacctgaagtatattacaagatcgagaatgcggaagatgcaacgatagagaaacttctgagtcatcatgctggtatcgattcctgggaagacgaaccgtcgtggatagtgagaggaagaggcagagatatccgaaatgatcacatatggggcaaaaccgagccattggactacatccgtcggccgaggattacggcaccggaacctgggaacccttattattccaatacgaactatacgctactcggattgatcatcgaaaagatcacgaacaataccgcagaggcagagatacgccgccgtatattggagcccttggatatggatcaaacatacctcgagggtttcgaggagaggaaacatcctgaacatctaccacgtagatatcactgggcaaccgataccttccgggacgcagccggtgtagctccatcccttccatatgtgaggacccatataatcgacgccacggcttcgaacctatctacatcgtggacagctggtggcatgatctcctccgtccacgatctcctcaaattcgggcctgccctgcgagacggtcgactcttatcaccgaagatgatggcgattctgcaagattggaagccattcccagacgcatcgcgggaaatggggcacggcatcttcaggctgagtcttggtccatcaagtggggagaaatga

SEQ ID NO: 20785 - protein, 306 aa, Muscodor strobelii
  misc_feature: SGI Peptide ID NO. 567024
  misc_feature (1)..(305): Pfam Id: PF00144 Pfam Desc: Beta-lactamase
  misc_feature (1)..(281): Pfam Id: PF00144 Pfam Desc: Beta-lactamase
  misc_feature (11)..(305): NCBI GI: 256720011 Blast Desc: NECHADRAFT_89424 [Nectria haematococca mpVI 77-13-4]
  misc_feature (4)..(285): NCBI GI: 254388584 Blast Desc: alkaline D-peptidase and alkaline D-peptidase fusion [Streptomyces clavuligerus ATCC 27064] gi|197702305|gb|EDY48117.1| alkaline D-peptidase and alkaline
  misc_feature (25)..(296): NCBI GI: 254388585 Blast Desc: alkaline d-peptidase. serine peptidase. merops family s12 [Streptomyces clavuligerus ATCC 27064] gi|197702306|gb|EDY48118.1| alkaline d-peptidase. serine merops
  misc_feature (14)..(274): NCBI GI: 17230148 Blast Desc: serine-type D-Ala-D-Ala carboxypeptidase [Nostoc sp. PCC 7120] gi|17131749|dbj|BAB74355.1| serine-type D-Ala-D-Ala carboxypeptidase [Nostoc sp. PCC 7120]
  misc_feature (25)..(294): NCBI GI: 254389951 Blast Desc: D-alanyl-D-alanine carboxypeptidase [Streptomyces clavuligerus ATCC 27064] gi|197703660|gb|EDY49472.1| D-alanyl-D-alanine carboxypeptidase [Streptomyces clavuligerus
  misc_feature (24)..(274): NCBI GI: 239979466 Blast Desc: alkaline D-peptidase [Streptomyces albus J1074]
  misc_feature (3)..(279): NCBI GI: 229864946 Blast Desc: penicillin-binding protein, beta-lactamase class C [Stackebrandtia nassauensis DSM 44728] gi|229748053|gb|EEP05848.1| penicillin-binding protein, class C
  misc_feature (15)..(300): NCBI GI: 256779201 Blast Desc: alkaline D-peptidase [Streptomyces hygroscopicus ATCC 53653]
  misc_feature (21)..(269): NCBI GI: 271961641 Blast Desc: alkaline D-peptidase [Streptosporangium roseum DSM 43021] gi|270504816|gb|ACZ83094.1| alkaline D-peptidase [Streptosporangium roseum DSM 43021]
  misc_feature (15)..(304): NCBI GI: 270502011 Blast Desc: beta-lactamase [Micromonospora aurantiaca ATCC 27029] gi|270321090|gb|EFA32030.1| beta-lactamase [Micromonospora aurantiaca ATCC 27029]
  misc_feature (24)..(302): SWISSPROT Homolog: EC 3.4.16.4 Serine-type D-Ala-D-Ala carboxypeptidase
MISEEQQPLGSCVAAAIHSSGKVIWESAKGLSDIIGGQSLNTNHHFGIGSITKVFVAIVILQLIDESKLTLSTTVGELLEPEVYYKIENAEDATIEKLLSHHAGIDSWEDEPSWIVRGRGRDIRNDHIWGKTEPLDYIRRPRITAPEPGNPYYSNTNYTLLGLIIEKITNNTAEAEIRRRILEPLDMDQTYLEGFEERKHPEHLPRRYHWATDTFRDAAGVAPSLPYVRTHIIDATASNLSTSWTAGGMISSVHDLLKFGPALRDGRLLSPKMMAILQDWKPFPDASREMGHGIFRLSLGPSSGEK

SEQ ID NO: 20786 - DNA, 2505 bp, Muscodor strobelii
  misc_feature: SGI cDNA ID NO. 567025
  misc_feature: Reduced expression when VOC is produced
  misc_feature: Encodes the peptide sequence at SEQ ID NO 20787
atggccactaatccgtattctcccctcgacaaatcccgccgtcacgactcgcccgcggcgccaggtccttctgggaacccatccgcctccggcagccagacgtccaagaagaagcaccgcgccggccgcaagcacaaacgctccaggaggagatcctttgcagtgcccgcctccgagctcgctagtgacaacggccaggtggactccggtaacacagcctccgccgacagattctacgcgcaggggcggaatctgagcaacacgagcttggacagcgaggccctgttggatcaccgagaccaccaattcccacgcctgaggcgaccctcagctctcgccacgtcctactccatgccgcagcccgtcatgggtcgcctacgatctgggacttcgaggcaacatagccataataacgaagagaccatacaagagaacacacccttgctctccgggtctgggcggctggaccaggagtcacttcggggatatgggctgcgcgaaggccatcatgctttcgaaagatcacgcagtcgtcctcgttcgactcgttcgggcgcatcgagctacaaggtgcgctctggcctcttgttccccggcggacagagccacaatgtcaactatcctccatccatgcccggcacaccccctcttgatccggtcgatcgcatgggcatgagctttggcgatgtcatgatgcgagatgatgcgcactctcgccatgacagccttgacgaaagtaatctcgatccacttctacaacaatcctcattcgagaggagacacaccattgcgctccaggcggaggaagacgtttgctttccccaagatggcatgtccgagattgcctacgatgacctccagcaagcccgagataaagctagtatgcgcactcggcggcgacggcgcggcaaatggcctgaccttagcattctagaggagtggtcgcgtatagaacaagaggaccgcagcgaggtgcgccgtatgaagaagataacagagccacagctagtcaatggtcgtctgcgacccgtccacaagggatggttccgtatcgaagaggatgcaccatatcgtttcacatactttaacgaagaactacagagcactatacacagccaaactatttcggaacttgttcaaccggatgcgagcttcagggaattattcataccagatccgccggttttgtctgactcctcgtctgacgatgacgaagaaccactgatcactgtaacgaacgccggcagaagcagcgagcaaacctcgaagggtccaacaagacagccttcacttgccactacccaaatgaccgacacccaaccagatcttggtgtctcgcccaaacaaggtcctgccgtgtccatgtctccgtccaggaatccctctgatacatccacgcccaagcgggtcaaatcaccacacgccggcatgaagtccccgaccccgccgaacgtcgaagccaaacaggtacgctatggggaacgacctgtatggtggttggatatcttaagtccgacagatgccgaaatgaaggttctggctaaagcattcggcatacatcctctgacctctgaggatatcatgctccaagagcaacgtgaaaaggtcgaactcttccgtaattactactttgtcagttatcggtcattcgatcaagacgaagagtcagagaaccacttagaccccatcaatatgtatgtggtggtgttccgcgaaggtgttctctctttccacttcgaccagaccccacaccctgccaatgtacgccgcagaatacgacaattgaaagacttcatggtactcagctctgattggattagctacgcaattattgatgatatcaccgatgtctaccagcctcttatccaaaccattgaggacgaagtggacgacattgacgaccaaattctacagcttcattcggacgctgatgctgaatcatcaaactcgccgtcaaaacagaggcggaacagcgaccaagagaaaggcgcaaaccaggaagggaacatggacagtggtcgggacatgctccgccgagttggtgattgcaggaagaaagtcatgagcctgtatcgacttttgggaaacaaagcagatgtcatcaaggggtttgctaagcggtgcaatgagcactgggacgttgcgccacggtcagaaattggattgtatctcggtgatattcaggatcatatcgtgaccatgacggctaatttgagtcactatgaattgatcctcgcacgctgccacgccaactacatagcacagatcaacatccgcatgaacgagcgtgctgaggagacgaccaaagttttgaatcgcgtgaccatcctcggtaccatcatgctgccgatgagcttcgtcacgggtctttggggcatgaacgtatgggttccaggccaggaatacgaaggagatctgacgtggttcttctgcattacggctgggttgtttgttttcggtttcctttgcttcactattgcaaagcgggtgtataaaattgtttag

SEQ ID NO: 20787 - protein, 834 aa, Muscodor strobelii
  misc_feature: SGI Peptide ID NO. 567025
  misc_feature (494)..(831): Pfam Id: PF01544 Pfam Desc: CorA-like Mg2+ transporter protein
  misc_feature (494)..(794): Pfam Id: PF01544 Pfam Desc: CorA-like Mg2+ transporter protein
  misc_feature (9)..(834): NCBI GI: 85113241 Blast Desc: NCU03312 [Neurospora crassa OR74A] gi|28926273|gb|EAA35253.1| NCU03312 [Neurospora crassa OR74A]
  misc_feature (1)..(834): NCBI GI: 46105486 Blast Desc: FG00371.1 [Gibberella zeae PH-1]
  misc_feature (36)..(834): NCBI GI: 256734591 Blast Desc: NECHADRAFT_65704 [Nectria haematococca mpVI 77-13-4]
  misc_feature (78)..(834): NCBI GI: 171687391 Blast Desc: protein product [Podospora anserina] gi|170943657|emb|CAP69309.1| protein product [Podospora anserina]
  misc_feature (27)..(834): NCBI GI: 156045331 Blast Desc: SS1G_09854 [Sclerotinia sclerotiorum 1980] gi|154694249|gb|EDN93987.1| SS1G_09854 [Sclerotinia sclerotiorum 1980]
  misc_feature (15)..(834): NCBI GI: 154305064 Blast Desc: BC1G_08622 [Botryotinia fuckeliana B05.10] gi|150853785|gb|EDN28977.1| BC1G_08622 [Botryotinia fuckeliana B05.10]
  misc_feature (36)..(833): NCBI GI: 39964810 Blast Desc: MGG_09884 [Magnaporthe grisea 70-15] gi|145013219|gb|EDJ97860.1| MGG_09884 [Magnaporthe grisea 70-15]
  misc_feature (29)..(834): NCBI GI: 238837751 Blast Desc: manganese resistance protein MNR2 [Microsporum canis CBS 113480]
  misc_feature (55)..(834): NCBI GI: 259479983 Blast Desc: TPA: CorA family metal ion transporter (Eurofung) [Aspergillus nidulans FGSC A4]
  misc_feature (82)..(834): NCBI GI: 226293755 Blast Desc: conserved [Paracoccidioides brasiliensis Pb18]
  misc_feature: Useful for introducing or modulating the production of volatile compounds
MATNPYSPLDKSRRHDSPAAPGPSGNPSASGSQTSKKKHRAGRKHKRSRRRSFAVPASELASDNGQVDSGNTASADRFYAQGRNLSNTSLDSEALLDHRDHQFPRLRRPSALATSYSMPQPVMGRLRSGTSRQHSHNNEETIQENTPLLSGSGRLDQESLRGYGLREGHHAFERSRSRPRSTRSGASSYKVRSGLLFPGGQSHNVNYPPSMPGTPPLDPVDRMGMSFGDVMMRDDAHSRHDSLDESNLDPLLQQSSFERRHTIALQAEEDVCFPQDGMSEIAYDDLQQARDKASMRTRRRRRGKWPDLSILEEWSRIEQEDRSEVRRMKKITEPQLVNGRLRPVHKGWFRIEEDAPYRFTYFNEELQSTIHSQTISELVQPDASFRELFIPDPPVLSDSSSDDDEEPLITVTNAGRSSEQTSKGPTRQPSLATTQMTDTQPDLGVSPKQGPAVSMSPSRNPSDTSTPKRVKSPHAGMKSPTPPNVEAKQVRYGERPVWWLDILSPTDAEMKVLAKAFGIHPLTSEDIMLQEQREKVELFRNYYFVSYRSFDQDEESENHLDPINMYVVVFREGVLSFHFDQTPHPANVRRRIRQLKDFMVLSSDWISYAIIDDITDVYQPLIQTIEDEVDDIDDQILQLHSDADAESSNSPSKQRRNSDQEKGANQEGNMDSGRDMLRRVGDCRKKVMSLYRLLGNKADVIKGFAKRCNEHWDVAPRSEIGLYLGDIQDHIVTMTANLSHYELILARCHANYIAQINIRMNERAEETTKVLNRVTILGTIMLPMSFVTGLWGMNVWVPGQEYEGDLTWFFCITAGLFVFGFLCFTIAKRVYKIV

SEQ ID NO: 20788 - DNA, 4897 bp, Muscodor strobelii
  misc_feature: SGI EST ID NO. CUFF.48824.0
  misc_feature: Variant of the nucleotide sequence at SEQ ID NO 20786
cttcaacgttactaacaatagatcacggtatagtgatattacgatattgttaagttcactcttgccaacagtgcagcaagtctaatgaaggagcttgtagtgtgacgactctgatgcatagtgccatattcattacctctcttctcttcggtctcattgcgagctcgcagcagctaactgcgtagcaaccttcaagaactcagtccttgtaagcacatcaacaccacttgaaggcacaggaccagagtgaacagttcccacgttcgccagaacactgactgccacatcgccctcgtctttgaatagcatgtaagccgtaaatccaagaacaccgccgctatgacctattcatttctccccacttgatggaccaagactcagcctgaagatgccgtgccccatttcccgcgatgcgtctgggaatggcttccaatcttgcagaatcgccatcatcttcggtgataagagtcgaccgtctcgcagggcaggcccgaatttgaggagatcgtggacggaggagatcatgccaccagctgtccacgatgtagataggttcgaagccgtggcgtcgattatatgggtcctcacatatggaagggatggagctacaccggctgcgtcccggaaggtatcggttgcccagtgatatctacgtggtagatgttcaggatgtttcctctcctcgaaaccctcgaggtatgtttgatccatatccaagggctccaatatacggcggcgtatctctgcctctgcggtattgttcgtgatcttttcgatgatcaatccgagtagcgtatagttcgtattggaataataagggttcccaggttccggtgccgtaatcctcggccgacggatgtagtccaatggctcggttttgccccatatgtgatcatttcggatatctctgcctcttcctctcactatccacgacggttcgtcttcccaggaatcgataccagcatgatgactcagaagtttctctatcgttgcatcttccgcattctcgatcttgtaatatacttcaggttctaagagttcgccgacagtcgtggataaagtgagcttggactcatcgatcagttgtaggatgactatggccacgaatactttggtgatgctcccgataccgaaatggtggtttgtgttaagagactgaccaccaatgatatctgataggccttttgcggactcccatattaccttgcctgatgaatgtatagccgctgctacgcctggtgcaccggcgtcaactcagccctgaagtaatgcttcgagctctgcggccagatcttcccggctatgttctgagtgagccatggtcgtatacgcctcttgtcatttgcccaattcgaagaggtgcatgaggtggttggattataggcaatagtgttcgtgttgatatcacagtacatattcacatacattcatcgagatctatcgtcaactaccgacctacatgttccgatttcgctgatattacacatttctaaccatacatgacccaaggggctgttgttcctcactaatcatgtttcacaaggcccaaagagtccagtttttggcccaaaggatatctactgtatttcggggtaagaaggacggatgaggacctcatctgcaactctctctgtgccggagcatctacagcgatatgtcaatgaattcattaatgcacaccaataagacgaccgaattgttccttggagtatgcgatagatcgacgtcccgaatgagacagccgagaacgacagttggaatgcgacggtgcttgtcggggcttggcaatctactggagaggtgcgcacgcgagcaaaatacagcagggggagctctagcttatggagcgggatcgagctacgacgtcaccatacgaattggctggaaatagactttggcccaagcccaaatcgtgtccgtattattcacctttgaattccaccggtagaaggaaaaaattatcttacaaccctattggcatcattgtgttacgaagcacgtgtaattgcggactttcccttttcctgtcgtctgttcctgcatcgccagcctagttcccattcccaattctattcgacattatccccgctgtgtcggacgtcagctgatgggactgcccttgaatgcgctgccatcgtggacaatctgattaccaacagccagacatgtcatagcttagccttgcccattgtcatcggccaccgcctcgagcattctctgctcgtacccaataggactcaggcagacaagtgacactatccgccatggccactaatccgtattctcccctcgacaaatcccgccgtcacgactcgcccgcggcgccaggtccttctgggaacccatccgcctccggcagccagacgtccaagaagaagcaccgcgccggccgcaagcacaaacgctccaggaggagatcctttgcagtgcccgcctccgagctcgctagtgacaacggccaggtggactccggtaacacagcctccgccgacagattctacgcgcaggggcggaatctgagcaacacgagcttggacagcgaggccctgttggatcaccgagaccaccaattcccacgcctgaggcgaccctcagctctcgccacgtcctactccatgccgcagcccgtcatgggtcgcctacgatctgggacttcgaggcaacatagccataataacgaagagaccatacaagagaacacacccttgctctccgggtctgggcggctggaccaggagtcacttcggggatatgggctgcgcgaaggccatcatgctttcgaaagatcacgcagtcgtcctcgttcgactcgttcgggcgcatcgagctacaaggtgcgctctggcctcttgttccccggcggacagagccacaatgtcaactatcctccatccatgcccggcacaccccctcttgatccggtcgatcgcatgggcatgagctttggcgatgtcatgatgcgagatgatgcgcactctcgccatgacagccttgacgaaagtaatctcgatccacttctacaacaatcctcattcgagaggagacacaccattgcgctccaggcggaggaagacgtttgctttccccaagatggcatgtccgagattgcctacgatgacctccagcaagcccgagataaagctagtatgcgcactcggcggcgacggcgcggcaaatggcctgaccttagcattctagaggagtggtcgcgtatagaacaagaggaccgcagcgaggtgcgccgtatgaagaagataacagagccacagctagtcaatggtcgtctgcgacccgtccacaagggatggttccgtatcgaagaggatgcaccatatcgtttcacatactttaacgaagaactacagagcactatacacagccaaactatttcggaacttgttcaaccggatgcgagcttcagggaattattcataccagatccgccggttttgtctgactcctcgtctgacgatgacgaagaaccactgatcactgtaacgaacgccggcagaagcagcgagcaaacctcgaagggtccaacaagacagccttcacttgccactacccaaatgaccgacacccaaccagatcttggtgtctcgcccaaacaaggtcctgccgtgtccatgtctccgtccaggaatccctctgatacatccacgcccaagcgggtcaaatcaccacacgccggcatgaagtccccgaccccgccgaacgtcgaagccaaacaggtacgctatggggaacgacctgtatggtggttggatatcttaagtccgacagatgccgaaatgaaggttctggctaaagcattcggcatacatcctctgacctctgaggatatcatgctccaagagcaacgtgaaaaggtcgaactcttccgtaattactactttgtcagttatcggtcattcgatcaagacgaagagtcagagaaccacttagaccccatcaatatgtatgtggtggtgttccgcgaaggtgttctctctttccacttcgaccagaccccacaccctgccaatgtacgccgcagaatacgacaattgaaagacttcatggtactcagctctgattggattagctacgcaattattgatgatatcaccgatgtctaccagcctcttatccaaaccattgaggacgaagtggacgacattgacgaccaaattctacagcttcattcggacgctgatgctgaatcatcaaactcgccgtcaaaacagaggcggaacagcgaccaagagaaaggcgcaaaccaggaagggaacatggacagtggtcgggacatgctccgccgagttggtgattgcaggaagaaagtcatgagcctgtatcgacttttgggaaacaaagcagatgtcatcaaggggtttgctaagcggtgcaatgagcactgggacgttgcgccacggtcagaaattggattgtatctcggtgatattcaggatcatatcgtgaccatgacggctaatttgagtcactatgaattgatcctcgcacgctgccacgccaactacatagcacagatcaacatccgcatgaacgagcgtgctgaggagacgaccaaagttttgaatcgcgtgaccatcctcggtaccatcatgctgccgatgagcttcgtcacgggtctttggggcatgaacgtatgggttccaggccaggaatacgaaggagatctgacgtggttcttctgcattacggctgggttgtttgttttcggtttcctttgcttcactattgcaaagcgggtgtataaaattgtttagtagtaaaccgtacaagcgcgggaaattggttactagcgcgcaattttaggaatggcaggaatggggtacatatatagtatgcgatgtggaatacgagtaaatagcagaaatatgaaattcaactacca

SEQ ID NO: 20789 - DNA, 1947 bp, Muscodor strobelii
  misc_feature: SGI cDNA ID NO. 567026
  misc_feature: Reduced expression when VOC is produced
  misc_feature: Encodes the peptide sequence at SEQ ID NO 20790
atgcctcagttcgcaaactcgtcccagacgccccggtatacgaccagtagtggtgagaatgggaagcctcgagagattgccgtccttggaggtggaatcactggcttgactgcggctcattacctagcacgccatgctgaaaatgcccatatcaccatatatgaagccagcgacagggtgggaggatggatcaaagcggatcggattgacgtagaagcagacggcgaaaagggtcatgttctgcttcagcaaggtcctcggatgttacggtctggcgccagcgcgactaaatacgatgatctcgtactctacgacgtgcttgccaacctcgacatgggcgacaagatccgacacccagagaccgtttccgacaatcgctacatatattatcccgatcacctcgtgaaactgcccaccaatccgctcgagatgatacagacttggctcagggagcctttattcgatggcactctcaaggccgcatttaattactggactcaaacgaacaagctggcagacccgcgtcaacggtttcggcccttgacggaaaacccgcgagacgaaacggtcttcgagttcgtagagcgtctcacgggtgatgaccggatagctaagaacatgatatccggcatgttccacggcatctacggaggtgacatcacgaagctgagcgctaaacatacgatcctggagaatttctggttgtcacggcagccaggagcgtatactcacgacggaatggactggatgcactggaaagatctgtatctcttgttcgacatgttgaatggtccgaatagactcaaagtgatcgaactggctgagaacgccgttgaaacgaagctacttgcttttgaagacgggctgttgtccctcgtcgagggtctgaagaaagatctagaaagcaaaagcaatgtcacgttcaagtatcaggagcatgtcactgctatcgagcatcaagacggtcaaatattggtctcaacactaagttcaccagagccaaagaaatacgaccacgcaatctgcacactcttttccaggcaactcgcagagatcgcccaaccagcaaattcgcttccatccctcgcggagacacacgccgtgacaatcatgagcgtcacgctctactaccccaacccctccctcctcaccgcaggcggtttcggctatctaatcccctcctcaacaccagacaacaccgaggacgccttgggcgtcctcttcgactcggacctaaaaaccggcgggtccgaagccccaggcacgaaactcaccgttatgctcggcggccactactgggacgaactagacacgctccccagcgagaaaatgggcataacgatggccaaacaagtagtccacaaacacctcggcatccccctagacgaagaagtaacaaccagtgtcagactctgcgaggaatgtctcccgcagcatttcctcggccaccgcgaccggatgaacaaggcgcactacgagctcctatccacattccagggcaaactctccgtcgcagggccaagctacacaaacgtaggcgtcatcccggccatgcgcgcagggtttgacgcagcgatgcgcgtagcgcgtggccacaaacaaccttggtttcccacccccactcccgcctcgccgccagaaacagagggtaaaggacgaggccccatgaattggtgggagaagctgcagaatccagataatgtcctcgaccacgtcggcgccaccggtctagagattttcacagagatggagtgggctactatgtataggggtatgaagagagatatgttgttccgcaagttctctcaacgaggccttaggtttcgtgatgaggaggggaatttcttggatgttgagcggaggtttctgagtaattcgccgacgcagattgtctttgttgttaaggaggatgataagtttgtggttaagggggataataaggagtaa

SEQ ID NO: 20790 - protein, 648 aa, Muscodor strobelii
  misc_feature: SGI Peptide ID NO. 567026
  misc_feature (33)..(529): Pfam Id: PF01593 Pfam Desc: Flavin containing amine oxidoreductase
  misc_feature (33)..(68): Pfam Id: PF01593 Pfam Desc: Flavin containing amine oxidoreductase
  misc_feature (25)..(62): Pfam Id: PF01266 Pfam Desc: FAD dependent oxidoreductase
  misc_feature (25)..(62): Pfam Id: PF07992 Pfam Desc: Pyridine nucleotide-disulphide oxidoreductase
  misc_feature (20)..(531): NCBI GI: 46108798 Blast Desc: FG01281.1 [Gibberella zeae PH-1]
  misc_feature (22)..(531): NCBI GI: 256734336 Blast Desc: NECHADRAFT_74487 [Nectria haematococca mpVI 77-13-4]
  misc_feature (23)..(531): NCBI GI: 164424936 Blast Desc: NCU09113 [Neurospora crassa OR74A] gi|157070721|gb|EAA29086.2| conserved [Neurospora crassa OR74A]
  misc_feature (51)..(528): NCBI GI: 171687351 Blast Desc: protein product [Podospora anserina] gi|170943637|emb|CAP69289.1| protein product [Podospora anserina]
  misc_feature (46)..(530): NCBI GI: 156045693 Blast Desc: SS1G_10041 [Sclerotinia sclerotiorum 1980] gi|154694430|gb|EDN94168.1| SS1G_10041 [Sclerotinia sclerotiorum 1980]
  misc_feature (46)..(532): NCBI GI: 154309481 Blast Desc: BC1G_07211 [Botryotinia fuckeliana B05.10] gi|150852234|gb|EDN27426.1| BC1G_07211 [Botryotinia fuckeliana B05.10]
  misc_feature (9)..(529): NCBI GI: 116181958 Blast Desc: CHGG_01607 [Chaetomium globosum CBS 148.51] gi|88185904|gb|EAQ93372.1| CHGG_01607 [Chaetomium globosum CBS 148.51]
  misc_feature (23)..(502): NCBI GI: 189210740 Blast Desc: protoporphyrinogen oxidase [Pyrenophora tritici-repentis Pt-1C-BFP] gi|187977794|gb|EDU44420.1| protoporphyrinogen oxidase [Pyrenophora tritici-repentis
  misc_feature (24)..(533): NCBI GI: 154274934 Blast Desc: [Ajellomyces capsulatus NAm1] gi|150414758|gb|EDN10120.1| [Ajellomyces capsulatus NAm1]
  misc_feature (24)..(533): NCBI GI: 225557541 Blast Desc: protoporphyrinogen oxidase [Ajellomyces capsulatus G186AR]
  misc_feature (25)..(529): SWISSPROT Homolog: EC 1.3.3.4 Protoporphyrinogen oxidase
  misc_feature: Useful for introducing or modulating the production of volatile compounds
MPQFANSSQTPRYTTSSGENGKPREIAVLGGGITGLTAAHYLARHAENAHITIYEASDRVGGWIKADRIDVEADGEKGHVLLQQGPRMLRSGASATKYDDLVLYDVLANLDMGDKIRHPETVSDNRYIYYPDHLVKLPTNPLEMIQTWLREPLFDGTLKAAFNYWTQTNKLADPRQRFRPLTENPRDETVFEFVERLTGDDRIAKNMISGMFHGIYGGDITKLSAKHTILENFWLSRQPGAYTHDGMDWMHWKDLYLLFDMLNGPNRLKVIELAENAVETKLLAFEDGLLSLVEGLKKDLESKSNVTFKYQEHVTAIEHQDGQILVSTLSSPEPKKYDHAICTLFSRQLAEIAQPANSLPSLAETHAVTIMSVTLYYPNPSLLTAGGFGYLIPSSTPDNTEDALGVLFDSDLKTGGSEAPGTKLTVMLGGHYWDELDTLPSEKMGITMAKQVVHKHLGIPLDEEVTTSVRLCEECLPQHFLGHRDRMNKAHYELLSTFQGKLSVAGPSYTNVGVIPAMRAGFDAAMRVARGHKQPWFPTPTPASPPETEGKGRGPMNWWEKLQNPDNVLDHVGATGLEIFTEMEWATMYRGMKRDMLFRKFSQRGLRFRDEEGNFLDVERRFLSNSPTQIVFVVKEDDKFVVKGDNKE

SEQ ID NO: 20791 - DNA, 2353 bp, Muscodor strobelii
  misc_feature: SGI EST ID NO. CUFF.48828.0
  misc_feature: Variant of the nucleotide sequence at SEQ ID NO 20789
tttgtcgcttgtaatgccgcaactcacgacatgatagttcggactttcgtcgccattgcacacgtgcaatgatttctcaacgcccggaggacgtcttcattaggcttctgagaactgcttatagccatgcgactcatcaattgacgccgcgccgtctcagggctttccccagcatctccggaacgcgatgcctcagttcgcaaactcgtcccagacgccccgtgcgatccccaattggtgacgaaaggctccttgggctccagatatcgaaaagcggcttaataaggcaagggtatacgaccagtagtggtgagaatgggaagcctcgagagattgccgtccttggaggtggaatcactggcttgactgcggctcattacctagcacgccatgctgaaaatgcccatatcaccatatatgaagccagcgacagggtgggaggatggatcaaagcggatcggattgacgtagaagcagacggcgaaaagggtcatgttctgcttcagcaaggtcctcggatgttacggtctggcgccagcgcgactaaatacgatgatctcgtactctacgacgtgcttgccaacctcgacatgggcgacaagatccgacacccagagaccgtttccgacaatcgctacatatattatcccgatcacctcgtgaaactgcccaccaatccgctcgagatgatacagacttggctcagggagcctttattcgatggcactctcaaggccgcatttaattactggactcaaacgaacaagctggcagacccgcgtcaacggtttcggcccttgacggaaaacccgcgagacgaaacggtcttcgagttcgtagagcgtctcacgggtgatgaccggatagctaagaacatgatatccggcatgttccacggcatctacggaggtgacatcacgaagctgagcgctaaacatacgatcctggagaatttctggttgtcacggcagccaggagcgtatactcacgacggaatggactggatgcactggaaagatctgtatctcttgttcgacatgttgaatggtccgaatagactcaaagtgatcgaactggctgagaacgccgttgaaacgaagctacttgcttttgaagacgggctgttgtccctcgtcgagggtctgaagaaagatctagaaagcaaaagcaatgtcacgttcaagtatcaggagcatgtcactgctatcgagcatcaagacggtcaaatattggtctcaacactaagttcaccagagccaaagaaatacgaccacgcaatctgcacactcttttccaggcaactcgcagagatcgcccaaccagcaaattcgcttccatccctcgcggagacacacgccgtgacaatcatgagcgtcacgctctactaccccaacccctccctcctcaccgcaggcggtttcggctatctaatcccctcctcaacaccagacaacaccgaggacgccttgggcgtcctcttcgactcggacctaaaaaccggcgggtccgaagccccaggcacgaaactcaccgttatgctcggcggccactactgggacgaactagacacgctccccagcgagaaaatgggcataacgatggccaaacaagtagtccacaaacacctcggcatccccctagacgaagaagtaacaaccagtgtcagactctgcgaggaatgtctcccgcagcatttcctcggccaccgcgaccggatgaacaaggcgcactacgagctcctatccacattccagggcaaactctccgtcgcagggccaagctacacaaacgtaggcgtcatcccggccatgcgcgcagggtttgacgcagcgatgcgcgtagcgcgtggccacaaacaaccttggtttcccacccccactcccgcctcgccgccagaaacagagggtaaaggacgaggccccatgaattggtgggagaagctgcagaatccagataatgtcctcgaccacgtcggcgccaccggtctagagattttcacagagatggagtgggctactatgtataggggtatgaagagagatatgttgttccgcaagttctctcaacgaggccttaggtttcgtgatgaggaggggaatttcttggatgttgagcggaggtttctgagtaattcgccgacgcagattgtctttgttgttaaggaggatgataagtttgtggttaagggggataataaggagtaagttgggggtttgaagcgaagcgagtatgtatatatcatctatatacgcgagagtaaatttaggagtgggcgagcttgtgtatagagaaaagtagagtatttggcattaaaagatgaacatatcggatttctcctggcagccctgtcttg

SEQ ID NO: 20792 - DNA, 1515 bp, Muscodor strobelii
  misc_feature: SGI cDNA ID NO. 567027
  misc_feature: Reduced expression when VOC is produced
  misc_feature: Encodes the peptide sequence at SEQ ID NO 20793
atgtcgatcgagatcgagctcgcgctcggcactccgctggccgatgcccttaacaaggccatccagcccaagttggaggaagtcggctgggccgcctccgccgaagatgctgccctgtcagagtacatcgtcctcatggtcgtcaaccgcaagtcacaagacgagatcgccgccgagctggccggagacctgctcggcctcggccccgaagaccctgccgccgtcaacttcgcccagtggctcttcgagcagatgtacgccctcaatgaccagataaacggagccgcgcccggggcccttgcctccgcggacgctatggagcaagacaccgacatgggcgcatctactgatagcccccaaatcgatgctccgactggccctaaagctatgagaaatggaaatggaaatggcactatgcgaggaggtcgcgagaagcgcatgttcggccagatgaacaaagccatggaccggagccacgactccgtgttacatcgtgttcgcggtaacggcaacgggcgcatcgatgcacacagccgcgcccctccgacaggtccgagagggcgtggaaacaaccgcatgaacaacaaccgcgctgccggaattgctgccggcttgaatcagatggccaacaacggcatgcccccaatgcccggtccgcaagggatgaacggcatgaatgacatgagctggatgatgcccggcgggaaccagcagcaggagcttttccatcttcttcagcaacagaatcagatgatggcgcagttacagcaacagatcgctcaacagaaccagaacggcggcgggcgcaatggcaggtcactatttgatcgcactcagaaccctagaggtggcagacgaggaggctttcacaataacaatggcaggtctcacaataacggcgactccgcaagggcctcagaagccggcgccgacggcgaggatgtcgacatgtcacagcccaaagcagagcctcccaaccccgagacgaccgtctgcaaattcaacctggcctgcaccaacaaagattgcaagtttgcccaccagtcgccctctgctccgcccaataccacggtggatgtcaatgacgtctgctccttcggcgccgcctgcaaaaactggaaatgcgttggccgtcacccctcgccagctatcaagcgcgctcaccaggttgagcaagagtgcaagttctatcccaactgcacgaacaacaactgcccattcaagcatccggatatgcctgtttgccgcaacggaggcgactgcaacgtcgagggctgcaagttcacccatctgcaaaccatgtgcaagtacaagccatgcaagaaccgcttctgcccctacaagcacgaagatggccagcgaggaacgttcccggacaaggtctggacggcagacggaagcaagaatcatgtatcggaccggaagtttgtggatggtgcagccgaggaggttgtcatccctgggagaggaggacactacgacgatggacgcaaccatcacttagtcatgatgtga

SEQ ID NO: 20793 - protein, 504 aa, Muscodor strobelii
  misc_feature: SGI Peptide ID NO. 567027
  misc_feature (3)..(488): NCBI GI: 256734335 Blast Desc: NECHADRAFT_74486 [Nectria haematococca mpVI 77-13-4]
  misc_feature (3)..(496): NCBI GI: 39965209 Blast Desc: MGG_09923 [Magnaporthe grisea 70-15] gi|145013175|gb|EDJ97816.1| MGG_09923 [Magnaporthe grisea 70-15]
  misc_feature (3)..(503): NCBI GI: 171687349 Blast Desc: protein product [Podospora anserina] gi|170943636|emb|CAP69288.1| protein product [Podospora anserina]
  misc_feature (3)..(496): NCBI GI: 156045691 Blast Desc: SS1G_10040 [Sclerotinia sclerotiorum 1980] gi|154694429|gb|EDN94167.1| SS1G_10040 [Sclerotinia sclerotiorum 1980]
  misc_feature (3)..(496): NCBI GI: 154309483 Blast Desc: BC1G_07212 [Botryotinia fuckeliana B05.10] gi|150852235|gb|EDN27427.1| BC1G_07212 [Botryotinia fuckeliana B05.10]
  misc_feature (3)..(489): NCBI GI: 46108800 Blast Desc: FG01282.1 [Gibberella zeae PH-1]
  misc_feature (3)..(503): NCBI GI: 116181960 Blast Desc: CHGG_01608 [Chaetomium globosum CBS 148.51] gi|88185905|gb|EAQ93373.1| CHGG_01608 [Chaetomium globosum CBS 148.51]
  misc_feature (3)..(488): NCBI GI: 70991771 Blast Desc: nuclear polyadenylated RNA-binding protein Nab2 [Aspergillus fumigatus Af293] gi|66848367|gb|EAL88696.1| nuclear polyadenylated RNA-binding protein Nab2, [Aspergillus fumigatus
  misc_feature (2)..(487): NCBI GI: 226282648 Blast Desc: conserved [Paracoccidioides brasiliensis Pb01]
  misc_feature (2)..(487): NCBI GI: 225681107 Blast Desc: conserved [Paracoccidioides brasiliensis Pb03]
  misc_feature: Useful for introducing or modulating the production of volatile compounds
MSIEIELALGTPLADALNKAIQPKLEEVGWAASAEDAALSEYIVLMVVNRKSQDEIAAELAGDLLGLGPEDPAAVNFAQWLFEQMYALNDQINGAAPGALASADAMEQDTDMGASTDSPQIDAPTGPKAMRNGNGNGTMRGGREKRMFGQMNKAMDRSHDSVLHRVRGNGNGRIDAHSRAPPTGPRGRGNNRMNNNRAAGIAAGLNQMANNGMPPMPGPQGMNGMNDMSWMMPGGNQQQELFHLLQQQNQMMAQLQQQIAQQNQNGGGRNGRSLFDRTQNPRGGRRGGFHNNNGRSHNNGDSARASEAGADGEDVDMSQPKAEPPNPETTVCKFNLACTNKDCKFAHQSPSAPPNTTVDVNDVCSFGAACKNWKCVGRHPSPAIKRAHQVEQECKFYPNCTNNNCPFKHPDMPVCRNGGDCNVEGCKFTHLQTMCKYKPCKNRFCPYKHEDGQRGTFPDKVWTADGSKNHVSDRKFVDGAAEEVVIPGRGGHYDDGRNHHLVMM

SEQ ID NO: 20794 - DNA, 2219 bp, Muscodor strobelii
  misc_feature: SGI EST ID NO. CUFF.48831.0
  misc_feature: Variant of the nucleotide sequence at SEQ ID NO 20792
gaatcattgcgtgcacctggctctgcatccactccatctttattccatatatccattcttctcacaacatctcgcttcttgttctgtgcaacaactgcttcgtcgaccttctatgcaccaagcgacctgagcggatccaataaaggccttgttctcgctgactctgggactgcggccgtacttcaaccctcagcgcgtcgagcagacgtcgccacagccctcaaccccgatccagcgaccgcaatcagcgtcacacctcccaaccacacagctacaacaacaccgcgctcaacaccacacctgacgtgacagcgacgatcgacttgcttcagcctcggtcgcccacgtcgcatcttatctctttgtccgcgtctccccatctgcccctcctttcatctacagcgacaacgacagagacaacatccacctccatcaattccacacctctcatcgccttcttccaacgccctcacccttagccaccatgtcgatcgagatcgagctcgcgctcggcactccgctggccgatgcccttaacaaggccatccagcccaagttggaggaagtcggctgggccgcctccgccgaagatgctgccctgtcagagtacatcgtcctcatggtcgtcaaccgcaagtcacaagacgagatcgccgccgagctggccggagacctgctcggcctcggccccgaagaccctgccgccgtcaacttcgcccagtggctcttcgagcagatgtacgccctcaatgaccagataaacggagccgcgcccggggcccttgcctccgcggacgctatggagcaagacaccgacatgggcgcatctactgatagcccccaaatcgatgctccgactggccctaaagctatgagaaatggaaatggaaatggcactatgcgaggaggtcgcgagaagcgcatgttcggccagatgaacaaagccatggaccggagccacgactccgtgttacatcgtgttcgcggtaacggcaacgggcgcatcgatgcacacagccgcgcccctccgacaggtccgagagggcgtggaaacaaccgcatgaacaacaaccgcgctgccggaattgctgccggcttgaatcagatggccaacaacggcatgcccccaatgcccggtccgcaagggatgaacggcatgaatgacatgagctggatgatgcccggcgggaaccagcagcaggagcttttccatcttcttcagcaacagaatcagatgatggcgcagttacagcaacagatcgctcaacagaaccagaacggcggcgggcgcaatggcaggtcactatttgatcgcactcagaaccctagaggtggcagacgaggaggctttcacaataacaatggcaggtctcacaataacggcgactccgcaagggcctcagaagccggcgccgacggcgaggatgtcgacatgtcacagcccaaagcagagcctcccaaccccgagacgaccgtctgcaaattcaacctggcctgcaccaacaaagattgcaagtttgcccaccagtcgccctctgctccgcccaataccacggtggatgtcaatgacgtctgctccttcggcgccgcctgcaaaaactggaaatgcgttggccgtcacccctcgccagctatcaagcgcgctcaccaggttgagcaagagtgcaagttctatcccaactgcacgaacaacaactgcccattcaagcatccggatatgcctgtttgccgcaacggaggcgactgcaacgtcgagggctgcaagttcacccatctgcaaaccatgtgcaagtacaagccatgcaagaaccgcttctgcccctacaagcacgaagatggccagcgaggaacgttcccggacaaggtctggacggcagacggaagcaagaatcatgtatcggaccggaagtttgtggatggtgcagccgaggaggttgtcatccctgggagaggaggacactacgacgatggacgcaaccatcacttagtcatgatgtgatgcgggcgatgaatttctgcacgattgcattgtatattatgacttgacccacgcagagaatggatctctagcgttgattttggcgttgggtggtcattgtaaataaggagtttcagacggtcatgaaatgggggaaaagtaaagggcttgataatatacccaacgcatgtttggcgctcgcctacctaccaacgcacatgtgtatcctcgtacaacgtgc

SEQ ID NO: 20795 - DNA, 825 bp, Muscodor strobelii
  misc_feature: SGI cDNA ID NO. 567028
  misc_feature: Reduced expression when VOC is produced
  misc_feature: Encodes the peptide sequence at SEQ ID NO 20796
atgatgcccggcgggaaccagcagcaggagcttttccatcttcttcagcaacagaatcagatgatggcgcagttacagcaacagatcgctcaacagaaccagaacggcggcgggcgcaatggcaggtcactatttgatcgcactcagaaccctagaggtggcagacgaggaggctttcacaataacaatggcaggtctcacaataacggcgactccgcaagggcctcagaagccggcgccgacggcgaggatgtcgacatgtcacagcccaaagcagagcctcccaaccccgagacgaccgtctgcaaattcaacctggcctgcaccaacaaagattgcaagtttgcccaccagtcgccctctgctccgcccaataccacggtggatgtcaatgacgtctgctccttcggcgccgcctgcaaaaactggaaatgcgttggccgtcacccctcgccagctatcaagcgcgctcaccaggttgagcaagagtgcaagttctatcccaactgcacgaacaacaactgcccattcaagcatccggatatgcctgtttgccgcaacggaggcgactgcaacgtcgagggctgcaagttcacccatctgcaaaccatgtgcaagtacaagccatgcaagaaccgcttctgcccctacaagcacgaagatggccagcgaggaacgttcccggacaaggtctggacggcagacggaagcaagaatcatgtatcggaccggaagtttgtggatggtgcagccgaggaggttgtcatccctgggagaggaggacactacgacgatggacgcaaccatcacttagtcatgatgtga

SEQ ID NO: 20796 - protein, 274 aa, Muscodor strobelii
  misc_feature: SGI Peptide ID NO. 567028
  misc_feature (1)..(258): NCBI GI: 256734335 Blast Desc: NECHADRAFT_74486 [Nectria haematococca mpVI 77-13-4]
  misc_feature (44)..(258): NCBI GI: 164424936 Blast Desc: NCU09113 [Neurospora crassa OR74A] gi|157070721|gb|EAA29086.2| conserved [Neurospora crassa OR74A]
  misc_feature (10)..(273): NCBI GI: 171687349 Blast Desc: protein product [Podospora anserina] gi|170943636|emb|CAP69288.1| protein product [Podospora anserina]
  misc_feature (7)..(266): NCBI GI: 156045691 Blast Desc: SS1G_10040 [Sclerotinia sclerotiorum 1980] gi|154694429|gb|EDN94167.1| SS1G_10040 [Sclerotinia sclerotiorum 1980]
  misc_feature (4)..(266): NCBI GI: 39965209 Blast Desc: MGG_09923 [Magnaporthe grisea 70-15] gi|145013175|gb|EDJ97816.1| MGG_09923 [Magnaporthe grisea 70-15]
  misc_feature (8)..(258): NCBI GI: 115398798 Blast Desc: conserved [Aspergillus terreus NIH2624] gi|114191871|gb|EAU33571.1| conserved [Aspergillus terreus NIH2624]
  misc_feature (7)..(266): NCBI GI: 154309483 Blast Desc: BC1G_07212 [Botryotinia fuckeliana B05.10] gi|150852235|gb|EDN27427.1| BC1G_07212 [Botryotinia fuckeliana B05.10]
  misc_feature (84)..(273): NCBI GI: 116181960 Blast Desc: CHGG_01608 [Chaetomium globosum CBS 148.51] gi|88185905|gb|EAQ93373.1| CHGG_01608 [Chaetomium globosum CBS 148.51]
  misc_feature (8)..(272): NCBI GI: 119469613 Blast Desc: nuclear polyadenylated RNA-binding protein Nab2, [Neosartorya fischeri NRRL 181] gi|119406113|gb|EAW16064.1| nuclear polyadenylated RNA-binding protein Nab2, [Neosartorya
  misc_feature (8)..(258): NCBI GI: 70991771 Blast Desc: nuclear polyadenylated RNA-binding protein Nab2 [Aspergillus fumigatus Af293] gi|66848367|gb|EAL88696.1| nuclear polyadenylated RNA-binding protein Nab2, [Aspergillus fumigatus
  misc_feature: Useful for introducing or modulating the production of volatile compounds
MMPGGNQQQELFHLLQQQNQMMAQLQQQIAQQNQNGGGRNGRSLFDRTQNPRGGRRGGFHNNNGRSHNNGDSARASEAGADGEDVDMSQPKAEPPNPETTVCKFNLACTNKDCKFAHQSPSAPPNTTVDVNDVCSFGAACKNWKCVGRHPSPAIKRAHQVEQECKFYPNCTNNNCPFKHPDMPVCRNGGDCNVEGCKFTHLQTMCKYKPCKNRFCPYKHEDGQRGTFPDKVWTADGSKNHVSDRKFVDGAAEEVVIPGRGGHYDDGRNHHLVMM

SEQ ID NO: 20797 - DNA, 2219 bp, Muscodor strobelii; identical to SEQ ID NO: 20794
  misc_feature: SGI EST ID NO. CUFF.48831.0
  misc_feature: Variant of the nucleotide sequence at SEQ ID NO 20795

SEQ ID NO: 20798 - DNA, 1725 bp, Muscodor strobelii
  misc_feature: SGI cDNA ID NO. 567029
  misc_feature: Encodes the peptide sequence at SEQ ID NO 20799
atgacgctgcacccgctagcactgtcctggcaagcccgagcgactgcaaagagaactgacacactggagaagatcccgcccaagtggagactctgtgccgagcagctggccgatgcaaagaagcagagagacctcactggtccctacatccaacaattcctcaccggcgatgacatatccatcatctccaaagacagcgttcaaattgtcgaggccatcaagtgcggccacctaaccgccgtccaggtcacgaacgcattctgcaaaaccgcagccatcgcccatcagattaacaattgccttcacgagattttcttcgatcaagctcttaagagagcagaatggcttgattcccagttcgccagctctggcgttattgggccgctccatggcctacccatcagtatgaaagatcagtttcacgtcaagggagtcgacacaaccatgggctatgtcggatggattggaagtaacctgggcattaaggatccggaaatggcgcatcaaatcgaaagtcagctgaccacggagctcctgtcactgggtgccgtgttgtactgcaagaccagcctgccccaaaccctattgttcggcgagaccaagaacaacattatcggcgaaactctgaatccgaacaacaccaacctatcctgcggtgggtcttccggtggtgagggtgctcttcaagctctcagaggtagtagcctcggactcgggacagacatcgggggttcggtccgcataccagcaggttttaatgggattttctctctaaagccaacaccagaaaggatctcctatcgaaatgtggcgaacaaccaccctggcgaaaacacgtaccgatctaccatcggctttctgagcacgtctcttggtggacttgagctgctcttcaaatctgacctttcgactaagccctggcttagagaccctgcagtagttccaatccctttcagagatgatgtcgtagcagagattgaatcacgagctggcgccaatggagaaactgtccaggacaagaagccacttaagctgggagtgctatggacagataagactgctcagccgcatcctcccatcacacgaggtctaaatattatctccacagcgatgaaggaagctggtcacaaggttgtcgactggaatccgcctgatcaagctaccgcgaagaggattcatcttgctttcctcaaggcggatggagcccacgacatccactctcagctggggctgtccggcgagcccctgatccccgacctccgagactccttcacactcagagagccaatgaacttgctcaagtaccaagacctaaccttgcaaggactcgactacgaggctgagtattctgactactggaactccacggccgatgaagacggccagaaagtagatgcggtcatcatgcctgtagcaccccatgccgcggtgattccggggaaattctatcatactgcgtacacagaaattttgaacctgatgaactacagcgtcgtagtgctaccggttacgaaggccgaccgagacattgacaaggtggatgactcctacaagccgtctaatgagctcgatcgacggaactggtctgcctatgatcccgatatctaccatggcgcaccagtgggacttgagctggttgggcaaaagtttgaggaggagaagatgcttgcgattgcgaagattgtgcttgcggcgatgggagctgcaaaggctagggctggctga

SEQ ID NO: 20799 - protein, 574 aa, Muscodor strobelii
  misc_feature: SGI Peptide ID NO. 567029
  misc_feature (82)..(556): Pfam Id: PF01425 Pfam Desc: Amidase
  misc_feature (8)..(566): NCBI GI: 256726647 Blast Desc: NECHADRAFT_75861 [Nectria haematococca mpVI 77-13-4]
  misc_feature (9)..(562): NCBI GI: 46116242 Blast Desc: FG03963.1 [Gibberella zeae PH-1]
  misc_feature (8)..(571): NCBI GI: 85105556 Blast Desc: NCU10409 [Neurospora crassa OR74A] gi|28923580|gb|EAA32754.1| conserved [Neurospora crassa OR74A]
  misc_feature (9)..(570): NCBI GI: 238845319 Blast Desc: general amidase [Microsporum canis CBS 113480]
  misc_feature (9)..(562): NCBI GI: 67902632 Blast Desc: AN8303.2 [Aspergillus nidulans FGSC A4] gi|40747712|gb|EAA66868.1| AN8303.2 [Aspergillus nidulans FGSC A4] gi|259484227|tpe|CBF80268.1| TPA: conserved [Aspergillus FGSC
  misc_feature (10)..(562): NCBI GI: 240105660 Blast Desc: Amidase family protein [Coccidioides posadasii C735 delta SOWgp]
  misc_feature (5)..(566): NCBI GI: 154292614 Blast Desc: BC1G_14633 [Botryotinia fuckeliana B05.10] gi|150845847|gb|EDN21040.1| BC1G_14633 [Botryotinia fuckeliana B05.10]
  misc_feature (7)..(562): NCBI GI: 115398890 Blast Desc: ATEG_05856 [Aspergillus terreus NIH2624] gi|114191917|gb|EAU33617.1| ATEG_05856 [Aspergillus terreus NIH2624]
  misc_feature (9)..(562): NCBI GI: 67526999 Blast Desc: AN3957.2 [Aspergillus nidulans FGSC A4] gi|17223765|gb|AAL10515.1| general amidase [Emericella nidulans] gi|40740076|gb|EAA59266.1| AN3957.2 [Aspergillus nidulans FGSC ;
  misc_feature (17)..(562): NCBI GI: 238487898 Blast Desc: general amidase GmdA, [Aspergillus flavus NRRL3357] gi|220700066|gb|EED56405.1| general amidase GmdA, [Aspergillus flavus NRRL3357]
  misc_feature (9)..(562): SWISSPROT Homolog: EC 3.5.1.4 Amidase
MTLHPLALSWQARATAKRTDTLEKIPPKWRLCAEQLADAKKQRDLTGPYIQQFLTGDDISIISKDSVQIVEAIKCGHLTAVQVTNAFCKTAAIAHQINNCLHEIFFDQALKRAEWLDSQFASSGVIGPLHGLPISMKDQFHVKGVDTTMGYVGWIGSNLGIKDPEMAHQIESQLTTELLSLGAVLYCKTSLPQTLLFGETKNNIIGETLNPNNTNLSCGGSSGGEGALQALRGSSLGLGTDIGGSVRIPAGFNGIFSLKPTPERISYRNVANNHPGENTYRSTIGFLSTSLGGLELLFKSDLSTKPWLRDPAVVPIPFRDDVVAEIESRAGANGETVQDKKPLKLGVLWTDKTAQPHPPITRGLNIISTAMKEAGHKVVDWNPPDQATAKRIHLAFLKADGAHDIHSQLGLSGEPLIPDLRDSFTLREPMNLLKYQDLTLQGLDYEAEYSDYWNSTADEDGQKVDAVIMPVAPHAAVIPGKFYHTAYTEILNLMNYSVVVLPVTKADRDIDKVDDSYKPSNELDRRNWSAYDPDIYHGAPVGLELVGQKFEEEKMLAIAKIVLAAMGAAKARAG

SEQ ID NO: 20800 - DNA, 2369 bp, Muscodor strobelii
  misc_feature: SGI EST ID NO. CUFF.48905.4
  misc_feature: Variant of the nucleotide sequence at SEQ ID NO 20798
tatctcttgtgctcagagcctcgcctgcccacctactcgctactgggtgtgcagcattccgataagtactgcttgaagtgccttgagaaagtgcctctgggccttccaaacgttgcctcctccccccagtacctacttcccacttccttgtctcaaggttcaccctagctgtgctaaagcattcaagtcagaactgtaacaagtaaacccttatgccacataggtttacagtgaccaggtggtaggacaagacaatacggctaggtagtcttgagcttgacgtcaattgctgccgtggagtatcaatgacgctgcacccgctagcactgtcctggcaagcccgagcgactgcaaagagaactgacacactggagaagatcccgcccaagtggagactctgtgccgagcagctggccgatgcaaagaagcagagagacctcactggtccctacatccaacaattcctcaccggcgatgacatatccatcatctccaaagacagcgttcaaattgtcgaggccatcaagtgcggccacctaaccgccgtccaggtcacgaacgcattctgcaaaaccgcagccatcgcccatcagattaacaattgccttcacgagattttcttcgatcaagctcttaagagagcagaatggcttgattcccagttcgccagctctggcgttattgggccgctccatggcctacccatcagtatgaaagatcagtttcacgtcaagggagtcgacacaaccatgggctatgtcggatggattggaagtaacctgggcattaaggatccggaaatggcgcatcaaatcgaaagtcagctgaccacggagctcctgtcactgggtgccgtgttgtactgcaagaccagcctgccccaaaccctattgttcggcgagaccaagaacaacattatcggcgaaactctgaatccgaacaacaccaacctatcctgcggtgggtcttccggtggtgagggtgctcttcaagctctcagaggtagtagcctcggactcgggacagacatcgggggttcggtccgcataccagcaggttttaatgggattttctctctaaagccaacaccagaaaggatctcctatcgaaatgtggcgaacaaccaccctggcgaaaacacgtaccgatctaccatcggctttctgagcacgtctcttggtggacttgagctgctcttcaaatctgacctttcgactaagccctggcttagagaccctgcagtagttccaatccctttcagagatgatgtcgtagcagagattgaatcacgagctggcgccaatggagaaactgtccaggacaagaagccacttaagctgggagtgctatggacagataagactgctcagccgcatcctcccatcacacgaggtctaaatattatctccacagcgatgaaggaagctggtcacaaggttgtcgactggaatccgcctgatcaagctaccgcgaagaggattcatcttgctttcctcaaggcggatggagcccacgacatccactctcagctggggctgtccggcgagcccctgatccccgacctccgagactccttcacactcagagagccaatgaacttgctcaagtaccaagacctaaccttgcaaggactcgactacgaggctgagtattctgactactggaactccacggccgatgaagacggccagaaagtagatgcggtcatcatgcctgtagcaccccatgccgcggtgattccggggaaattctatcatactgcgtacacagaaattttgaacctgatgaactacagcgtcgtagtgctaccggttacgaaggccgaccgagacattgacaaggtggatgactcctacaagccgtctaatgagctcgatcgacggaactggtctgcctatgatcccgatatctaccatggcgcaccagtgggacttgagctggttgggcaaaagtttgaggaggagaagatgcttgcgattgcgaagattgtgcttgcggcgatgggagctgcaaaggctagggctggctgactaagacagatgtaacgcaacaatcaaggtattaaattacgagcaatggccagttgcttgagaatgacccaaggagaaccttttctcgatgaccagaatccagactctccaatatcatgtgtcctagtagggactcaggagtggtgggtaaagaggtaccttacacagatatattgctaaggcacttggaggcgttatgtattttgtgcttcgtgctattgaaacatgtaggcaaatagggcatatagtctgcaaggagtgttcagaagagggttatggaaagagactgaatgttcaactctagtggtgtcttatgactgcttgaggaacaaaaggtgc

SEQ ID NO: 20801 - DNA, 1746 bp, Muscodor strobelii
  misc_feature: SGI cDNA ID NO. 567030
  misc_feature: Encodes the peptide sequence at SEQ ID NO 20802
atgacgctgcacccgctagcactgtcctggcaagcccgagcgactgcaaagagaactgacacactggagaagatcccgcccaagtggagactctgtgccgagcagctggccgatgcaaagaagcagagagacctcactggtccctacatccaacaattcctcaccggcgatgacatatccatcatctccaaagacagcgttcaaattgtcgaggccatcaagtgcggccacctaaccgccgtccaggtcacgaacgcattctgcaaaaccgcagccatcgcccatcagattaacaattgccttcacgagattttcttcgatcaagctcttaagagagcagaatggcttgattcccagttcgccagctctggcgttattgggccgctccatggcctacccatcagtatgaaagatcagtttcacgtcaagggagtcgacacaaccatgggctatgtcggatggattggaagtaacctgggcattaaggatccggaaatggcgcatcaaatcgaaagtcagctgaccacggagctcctgtcactgggtgccgtgttgtactgcaagaccagcctgccccaaaccctattgttcggcgagaccaagaacaacattatcggcgaaactctgaatccgaacaacaccaacctatcctgcggtgggtcttccggtggtgagggtgctcttcaagctctcagaggtagtagcctcggactcgggacagacatcgggggttcggtccgcataccagcaggttttaatgggattttctctctaaagccaacaccagaaaggatctcctatcgaaatgtggcgaacaaccaccctggcgaaaacacgtaccgatctaccatcggctttctgagcacgtctcttggtggacttgagctgctcttcaaatctgacctttcgactaagccctggcttagagaccctgcagtagttccaatccctttcagagatgatgtcgtagcagagattgaatcacgagctggcgccaatggagaaactgtccaggacaagaagccacttaagctgggagtgctatggacagataagactgctcagccgcatcctcccatcacacgaggtctaaatattatctccacagcgatgaaggaagctggtcacaaggttgtcgactggaatccgcctgatcaagctaccgcgaagaggattcatgtaggcaattcctacccaaagcttgctttcctcaaggcggatggagcccacgacatccactctcagctggggctgtccggcgagcccctgatccccgacctccgagactccttcacactcagagagccaatgaacttgctcaagtaccaagacctaaccttgcaaggactcgactacgaggctgagtattctgactactggaactccacggccgatgaagacggccagaaagtagatgcggtcatcatgcctgtagcaccccatgccgcggtgattccggggaaattctatcatactgcgtacacagaaattttgaacctgatgaactacagcgtcgtagtgctaccggttacgaaggccgaccgagacattgacaaggtggatgactcctacaagccgtctaatgagctcgatcgacggaactggtctgcctatgatcccgatatctaccatggcgcaccagtgggacttgagctggttgggcaaaagtttgaggaggagaagatgcttgcgattgcgaagattgtgcttgcggcgatgggagctgcaaaggctagggctggctga

SEQ ID NO: 20802 - protein, 581 aa, Muscodor strobelii
  misc_feature: SGI Peptide ID NO. 567030
  misc_feature (82)..(563): Pfam Id: PF01425 Pfam Desc: Amidase
  misc_feature (82)..(387): Pfam Id: PF01425 Pfam Desc: Amidase
  misc_feature (469)..(563): Pfam Id: PF01425 Pfam Desc: Amidase
  misc_feature (8)..(573): NCBI GI: 256726647 Blast Desc: NECHADRAFT_75861 [Nectria haematococca mpVI 77-13-4]
  misc_feature (9)..(569): NCBI GI: 46116242 Blast Desc: FG03963.1 [Gibberella zeae PH-1]
  misc_feature (10)..(578): NCBI GI: 85105556 Blast Desc: NCU10409 [Neurospora crassa OR74A] gi|28923580|gb|EAA32754.1| conserved [Neurospora crassa OR74A]
  misc_feature (9)..(577): NCBI GI: 238845319 Blast Desc: general amidase [Microsporum canis CBS 113480]
  misc_feature (9)..(569): NCBI GI: 67902632 Blast Desc: AN8303.2 [Aspergillus nidulans FGSC A4] gi|40747712|gb|EAA66868.1| AN8303.2 [Aspergillus nidulans FGSC A4] gi|259484227|tpe|CBF80268.1| TPA: conserved [Aspergillus FGSC
  misc_feature (10)..(569): NCBI GI: 240105660 Blast Desc: Amidase family protein [Coccidioides posadasii C735 delta SOWgp]
  misc_feature (7)..(569): NCBI GI: 115398890 Blast Desc: ATEG_05856 [Aspergillus terreus NIH2624] gi|114191917|gb|EAU33617.1| ATEG_05856 [Aspergillus terreus NIH2624]
  misc_feature (5)..(573): NCBI GI: 154292614 Blast Desc: BC1G_14633 [Botryotinia fuckeliana B05.10] gi|150845847|gb|EDN21040.1| BC1G_14633 [Botryotinia fuckeliana B05.10]
  misc_feature (9)..(569): NCBI GI: 67526999 Blast Desc: AN3957.2 [Aspergillus nidulans FGSC A4] gi|17223765|gb|AAL10515.1| general amidase [Emericella nidulans] gi|40740076|gb|EAA59266.1| AN3957.2 [Aspergillus nidulans FGSC ;
  misc_feature (6)..(569): NCBI GI: 70991685 Blast Desc: general amidase GmdA [Aspergillus fumigatus Af293] gi|66848324|gb|EAL88653.1| general amidase GmdA, [Aspergillus fumigatus Af293]
  misc_feature (9)..(569): SWISSPROT Homolog: EC 3.5.1.4 Amidase
MTLHPLALSWQARATAKRTDTLEKIPPKWRLCAEQLADAKKQRDLTGPYIQQFLTGDDISIISKDSVQIVEAIKCGHLTAVQVTNAFCKTAAIAHQINNCLHEIFFDQALKRAEWLDSQFASSGVIGPLHGLPISMKDQFHVKGVDTTMGYVGWIGSNLGIKDPEMAHQIESQLTTELLSLGAVLYCKTSLPQTLLFGETKNNIIGETLNPNNTNLSCGGSSGGEGALQALRGSSLGLGTDIGGSVRIPAGFNGIFSLKPTPERISYRNVANNHPGENTYRSTIGFLSTSLGGLELLFKSDLSTKPWLRDPAVVPIPFRDDVVAEIESRAGANGETVQDKKPLKLGVLWTDKTAQPHPPITRGLNIISTAMKEAGHKVVDWNPPDQATAKRIHVGNSYPKLAFLKADGAHDIHSQLGLSGEPLIPDLRDSFTLREPMNLLKYQDLTLQGLDYEAEYSDYWNSTADEDGQKVDAVIMPVAPHAAVIPGKFYHTAYTEILNLMNYSVVVLPVTKADRDIDKVDDSYKPSNELDRRNWSAYDPDIYHGAPVGLELVGQKFEEEKMLAIAKIVLAAMGAAKARAG

SEQ ID NO: 20803 - DNA, 2369 bp, Muscodor strobelii; identical to SEQ ID NO: 20800
  misc_feature: SGI EST ID NO. CUFF.48905.4
  misc_feature: Variant of the nucleotide sequence at SEQ ID NO 20801

SEQ ID NO: 20804 - DNA, 1617 bp, Muscodor strobelii
  misc_feature: SGI cDNA ID NO. 567031
  misc_feature: Reduced expression when VOC is produced
  misc_feature: Encodes the peptide sequence at SEQ ID NO 20805
atgacgctgcacccgctagcactgtcctggcaagcccgagcgactgcaaagagaactgacacactggagaagatcccgcccaagtggagactctgtgccgagcagctggccgatgcaaagaagcagagagacctcactggtccctacatccaacaattcctcaccggcgatgacatatccatcatctccaaagacagcgttcaaattgtcgaggccatcaagtgcggccacctaaccgccgtccaggtcacgaacgcattctgcaaaaccgcagccatcgcccatcagattaacaattgccttcacgagattttcttcgatcaagctcttaagagagcagaatggcttgattcccagttcgccagctctggcgttattgggccgctccatggcctacccatcagtatgaaagatcagtttcacgtcaagggagtcgacacaaccatgggctatgtcggatggattggaagtaacctgggcattaaggatccggaaatggcgcatcaaatcgaaagtcagctgaccacggagctcctgtcactgggtgccgtgttgtactgcaagaccagcctgccccaaaccctattgttcggcgagaccaagaacaacattatcggcgaaactctgaatccgaacaacaccaacctatcctgcggtgggtcttccggtggtgagggtgctcttcaagctctcagaggtagtagcctcggactcgggacagacatcgggggttcggtccgcataccagcaggttttaatgggattttctctctaaagccaacaccagaaaggatctcctatcgaaatgtggcgaacaaccaccctggcgaaaacacgtaccgatctaccatcggctttctgagcacgtctcttggtggacttgagctgctcttcaaatctgacctttcgactaagccctggcttagagaccctgcagtagttccaatccctttcagagatgatgtcgtagcagagattgaatcacgagctggcgccaatggagaaactgtccaggacaagaagccacttaagctgggagtgctatggacagataagactgctcagccgcatcctcccatcacacgaggtctaaatattatctccacagcgatgaaggaagctggtcacaaggttgtcgactggaatccgcctgatcaagctaccgcgaagaggattcatgtaggcaattcctacccaaagcttgctttcctcaaggcggatggagcccacgacatccactctcagctggggctgtccggcgagcccctgatccccgacctccgagactccttcacactcagagagccaatgaacttgctcaagtaccaagacctaaccttgcaaggactcgactacgaggctgagtattctgactactggaactccacggccgatgaagacggtagaccgccctacgttttgctacaagtctctatcagccgttgttatactaatctggttgacaggccagaaagtagatgcggtcatcatgcctgtagcaccccatgccgcggtgattccggggaaattctatcatactgcgtacacagaaattttgaacctgatgaactacagcgtcgtagtgctaccggttacgaaggccgaccgagacattga

SEQ ID NO: 20805 - protein, 538 aa, Muscodor strobelii
  misc_feature: SGI Peptide ID NO. 567031
  misc_feature (82)..(511): Pfam Id: PF01425 Pfam Desc: Amidase
  misc_feature (82)..(387): Pfam Id: PF01425 Pfam Desc: Amidase
  misc_feature (9)..(469): NCBI GI: 46116242 Blast Desc: FG03963.1 [Gibberella zeae PH-1]
  misc_feature (8)..(469): NCBI GI: 256726647 Blast Desc: NECHADRAFT_75861 [Nectria haematococca mpVI 77-13-4]
  misc_feature (8)..(467): NCBI GI: 85105556 Blast Desc: NCU10409 [Neurospora crassa OR74A] gi|28923580|gb|EAA32754.1| conserved [Neurospora crassa OR74A]
  misc_feature (9)..(469): NCBI GI: 238845319 Blast Desc: general amidase [Microsporum canis CBS 113480]
  misc_feature (9)..(471): NCBI GI: 67902632 Blast Desc: AN8303.2 [Aspergillus nidulans FGSC A4] gi|40747712|gb|EAA66868.1| AN8303.2 [Aspergillus nidulans FGSC A4] gi|259484227|tpe|CBF80268.1| TPA: conserved [Aspergillus FGSC
  misc_feature (9)..(307): NCBI GI: 171688182 Blast Desc: protein product [Podospora anserina] gi|170944053|emb|CAP70163.1| protein product [Podospora anserina]
  misc_feature (7)..(506): NCBI GI: 115398890 Blast Desc: ATEG_05856 [Aspergillus terreus NIH2624] gi|114191917|gb|EAU33617.1| ATEG_05856 [Aspergillus terreus NIH2624]
  misc_feature (5)..(468): NCBI GI: 154292614 Blast Desc: BC1G_14633 [Botryotinia fuckeliana B05.10] gi|150845847|gb|EDN21040.1| BC1G_14633 [Botryotinia fuckeliana B05.10]
  misc_feature (9)..(470): NCBI GI: 145243556 Blast Desc: An11g02980 [Aspergillus niger] gi|134078977|emb|CAK40630.1| protein product [Aspergillus niger]
  misc_feature (9)..(468): NCBI GI: 67526999 Blast Desc: AN3957.2 [Aspergillus nidulans FGSC A4] gi|17223765|gb|AAL10515.1| general amidase [Emericella nidulans] gi|40740076|gb|EAA59266.1| AN3957.2 [Aspergillus nidulans FGSC ;
  misc_feature (9)..(469): SWISSPROT Homolog: EC 3.5.1.4 Amidase
  misc_feature: Useful for introducing or modulating the production of volatile compounds
MTLHPLALSWQARATAKRTDTLEKIPPKWRLCAEQLADAKKQRDLTGPYIQQFLTGDDISIISKDSVQIVEAIKCGHLTAVQVTNAFCKTAAIAHQINNCLHEIFFDQALKRAEWLDSQFASSGVIGPLHGLPISMKDQFHVKGVDTTMGYVGWIGSNLGIKDPEMAHQIESQLTTELLSLGAVLYCKTSLPQTLLFGETKNNIIGETLNPNNTNLSCGGSSGGEGALQALRGSSLGLGTDIGGSVRIPAGFNGIFSLKPTPERISYRNVANNHPGENTYRSTIGFLSTSLGGLELLFKSDLSTKPWLRDPAVVPIPFRDDVVAEIESRAGANGETVQDKKPLKLGVLWTDKTAQPHPPITRGLNIISTAMKEAGHKVVDWNPPDQATAKRIHVGNSYPKLAFLKADGAHDIHSQLGLSGEPLIPDLRDSFTLREPMNLLKYQDLTLQGLDYEAEYSDYWNSTADEDGRPPYVLLQVSISRCYTNLVDRPESRCGHHACSTPCRGDSGEILSYCVHRNFEPDELQRRSATGYEGRPRH

SEQ ID NO: 20806 - DNA, 2369 bp, Muscodor strobelii; identical to SEQ ID NO: 20800
  misc_feature: SGI EST ID NO. CUFF.48905.4
  misc_feature: Variant of the nucleotide sequence at SEQ ID NO 20804

SEQ ID NO: 20807 - DNA, 1791 bp, Muscodor strobelii
  misc_feature: SGI cDNA ID NO. 567032
  misc_feature: Encodes the peptide sequence at SEQ ID NO 20808
atgacgctgcacccgctagcactgtcctggcaagcccgagcgactgcaaagagaactgacacactggagaagatcccgcccaagtggagactctgtgccgagcagctggccgatgcaaagaagcagagagacctcactggtccctacatccaacaattcctcaccggcgatgacatatccatcatctccaaagacagcgttcaaattgtcgaggccatcaagtgcggccacctaaccgccgtccaggtcacgaacgcattctgcaaaaccgcagccatcgcccatcagattaacaattgccttcacgagattttcttcgatcaagctcttaagagagcagaatggcttgattcccagttcgccagctctggcgttattgggccgctccatggcctacccatcagtatgaaagatcagtttcacgtcaagggagtcgacacaaccatgggctatgtcggatggattggaagtaacctgggcattaaggatccggaaatggcgcatcaaatcgaaagtcagctgaccacggagctcctgtcactgggtgccgtgttgtactgcaagaccagcctgccccaaaccctattgttcggcgagaccaagaacaacattatcggcgaaactctgaatccgaacaacaccaacctatcctgcggtgggtcttccggtggtgagggtgctcttcaagctctcagaggtagtagcctcggactcgggacagacatcgggggttcggtccgcataccagcaggttttaatgggattttctctctaaagccaacaccagaaaggatctcctatcgaaatgtggcgaacaaccaccctggcgaaaacacgtaccgatctaccatcggctttctgagcacgtctcttggtggacttgagctgctcttcaaatctgacctttcgactaagccctggcttagagaccctgcagtagttccaatccctttcagagatgatgtcgtagcagagattgaatcacgagctggcgccaatggagaaactgtccaggacaagaagccacttaagctgggagtgctatggacagataagactgctcagccgcatcctcccatcacacgaggtctaaatattatctccacagcgatgaaggaagctggtcacaaggttgtcgactggaatccgcctgatcaagctaccgcgaagaggattcatgtaggcaattcctacccaaagcttgctttcctcaaggcggatggagcccacgacatccactctcagctggggctgtccggcgagcccctgatccccgacctccgagactccttcacactcagagagccaatgaacttgctcaagtaccaagacctaaccttgcaaggactcgactacgaggctgagtattctgactactggaactccacggccgatgaagacggccagaaagtagatgcggtcatcatgcctgtagcaccccatgccgcggtgattccggggaaattctatcatactgcgtacacagaaattttgaacctgatgaactacagcgtcgtagtgctaccggttacgaaggccgaccgagacattgacaaggtggatgactcctacaagccgtctaatgagctcgatcgacggaactggtctgcctgtaagatccgatcttcgccctgctacctacctagtcacatggagcatgatcccgatatctaccatggcgcaccagtgggacttgagctggttgggcaaaagtttgaggaggagaagatgcttgcgattgcgaagattgtgcttgcggcgatgggagctgcaaaggctagggctggctga

SEQ ID NO: 20808 - protein, 596 aa, Muscodor strobelii
  misc_feature: SGI Peptide ID NO. 567032
  misc_feature (82)..(578): Pfam Id: PF01425 Pfam Desc: Amidase
  misc_feature (82)..(387): Pfam Id: PF01425 Pfam Desc: Amidase
  misc_feature (469)..(578): Pfam Id: PF01425 Pfam Desc: Amidase
  misc_feature (8)..(588): NCBI GI: 256726647 Blast Desc: NECHADRAFT_75861 [Nectria haematococca mpVI 77-13-4]
  misc_feature (9)..(584): NCBI GI: 46116242 Blast Desc: FG03963.1 [Gibberella zeae PH-1]
  misc_feature (10)..(593): NCBI GI: 85105556 Blast Desc: NCU10409 [Neurospora crassa OR74A] gi|28923580|gb|EAA32754.1| conserved [Neurospora crassa OR74A]
  misc_feature (9)..(592): NCBI GI: 238845319 Blast Desc: general amidase [Microsporum canis CBS 113480]
  misc_feature (9)..(584): NCBI GI: 67902632 Blast Desc: AN8303.2 [Aspergillus nidulans FGSC A4] gi|40747712|gb|EAA66868.1| AN8303.2 [Aspergillus nidulans FGSC A4] gi|259484227|tpe|CBF80268.1| TPA: conserved [Aspergillus FGSC
  misc_feature (10)..(584): NCBI GI: 240105660 Blast Desc: Amidase family protein [Coccidioides posadasii C735 delta SOWgp]
  misc_feature (5)..(588): NCBI GI: 154292614 Blast Desc: BC1G_14633 [Botryotinia fuckeliana B05.10] gi|150845847|gb|EDN21040.1| BC1G_14633 [Botryotinia fuckeliana B05.10]
  misc_feature (7)..(584): NCBI GI: 115398890 Blast Desc: ATEG_05856 [Aspergillus terreus NIH2624] gi|114191917|gb|EAU33617.1| ATEG_05856 [Aspergillus terreus NIH2624]
  misc_feature (17)..(584): NCBI GI: 238487898 Blast Desc: general amidase GmdA, [Aspergillus flavus NRRL3357] gi|220700066|gb|EED56405.1| general amidase GmdA, [Aspergillus flavus NRRL3357]
  misc_feature (9)..(584): NCBI GI: 67526999 Blast Desc: AN3957.2 [Aspergillus nidulans FGSC A4] gi|17223765|gb|AAL10515.1| general amidase [Emericella nidulans] gi|40740076|gb|EAA59266.1| AN3957.2 [Aspergillus nidulans FGSC ;
  misc_feature (9)..(584): SWISSPROT Homolog: EC 3.5.1.4 Amidase
MTLHPLALSWQARATAKRTDTLEKIPPKWRLCAEQLADAKKQRDLTGPYIQQFLTGDDISIISKDSVQIVEAIKCGHLTAVQVTNAFCKTAAIAHQINNCLHEIFFDQALKRAEWLDSQFASSGVIGPLHGLPISMKDQFHVKGVDTTMGYVGWIGSNLGIKDPEMAHQIESQLTTELLSLGAVLYCKTSLPQTLLFGETKNNIIGETLNPNNTNLSCGGSSGGEGALQALRGSSLGLGTDIGGSVRIPAGFNGIFSLKPTPERISYRNVANNHPGENTYRSTIGFLSTSLGGLELLFKSDLSTKPWLRDPAVVPIPFRDDVVAEIESRAGANGETVQDKKPLKLGVLWTDKTAQPHPPITRGLNIISTAMKEAGHKVVDWNPPDQATAKRIHVGNSYPKLAFLKADGAHDIHSQLGLSGEPLIPDLRDSFTLREPMNLLKYQDLTLQGLDYEAEYSDYWNSTADEDGQKVDAVIMPVAPHAAVIPGKFYHTAYTEILNLMNYSVVVLPVTKADRDIDKVDDSYKPSNELDRRNWSACKIRSSPCYLPSHMEHDPDIYHGAPVGLELVGQKFEEEKMLAIAKIVLAAMGAAKARAG

SEQ ID NO: 20809 - DNA, 2369 bp, Muscodor strobelii; identical to SEQ ID NO: 20800
  misc_feature: SGI EST ID NO. CUFF.48905.4
  misc_feature: Variant of the nucleotide sequence at SEQ ID NO 20807

SEQ ID NO: 20810 - DNA, 1248 bp, Muscodor strobelii
  misc_feature: SGI cDNA ID NO. 567033
  misc_feature: Encodes the peptide sequence at SEQ ID NO 20811
atgcttaggtcgattacagactccgagttcgagctcaaagaaatgatggaggacgtggtgaaccccagatgggagagtgaggagctggctgcaaagctgaaggacaggctgagcgggccaggcgagtacgaaaattataatacctccataagggcaattcactcccatctcgtcaacgtgcaaaagcggcttgatcgatgcgcaccaccttcctccaatggcgctcttcagaaggggctccgcctccaaagacgacttcggaagttccaatttgcgattcggaggactaagtggcaagacgaggttgaaagcttggggggccagattgacagagtcaacaagttattcagcgaagccgaggcgcttgcccctgcaagactttcgaagaactctgagacggccttgatcctcaccggcacaaaaaaccaggcatccagtctacatagggctatctcgatgggctggagagattgcgactgcgacaagccacatgagtttaagctcgtcatgatccgtcggtcatacaggaatctttctcgagcaccggatgcccagatactgagagtatcgttcccgcggaccattctaccaatgataggcaaggggcagaaaccatcggagattaacattgggtggtgtggcttcaacacaaccatgatcgggtctctcaagagcagcagcggcagcagcagcagcagcagcagcagcagcagcagcagcttgcaccacccacagctgtcgtccaggtcacataatcgcagcagctggtcaggaggcacctcaatcacaaacgtcgagtcggtgtcgtcgttcacgacaatggacacaggcgcggccagtcgtatcgaggacttatgccacgcgctgcaagcacatgggaaagcagagtgtttagggtacctgagcgatggccacggagtagaccacatacttaacaccaactcgacattcagcttcacatcagatgacgtcgatgatgtgatcagtctagcagcactcctcactgacaaggtagcgaaatctgaacgcgacctaaacgctaccaaaagcaaggctatcttgggtcttactcgagcacagaggatgtcagtggctctgacgctggcgtacgccctcctggagctatacccaacaccctggctgcctcacacattcggcaagatggacgtgtacttctttgtacgcaagactgggcaagtcatcaccgaaaaccctttccttgtatgccaggccatggcagcctcttaa

SEQ ID NO: 20811 - protein, 415 aa, Muscodor strobelii
  misc_feature: SGI Peptide ID NO. 567033
  misc_feature (1)..(408): NCBI GI: 67902630 Blast Desc: AN8302.2 [Aspergillus nidulans FGSC A4] gi|40747711|gb|EAA66867.1| AN8302.2 [Aspergillus nidulans FGSC A4] gi|259484226|tpe|CBF80266.1| TPA: conserved [Aspergillus FGSC
  misc_feature (2)..(408): NCBI GI: 85105013 Blast Desc: NCU08812 [Neurospora crassa OR74A] gi|28923433|gb|EAA32616.1| [Neurospora crassa OR74A]
  misc_feature (12)..(407): NCBI GI: 169615082 Blast Desc: SNOG_10696 [Phaeosphaeria nodorum SN15] gi|111060970|gb|EAT82090.1| SNOG_10696 [Phaeosphaeria nodorum SN15]
  misc_feature (282)..(410): NCBI GI: 240107784 Blast Desc: CPC735_044070 [Coccidioides posadasii C735 delta SOWgp]
  misc_feature (282)..(410): NCBI GI: 119177046 Blast Desc: CIMG_07519 [Coccidioides immitis RS]
  misc_feature (284)..(408): NCBI GI: 46137989 Blast Desc: FG10509.1 [Gibberella zeae PH-1]
MLRSITDSEFELKEMMEDVVNPRWESEELAAKLKDRLSGPGEYENYNTSIRAIHSHLVNVQKRLDRCAPPSSNGALQKGLRLQRRLRKFQFAIRRTKWQDEVESLGGQIDRVNKLFSEAEALAPARLSKNSETALILTGTKNQASSLHRAISMGWRDCDCDKPHEFKLVMIRRSYRNLSRAPDAQILRVSFPRTILPMIGKGQKPSEINIGWCGFNTTMIGSLKSSSGSSSSSSSSSSSSLHHPQLSSRSHNRSSWSGGTSITNVESVSSFTTMDTGAASRIEDLCHALQAHGKAECLGYLSDGHGVDHILNTNSTFSFTSDDVDDVISLAALLTDKVAKSERDLNATKSKAILGLTRAQRMSVALTLAYALLELYPTPWLPHTFGKMDVYFFVRKTGQVITENPFLVCQAMAAS

SEQ ID NO: 20812 - DNA, 2226 bp, Muscodor strobelii
  misc_feature: SGI EST ID NO. CUFF.48833.0
  misc_feature: Variant of the nucleotide sequence at SEQ ID NO 20810
gcaaaagaaccctaaccacccgaaccctagccgcatatagaggggatgcttaggtcgattacagactccgagttcgagctcaaagaaatgatggaggacgtggtgaaccccagatgggagagtgaggagctggctgcaaagctgaaggacaggctgagcgggccaggcgagtacgaaaattataatacctccataagggcaattcactcccatctcgtcaacgtgcaaaagcggcttgatcgatgcgcaccaccttcctccaatggcgctcttcagaaggggctccgcctccaaagacgacttcggaagttccaatttgcgattcggaggactaagtggcaagacgaggttgaaagcttggggggccagattgacagagtcaacaagttattcagcgaagccgaggcgcttgcccctgcaagactttcgaagaactctgagacggccttgatcctcaccggcacaaaaaaccaggcatccagtctacatagggctatctcgatgggctggagagattgcgactgcgacaagccacatgagtttaagctcgtcatgatccgtcggtcatacaggaatctttctcgagcaccggatgcccagatactgagagtatcgttcccgcggaccattctaccaatgataggcaaggggcagaaaccatcggagattaacattgggtggtgtggcttcaacacaaccatgatcgggtctctcaagagcagcagcggcagcagcagcagcagcagcagcagcagcagcagcagcttgcaccacccacagcgtatagtaatatacaaagcttgagaaattcagaagcgagcagtctcacccgatcagtgtcgtccaggtcacataatcgcagcagctggtcaggaggcacctcaatcacaaacgtcgagtcggtgtcgtcgttcacgacaatggacacaggcgcggccagtcgtatcgaggacttatgccacgcgctgcaagcacatgggaaagcagagtgtttagggtacctgagcgatggccacggagtagaccacatacttaacaccaactcgacattcagcttcacatcagatgacgtcgatgatgtgatcagtctagcagcactcctcactgacaaggtagcgaaatctgaacgcgacctaaacgctaccaaaagcaaggctatcttgggtcttactcgagcacagaggatgtcagtggctctgacgctggcgtacgccctcctggagctatacccaacaccctggctgcctcacacattcggcaagatggacgtgtacttctttgtacgcaagactgggcaagtcatcaccgaaaaccctttccttgtatgccaggccatggcagcctcttaaagccgaatcgcttcgaaaacgatggcagataacccaatgcataatcacgaccactcagacgcactcctagctctgggaattctcatcatggagctgtggttcggccagtcgatcgagtcacggcccttctggaaagaccactgtggtgaaaacggacaggcgaagcctttcaccagctataccgccgtaatggagtggcagaaaaggccatcggcgaagcgggcatcgtcctccacgatgtgacgaacagatgcatccggggaaatgtaggacctacgaccatcgacctcgacgactcgagctgcgtgagggctatctttgatcaaattataaggcctctcgagggaatgcttgcctatttttggctacattaaggagctagggtgggaaatacacacttgtatcgtgctttattctttaatgtggtaggcgttaaaggcgactgggtttgagtctcttagtgggagtttaataaatttggaagcgtgcaatcagtgtactcctacgaaagaaatcgacctgggtgatcaggtggatatgtcaataacgcagagagggagaagaagggcatccgaataggagtgggtgtttgtaggcgtaattcaagcatagaacttaagtgcggtttcatcctgtgtaaatcatacagatgtatctagttctcagtataacacaccaaatatatcttcttctcgcgctatataccagctggaaatcaactgtgagatgcttcatgaattcatttgtagtcatgtacacctaaccttcgccctaattacacctcctcaggcatctctcattccctcttcgcctcccacagcgcgatcttcacgccatgagccggaataatgacaatctcagtcttgagcgtcggctt

SEQ ID NO: 20813 - DNA, 471 bp, Muscodor strobelii
  misc_feature: SGI cDNA ID NO. 567034
  misc_feature: Encodes the peptide sequence at SEQ ID NO 20814
atgaagttcatcgttcctctctactgcattccactggcaacattcggtgtcgccctgcctgctgagacggtgcgacacgctaccccgcctctcgctgagggacagaagccttatgtgactggctctcccaacgtaaatgtcacaacgctctccgaagctgaaggggctcggccgaacaagaggtattccctcattgttcaagtttggtccgacattaaccatgggggtcgctttgaggaactcatatccgatgtcaatacttgccactgtctcgggaatggatggaacgatgctatttcctcactggccattccctccggcttcatttgcatttttaatcagaacaacgagtgtagtcctgttgattattcgcttgttgtccatggcccagacgatatttatgacctgaggacccttctcttcgatgatatgatcacaagttatacttgttacaaattagctgttgactga

SEQ ID NO: 20814 - protein, 156 aa, Muscodor strobelii
  misc_feature: SGI Peptide ID NO. 567034
MKFIVPLYCIPLATFGVALPAETVRHATPPLAEGQKPYVTGSPNVNVTTLSEAEGARPNKRYSLIVQVWSDINHGGRFEELISDVNTCHCLGNGWNDAISSLAIPSGFICIFNQNNECSPVDYSLVVHGPDDIYDLRTLLFDDMITSYTCYKLAVD

SEQ ID NO: 20815 - DNA, 581 bp, Muscodor strobelii
  misc_feature: SGI EST ID NO. CUFF.48843.0
  misc_feature: Variant of the nucleotide sequence at SEQ ID NO 20813
atcgcctctattttcatcaaccgcgccgcatctcctgttttgtagagccaaccgaaatattgaccttcatcatgaagttcatcgttcctctctactgcattccactggcaacattcggtgtcgccctgcctgctgagacggtgcgacacgctaccccgcctctcgctgagggacagaagccttatgtgactggctctcccaacgtaaatgtcacaacgctctccgaagctgaaggggctcggccgaacaagaggtattccctcattgttcaagtttggtccgacattaaccatgggggtcgctttgaggaactcatatccgatgtcaatacttgccactgtctcgggaatggatggaacgatgctatttcctcactggccattccctccggcttcatttgcatttttaatcagaacaacgagtgtagtcctgttgattattcgcttgttgtccatggcccagacgatatttatgacctgaggacccttctcttcgatgatatgatcacaagttatacttgttacaaattagctgttgactgatcactgcttaagtccagaggccgagcagttacggcggtt

SEQ ID NO: 20816 - DNA, 2019 bp, Muscodor strobelii
  misc_feature: SGI cDNA ID NO. 567035
  misc_feature: Reduced expression when VOC is produced
  misc_feature: Encodes the peptide sequence at SEQ ID NO 20817
atggctcgaccgttccgtcccaacacccagactcgacgcggcaaccgtagtggctatgtcgagcatgatgatttcgagggcttgcctgtccgacaatggcgcagcgaatgggtgagcatcgctcctccgccacctcccgacgtgaccaggaagaacgacgtttggggaatcgagctgcctcatggcatgccaaaggactccaatctgctgccggcccatacccaagagcttctacgagccgctcgctcgggcagactctacaagcgacctgccccagccgaagaggaagaacccgaggtcgacgccctccaggcagagaagaatgagaagaaagaggaggatcccagcaccaaaggcttccaaattaaggtctggaagcaggtcgcccgcaacgccgaaggctctacgctttcctatctggccaagaggcggaagggaatcgtcacactttcgtccgatctccccgctggtgcgcccgccggtcccaccgtcaccaaagccactgtccgtcgcgtcgatgccgctggaaacccctacacccaagagatcaccctgaacgaggggcagccggtggatggagagatcatatcgaccacggttgtggccgtcccggtacccaatctggttggcgacgtatctgtgtcagcaacacccgtgcgcaaacgccctccgccgccgaagaggaagcccaagggacctggtcgaggtcggaggaagaagatgataccctctctgccactaaacccgaacgcgggcccatcagctgccgccgctgcaggtgctgtgcagggtgtgaagatggagggcgcccagatcgcgctacccggtgatggaaactcgaagaatcaagacgtcgaaatggcagataatgacgatggagatgacggtgacgacggcgaagacgacgacgaagaaggagatgacgatgaggatggcgacggcgccgatggggagacgggctctatgtcgcgggctgacagcgaaattaaatctgaccagatggacatcacgccttcactcgatccagttgagccgattggtatcaagcagcagactccacccgaggaattatctcccttggccacacccagtcttgcgccaccggatattccctcgtcacatcttgaaggcagccctctgaagaatgtcacttccgccctatcgcccgtggaagccccccctgttcctacgctgccaatagatttacccgctccatccgacgacatagaggccacgaaattgccggtcgatgtctctgcaccagtacccgaactagcggctcccaaagatgagccagtgccagttgattctccaatgcagaacacaaccgagcctgtaccagatgacgtcaagcccgcaaatggtgtagatgtggaaatggtcgacgtcaacgaaagcactcccgccatcgtaccggagacagccgcaacaaccgatccagtcgacaacggcgcagcagttgaaccggaagctcgagaaccctcagcaccagaggtcgtcgagacaatcgaagagcccgctactaatctgccaccccttgtggaaacggtgcaagaagcacaagcgacgatagctacggaaccggctgaagaggttacaaaagctgaacctactgagactctaccttccgtagaaaccgtcactgaagaagttgttgcccctgtagttgctaaagagccgacaccacctccggtccctgcggttgagccggcctcagaatctaccttgttgacagaagataccgagcccgtccaggaagtgagtgccgagcaacctgaggaggctcccgctgcggaggagaagccgatccccctgccagtcttagcagaagtgcgagaggaacaagctgtaccaccatctcaagaggatctggcggctaatagccccgatctcttcagtggtcttgaagcagcactgaaccaagaaggacccagcagcaatgaacccgctcacccagagcctgaggttccagctgaaattacagacgctaagaccgaggtggatccgcctgcagaatag

SEQ ID NO: 20817 - protein, 672 aa, Muscodor strobelii
  misc_feature: SGI Peptide ID NO. 567035
  misc_feature (11)..(264): NCBI GI: 46105270 Blast Desc: FG00263.1 [Gibberella zeae PH-1]
  misc_feature (5)..(290): NCBI GI: 85115419 Blast Desc: NCU02006 [Neurospora crassa OR74A] gi|28926667|gb|EAA35635.1| [Neurospora crassa OR74A] gi|38566886|emb|CAE76191.1| related to apopolysialoglycoprotein
  misc_feature (11)..(239): NCBI GI: 256731906 Blast Desc: NECHADRAFT_100679 [Nectria haematococca mpVI 77-13-4]
  misc_feature (5)..(290): NCBI GI: 171684983 Blast Desc: protein product [Podospora anserina] gi|170942452|emb|CAP68104.1| protein product [Podospora anserina]
  misc_feature (20)..(391): NCBI GI: 116193631 Blast Desc: CHGG_06533 [Chaetomium globosum CBS 148.51] gi|88182446|gb|EAQ89914.1| CHGG_06533 [Chaetomium globosum CBS 148.51]
  misc_feature (8)..(174): NCBI GI: 154297170 Blast Desc: BC1G_12244 [Botryotinia fuckeliana B05.10] gi|150843073|gb|EDN18266.1| BC1G_12244 [Botryotinia fuckeliana B05.10]
  misc_feature (63)..(205): NCBI GI: 145615960 Blast Desc: MGG_13486 [Magnaporthe grisea 70-15] gi|145009749|gb|EDJ94405.1| MGG_13486 [Magnaporthe grisea 70-15]
  misc_feature (2)..(242): NCBI GI: 212544710 Blast Desc: conserved [Penicillium marneffei ATCC 18224] gi|210065478|gb|EEA19572.1| conserved [Penicillium marneffei ATCC 18224]
  misc_feature (16)..(242): NCBI GI: 261193691 Blast Desc: LYR family protein [Ajellomyces dermatitidis SLH14081] gi|239588856|gb|EEQ71499.1| LYR family protein [Ajellomyces dermatitidis SLH14081]
  misc_feature (15)..(293): NCBI GI: 238505956 Blast Desc: conserved [Aspergillus flavus NRRL3357] gi|220690294|gb|EED46644.1| conserved [Aspergillus flavus NRRL3357]
  misc_feature: Useful for introducing or modulating the production of volatile compounds
MARPFRPNTQTRRGNRSGYVEHDDFEGLPVRQWRSEWVSIAPPPPPDVTRKNDVWGIELPHGMPKDSNLLPAHTQELLRAARSGRLYKRPAPAEEEEPEVDALQAEKNEKKEEDPSTKGFQIKVWKQVARNAEGSTLSYLAKRRKGIVTLSSDLPAGAPAGPTVTKATVRRVDAAGNPYTQEITLNEGQPVDGEIISTTVVAVPVPNLVGDVSVSATPVRKRPPPPKRKPKGPGRGRRKKMIPSLPLNPNAGPSAAAAAGAVQGVKMEGAQIALPGDGNSKNQDVEMADNDDGDDGDDGEDDDEEGDDDEDGDGADGETGSMSRADSEIKSDQMDITPSLDPVEPIGIKQQTPPEELSPLATPSLAPPDIPSSHLEGSPLKNVTSALSPVEAPPVPTLPIDLPAPSDDIEATKLPVDVSAPVPELAAPKDEPVPVDSPMQNTTEPVPDDVKPANGVDVEMVDVNESTPAIVPETAATTDPVDNGAAVEPEAREPSAPEVVETIEEPATNLPPLVETVQEAQATIATEPAEEVTKAEPTETLPSVETVTEEVVAPVVAKEPTPPPVPAVEPASESTLLTEDTEPVQEVSAEQPEEAPAAEEKPIPLPVLAEVREEQAVPPSQEDLAANSPDLFSGLEAALNQEGPSSNEPAHPEPEVPAEITDAKTEVDPPAE

SEQ ID NO: 20818 - DNA, 2612 bp, Muscodor strobelii
  misc_feature: SGI EST ID NO. CUFF.48966.0
  misc_feature: Variant of the nucleotide sequence at SEQ ID NO 20816
tccaaacctccagtttgcgacaacatcaggaagttgcaagtcgccattcacagcattcatctcgattcctgtgccggcttctatgcaccaccttctgaaacacaccctaccaatcagtcacttgtagcccatttatcgaatctttagcgtgcgccttgccctttagtgcgcaattgaatgggcgcattgccgttgctctcagctaaaccgactaggtgatcgtagcgtttgcttctgattgcatagcaggcagccgcagcgcagctccgcgggcaaacgtcgcataatggctcgaccgttccgtcccaacacccagactcgacgcggcaaccgtagtggctatgtcgagcatgatgatttcgagggcttgcctgtccgacaatggcgcagcgaatgggtgagcatcgctcctccgccacctcccgacgtgaccaggaagaacgacgtttggggaatcgagctgcctcatggcatgccaaaggactccaatctgctgccggcccatacccaagagcttctacgagccgctcgctcgggcagactctacaagcgacctgccccagccgaagaggaagaacccgaggtcgacgccctccaggcagagaagaatgagaagaaagaggaggatcccagcaccaaaggcttccaaattaaggtctggaagcaggtcgcccgcaacgccgaaggctctacgctttcctatctggccaagaggcggaagggaatcgtcacactttcgtccgatctccccgctggtgcgcccgccggtcccaccgtcaccaaagccactgtccgtcgcgtcgatgccgctggaaacccctacacccaagagatcaccctgaacgaggggcagccggtggatggagagatcatatcgaccacggttgtggccgtcccggtacccaatctggttggcgacgtatctgtgtcagcaacacccgtgcgcaaacgccctccgccgccgaagaggaagcccaagggacctggtcgaggtcggaggaagaagatgataccctctctgccactaaacccgaacgcgggcccatcagctgccgccgctgcaggtgctgtgcagggtgtgaagatggagggcgcccaggtaagtggtcataatatcaatgcacaacacgccgaatctccgcctaacgatagtagatcgcgctacccggtgatggaaactcgaagaatcaagacgtcgaaatggcagataatgacgatggagatgacggtgacgacggcgaagacgacgacgaagaaggagatgacgatgaggatggcgacggcgccgatggggagacgggctctatgtcgcgggctgacagcgaaattaaatctgaccagatggacatcacgccttcactcgatccagttgagccgattggtatcaagcagcagactccacccgaggaattatctcccttggccacacccagtcttgcgccaccggatattccctcgtcacatcttgaaggcagccctctgaagaatgtcacttccgccctatcgcccgtggaagccccccctgttcctacgctgccaatagatttacccgctccatccgacgacatagaggccacgaaattgccggtcgatgtctctgcaccagtacccgaactagcggctcccaaagatgagccagtgccagttgattctccaatgcagaacacaaccgagcctgtaccagatgacgtcaagcccgcaaatggtgtagatgtggaaatggtcgacgtcaacgaaagcactcccgccatcgtaccggagacagccgcaacaaccgatccagtcgacaacggcgcagcagttgaaccggaagctcgagaaccctcagcaccagaggtcgtcgagacaatcgaagagcccgctactaatctgccaccccttgtggaaacggtgcaagaagcacaagcgacgatagctacggaaccggctgaagaggttacaaaagctgaacctactgagactctaccttccgtagaaaccgtcactgaagaagttgttgcccctgtagttgctaaagagccgacaccacctccggtccctgcggttgagccggcctcagaatctaccttgttgacagaagataccgagcccgtccaggaagtgagtgccgagcaacctgaggaggctcccgctgcggaggagaagccgatccccctgccagtcttagcagaagtgcgagaggaacaagctgtaccaccatctcaagaggatctggcggctaatagccccgatctcttcagtggtcttgaagcagcactgaaccaagaaggacccagcagcaatgaacccgctcacccagagcctgaggttccagctgaaattacagacgctaagaccgaggtggatccgcctgcagaatagaatctaagagcggatcacactgaatggtcagcatgggaagcatgcctggaggtcatgtacgttgtaaattagcaaacgagagcaggagcggcatggcacttttgtatcatggagcagcgcggttggctacggttacatgagcattgatagcacgttttttcaagctgtttcgttacattattatagcttacattcaagtcatatattgacataagcgcttctgagcgttcttattcatgaattgcgatcca

SEQ ID NO: 20819 - DNA, 342 bp, Muscodor strobelii
  misc_feature: SGI cDNA ID NO. 567036
  misc_feature: Reduced expression when VOC is produced
  misc_feature: Encodes the peptide sequence at SEQ ID NO 20820
atgtctatagtttcagccctcaagggcgacctgccgcagcaggctcggtcgttgtaccgacaactcctccgccagggcgagcaattccaagcctacaacttccgcgagtatgcgaagcgccggacgagagacgcatttcgggaacaccaggcagtagaggatccgagacagatacaagagttgcttcagaagggaatcaaggagctacaggttatgaagagacaaacggtcgtcagtcagttctaccagatcgatcggttggtcgtagagggtggcatggcgggcaaagaaaagggcaactctggaggacggacgcggcagaaggatacaggctgggactaa

SEQ ID NO: 20820 - protein, 113 aa, Muscodor strobelii
  misc_feature: SGI Peptide ID NO. 567036
  misc_feature (10)..(74): Pfam Id: PF05347 Pfam Desc: Complex 1 protein (LYR family)
  misc_feature (2)..(113): NCBI GI: 261353653 Blast Desc: conserved [Verticillium albo-atrum VaMs.102]
  misc_feature (1)..(113): NCBI GI: 256731905 Blast Desc: [Nectria haematococca mpVI 77-13-4]
  misc_feature (1)..(111): NCBI GI: 46105272 Blast Desc: FG00264.1 [Gibberella zeae PH-1]
  misc_feature (1)..(113): NCBI GI: 154297168 Blast Desc: BC1G_12243 [Botryotinia fuckeliana B05.10] gi|150843072|gb|EDN18265.1| BC1G_12243 [Botryotinia fuckeliana B05.10]
  misc_feature (1)..(113): NCBI GI: 169594910 Blast Desc: SNOG_00185 [Phaeosphaeria nodorum SN15] gi|160700969|gb|EAT91680.2| SNOG_00185 [Phaeosphaeria nodorum SN15]
  misc_feature (1)..(113): NCBI GI: 164429621 Blast Desc: NCU02007 [Neurospora crassa OR74A] gi|157073553|gb|EAA35636.2| NCU02007 [Neurospora crassa OR74A]
  misc_feature (1)..(92): NCBI GI: 156057167 Blast Desc: SS1G_04314 [Sclerotinia sclerotiorum 1980] gi|154702100|gb|EDO01839.1| SS1G_04314 [Sclerotinia sclerotiorum 1980]
  misc_feature (1)..(113): NCBI GI: 261193693 Blast Desc: iron-sulfur cluster biosynthesis protein Isd11 [Ajellomyces dermatitidis SLH14081] gi|239588857|gb|EEQ71500.1| iron-sulfur cluster biosynthesis protein Isd11 [Ajellomyces Isd11
  misc_feature (1)..(113): NCBI GI: 259482392 Blast Desc: TPA: iron-sulfur cluster biosynthesis protein Isd11, (AFU_orthologue; AFUA_3G06492) [Aspergillus nidulans FGSC A4]
  misc_feature (1)..(113): NCBI GI: 189202606 Blast Desc: conserved [Pyrenophora tritici-repentis Pt-1C-BFP] gi|187984738|gb|EDU50226.1| conserved [Pyrenophora tritici-repentis Pt-1C-BFP]
  misc_feature: Useful for introducing or modulating the production of volatile compounds
MSIVSALKGDLPQQARSLYRQLLRQGEQFQAYNFREYAKRRTRDAFREHQAVEDPRQIQELLQKGIKELQVMKRQTVVSQFYQIDRLVVEGGMAGKEKGNSGGRTRQKDTGWD

SEQ ID NO: 20821 - DNA, 882 bp, Muscodor strobelii
  misc_feature: SGI EST ID NO. CUFF.48969.0
  misc_feature: Variant of the nucleotide sequence at SEQ ID NO 20819
catctatccccgatctgtcaatcatttgcgactctcaactgcgacatacatacgccaattcgcttccaagtgatcgccaatatacctgcgcatacctgaaaaaatcggcatgtctatagtttcagccctcaagggcgacctgccgcagcaggctcggtcgttgtaccgacaactcctccgccagggcgagcaattccaagcctacaacttccgcgagtatgcgaagcgccggacgagagacgcatttcgggaacaccaggcagtagaggatccgagacagatacaagagttgcttcagaagggaatcaaggagctacaggttatgaagagacaaacggtcgtcagtcagttctaccagatcgatcggttggtcgtagagggtggcatggcgggcaaagaaaagggcaactctggaggacggacgcggcagaaggatacaggctgggactaaagttgaaacggcaatggagcgaatagacccgagaagatctattgagtcaggccagatgtataatgctcagaaccgctcggcctctgtatcactacttatcatgactatgcacatacaattgtaaattaggcgccttgcggattcaggcgattcgagtgcccatcactttgcatacagcgaaaccagagaagcaactggaggaagcgcacgctgtcctgcggttcaagagactgcggcggcaacgatgatcaactcaactccagactgcccgcatgaataaagacagatcaaacacctttttgattcaatgaaataatgtgtcaaattgctaccttaatgtaagagcaaatccgttttggcattgaggacccagacctattgaatgtctccctcgagcctgtagacaatacagtgcgcgtgaatgcactgtg

SEQ ID NO: 20822 - DNA, 2793 bp, Muscodor strobelii
  misc_feature: SGI cDNA ID NO. 567037
  misc_feature: Encodes the peptide sequence at SEQ ID NO 20823
atgacgcctcacacatatgggtactcaaataaaacgccaaccaaattcgacgaataccagaacttagcttctgctggctacgcgaaggcgaagagtttcgcccaggacttggacgagggaaaatactccttcgccctcatccactgcatacagactgttgagtcaaagcccaagtttgctggtgagggcatgcagatacgagcactactcgtgaagagacgtttcgagggcaagttgaccattgaggcaaaacgggaagtgctggctatcatgcagaagaccaacagcttagagcacacgctcagtgttcccagacaactgcacagcactggcgtgcagcgtgcagatgtcgcggtcctgaaactcggcacttttcagctgacttctagcggtctccacgctgccatgaggcccaatcaatcgacgaatcttgtcgaaatcatcgctttcttggactctggcgttgatattctcctgggccatggtgcgaatcccaacatgaccagcgaaggtcatgtacttgatctcgataaccggtcagaggcaccccattacgtacctgagcttgtgctgcccattcacgaagccatacggaatgccgatgtccgaatgatacagttattggtaagggcgggtgctgatatcaataaagtatcaagcggcggctggttgccccttgatatggccttgatcgatcgtcaggtggcagttatcgatgaacttcttcgctcaggggcccatttctccgattatgatgacacaacgcctgatcacgccgtacggaaagaaggagcggaagcactcttgtacgcagctacgcatactgactggtatccatcatcagcgtgttatgaagactacaaagcactcctacgatgcagctgtatggataaaactgagaggctctcttcctctgattgtttcaagcttcacgagaatatggaatgcttgtcgcgagctgcagaagagggttgccggttttgcggcgttattctgcgagcgatagatgagcctatcgagatccgttcacaccatgctggaaggctgctggaacgcatgagtccttcatcgagccaggtctatatacatctgagacttcccaaacatgtatatgtgactgtccagaataacgtggccgagctattgttggagtatctattcgaaagtaccctcaaacacttgcctcgtacaatagactacgattccagcacggcttcgccaggttcagtagagaccatgaaaggatggattgatagttgtcagatgattcacggaagcacttgcgacgctcgcggctcggtaccactaccgactcgagttctcgatgttgaaaacggcgacaaagtctccctgttcgagacgaatggcacacatggtcaatactgtgctttatcatattgctgggggagtgagtcctcatcacatcagactactgagggcaacctggaaaagcacaaagcaggaatcagtctagaagagctaccacttacattgcgcgacgccatccaggtttgtcgcagccttaagttccggttcatatggatcgacgctctgtgcatcattcaagatgaccctgaggattgggcagaagaggcttccagaatgcaccaagtttacgcgaatgccttcttgactatcacgacttctaccgggcgtagttcacatgatggcctgttccgtccacatccaaaaggatttttcaatcatcagcaatttcatacgcgcctgccaaaacgatatcgctcatttgattcgccgctcgtacgagactcagacttatccattttcaacaggcctcgcctgttatcatatctagctatttatccttgcccaaatcttccgtggatgggtcttctcaatagcccgatagagacacgggcatggacttttcaagagtatctattgagtaagcgcattctatcattcggagagggcattatcttctgggaatgccttgacgcaagcggcacagagattgatccagatggtcgtcgaaactacatacaactgcctgacagatacaaattgaagtcatatttcaatagccatatgataaaatcgacaagccaaaagtcaaaagtcaccggagggcacatgagtacagaggatcacctagcagcatattgtcaattgctcgaggcctactcgaaccggatggtcacgaaaccatcggatcgcataacggccattctaggactaggacaagtgttcgaaaagaaaacaagcaatgaatctgttggtggtattttaaagggggagcacacgctggcgagtcttctgtggtttctgcaagaaccttctggccacgttagaactcaaccattccccagctggagctgggcttcgataccaccagacccagacaattacattttcaatgccacatgcaatacaaaggaagtccaattggaatggcaagcgaatatattgtcgctcgactacgagtcggacatggcacagacttggctccggggtcgcatcacacttgaagggccagtcggaaaattggaagacgacgagagctttgtcgcgagtgttcgaggaactttccatccgacagcttacttgtatgttgatttgccgcaagatctagatgttgtaaagagcggatccgaaacaatctggtatgtcgaggttgcaactttgataggagaccaaggccgtcccagcaaggtaagactcttgcttcgtctagtcggcgaacctgaggtcaggacgtttgagcgtgttggatactatcagcaagtaatcggcaaagacgtgaacgctactgaaagaatcatcttggtttga

SEQ ID NO: 20823 - protein, 930 aa, Muscodor strobelii
  misc_feature: SGI Peptide ID NO. 567037
  misc_feature (461)..(632): Pfam Id: PF06985 Pfam Desc: Heterokaryon incompatibility protein (HET)
  misc_feature (192)..(220): Pfam Id: PF00023 Pfam Desc: Ankyrin repeat
  misc_feature (461)..(547): Pfam Id: PF06985 Pfam Desc: Heterokaryon incompatibility protein (HET)
  misc_feature (154)..(911): NCBI GI: 46115998 Blast Desc: FG03841.1 [Gibberella zeae PH-1]
  misc_feature (403)..(802): NCBI GI: 256720767 Blast Desc: NECHADRAFT_85408 [Nectria haematococca mpVI 77-13-4]
  misc_feature (311)..(761): NCBI GI: 46126545 Blast Desc: FG07650.1 [Gibberella zeae PH-1]
  misc_feature (393)..(782): NCBI GI: 225558616 Blast Desc: HET domain-containing protein [Ajellomyces capsulatus G186AR]
  misc_feature (393)..(782): NCBI GI: 154286502 Blast Desc: [Ajellomyces capsulatus NAm1] gi|150407687|gb|EDN03228.1| [Ajellomyces capsulatus NAm1]
  misc_feature (406)..(782): NCBI GI: 256724255 Blast Desc: NECHADRAFT_87557 [Nectria haematococca mpVI 77-13-4]
  misc_feature (340)..(782): NCBI GI: 39955223 Blast Desc: MGG_08988 [Magnaporthe grisea 70-15] gi|145021053|gb|EDK05182.1| MGG_08988 [Magnaporthe grisea 70-15]
  misc_feature (324)..(897): NCBI GI: 46115654 Blast Desc: FG03669.1 [Gibberella zeae PH-1]
  misc_feature (401)..(781): NCBI GI: 154304664 Blast Desc: BC1G_08071 [Botryotinia fuckeliana B05.10] gi|150853971|gb|EDN29163.1| BC1G_08071 [Botryotinia fuckeliana B05.10]
  misc_feature (415)..(827): NCBI GI: 169777515 Blast Desc: [Aspergillus oryzae RIB40] gi|83771960|dbj|BAE62090.1| protein product [Aspergillus oryzae]
MTPHTYGYSNKTPTKFDEYQNLASAGYAKAKSFAQDLDEGKYSFALIHCIQTVESKPKFAGEGMQIRALLVKRRFEGKLTIEAKREVLAIMQKTNSLEHTLSVPRQLHSTGVQRADVAVLKLGTFQLTSSGLHAAMRPNQSTNLVEIIAFLDSGVDILLGHGANPNMTSEGHVLDLDNRSEAPHYVPELVLPIHEAIRNADVRMIQLLVRAGADINKVSSGGWLPLDMALIDRQVAVIDELLRSGAHFSDYDDTTPDHAVRKEGAEALLYAATHTDWYPSSACYEDYKALLRCSCMDKTERLSSSDCFKLHENMECLSRAAEEGCRFCGVILRAIDEPIEIRSHHAGRLLERMSPSSSQVYIHLRLPKHVYVTVQNNVAELLLEYLFESTLKHLPRTIDYDSSTASPGSVETMKGWIDSCQMIHGSTCDARGSVPLPTRVLDVENGDKVSLFETNGTHGQYCALSYCWGSESSSHQTTEGNLEKHKAGISLEELPLTLRDAIQVCRSLKFRFIWIDALCIIQDDPEDWAEEASRMHQVYANAFLTITTSTGRSSHDGLFRPHPKGFFNHQQFHTRLPKRYRSFDSPLVRDSDLSIFNRPRLLSYLAIYPCPNLPWMGLLNSPIETRAWTFQEYLLSKRILSFGEGIIFWECLDASGTEIDPDGRRNYIQLPDRYKLKSYFNSHMIKSTSQKSKVTGGHMSTEDHLAAYCQLLEAYSNRMVTKPSDRITAILGLGQVFEKKTSNESVGGILKGEHTLASLLWFLQEPSGHVRTQPFPSWSWASIPPDPDNYIFNATCNTKEVQLEWQANILSLDYESDMAQTWLRGRITLEGPVGKLEDDESFVASVRGTFHPTAYLYVDLPQDLDVVKSGSETIWYVEVATLIGDQGRPSKVRLLLRLVGEPEVRTFERVGYYQQVIGKDVNATERIILV

SEQ ID NO: 20824 - DNA, 2502 bp, Muscodor strobelii
  misc_feature: SGI cDNA ID NO. 567038
  misc_feature: Encodes the peptide sequence at SEQ ID NO 20825
atgcttgaaccctgggatgagcttctcatcatccggaaagagcgccactcatgcgaaaaggatgttgaagctatcaaggaaacatgcgcccgagaacacggcaaagcacatccagtagaatgttcagattgctggaaaatactgctgaatcgcatgagagatcggtaccttctatccgcggataaggaatggtttgccggccggagggcatttttacaagaactggactccctattctcacaagcactacagcatgaagtcgatatgaataccattgagcagcgaataatggaggaaaagaacgaatggtatcgagataaagtccggaacctaggtctacatatcgctgcaaaaacaccagccgatgcgcggacactacagcaaaagcagaacgatagagcgactccgattgaacagcttcgtctagagttaaaagagagcctgggaaaagacttcgagctttcgaacgaggaattcaataacttcctcgagcagctcaaagcagcccaatcctcaccgcagtccgcacaggccaaagcagacgcatacatagaagtcctcttccgccccggccgtgactcagcagccgacgcaaaatcacaaaaatacatggacatgatcaaagacgggggactcgtatccgcagtgatgagcaccatatacctacaccagcaatctgtcaagggtggacaagaagaaaaacaacagcttcagaagaaactggaagagctcacgagagccaaagcagctcatgaggctgataaggcgaagagagacgaggcgagacaggctaagatacggactactgcaagttcggggactgagacaccgttaggaaattgttcggttcttacggatttatataaggtaccggggcgagaacccagtttcttctgttcggacgggtgtcttgaggatggctaccaacaacacgcaaaagaaaaccacacctgtgcagccaggtcagactgcacaacgctgcacgatccggacatagaaatggccggtacggacggtacggacgggcccacgacaatactctgcaaagaatgcgtactagacctcgagaccgagtccgttttttgctcgccgaggtgtttcgatgcgaatttccaggatcatagggaagatgtgcattttagggagagggaaaaacagggcatggaggttgatgatgagaagatgcttgtgtttgatcccgatcagcctaggacttatagggcgagggttatcgaggagcattttgttacacttagagatgcgctcgcggagtgggaaggaaagttcgggggaaggttttggatttggccagatccggacaatatcaacaatggatctctgtcatcatgcaacccaggcaattcggatctttacttatcaatctttggcgcatcgggtacactcaacttcactaatatcacaacattgaacaccttgtctatcgacggaagtcctgatctagaggtcctagacttctctcaactcgagcatctagcgcatttagagatcaaaaatgggagtactacaaacgatctgaactccaatttcgcatttgccaatattactgccttcaatagtattgatattgacagctgcgtcaacctttctcgtctcgaagacgttgaagagttccgcttaaccggtcggccaacttgcgagtacagcctaaccagtctcaaatcaattggcgtgttcgtaataagtaacgccttgaacacgatcatcctaggtccttaccccgggtttaccccatctatacaagtcaccggaccgatgactattgagaatacagttcatgcccctccgtacaacactgatttcgacacggataataggctcagctttagtcgagttgaaaccgcaagagatctggggatcaaattaaataccaacatcgagatcgacttcagtggactgaggacagtcagtgaacgtagcaatctgttcccgggactaacctctgtggtgaaggatatgactatcgagccctgggacaccgactttgattgttcagctctagagctgcagcacgcggctggcattatacgagctcttacttgcaatgtgccaagtagcagtacgagtacatctcccacaagcagccggactagtacaaccggaacatctacagccaccacgacgtccgctacgagtcacaaccatcgcctatccatcggcgcttacgcaggcattggtatcggatctggagttgcgctgattggtgtgatactggctacaatatggctcattttgcatcataaacgccgtctgaagaaaatccaagagaaaagcaacactcggcccgaagagtctgggggagagtccgaggtaggaccaccggatactcatgggactatggagtttgacggcacaggcataatcagagagaaacccgatgatccgttaacagaacttgacatagggacgaatgagctgccagatgacccgttgatcgagctgccaattggggatgtagagctatcgggcgattcgcgacgttaa

SEQ ID NO: 20825 - protein, 833 aa, Muscodor strobelii
  misc_feature: SGI Peptide ID NO. 567038
  misc_feature (3)..(379): NCBI GI: 256733664 Blast Desc: NECHADRAFT_35531 [Nectria haematococca mpVI 77-13-4]
  misc_feature (3)..(380): NCBI GI: 46129260 Blast Desc: FG08815.1 [Gibberella zeae PH-1]
  misc_feature (25)..(426): NCBI GI: 116193661 Blast Desc: CHGG_06548 [Chaetomium globosum CBS 148.51] gi|88182461|gb|EAQ89929.1| CHGG_06548 [Chaetomium globosum CBS 148.51]
  misc_feature (39)..(398): NCBI GI: 85115388 Blast Desc: NCU01999 [Neurospora crassa OR74A] gi|28926660|gb|EAA35628.1| conserved [Neurospora crassa OR74A] gi|38566879|emb|CAE76184.1| [Neurospora crassa]
  misc_feature (1)..(430): NCBI GI: 39943158 Blast Desc: MGG_03659 [Magnaporthe grisea 70-15] gi|145009751|gb|EDJ94407.1| MGG_03659 [Magnaporthe grisea 70-15]
  misc_feature (19)..(431): NCBI GI: 171685087 Blast Desc: protein product [Podospora anserina] gi|170942504|emb|CAP68156.1| protein product [Podospora anserina]
  misc_feature (334)..(440): NCBI GI: 261353556 Blast Desc: [Verticillium albo-atrum VaMs.102]
  misc_feature (690)..(773): NCBI GI: 242789442 Blast Desc: conserved [Talaromyces stipitatus ATCC 10500] gi|218717948|gb|EED17368.1| conserved [Talaromyces stipitatus ATCC 10500]
MLEPWDELLIIRKERHSCEKDVEAIKETCAREHGKAHPVECSDCWKILLNRMRDRYLLSADKEWFAGRRAFLQELDSLFSQALQHEVDMNTIEQRIMEEKNEWYRDKVRNLGLHIAAKTPADARTLQQKQNDRATPIEQLRLELKESLGKDFELSNEEFNNFLEQLKAAQSSPQSAQAKADAYIEVLFRPGRDSAADAKSQKYMDMIKDGGLVSAVMSTIYLHQQSVKGGQEEKQQLQKKLEELTRAKAAHEADKAKRDEARQAKIRTTASSGTETPLGNCSVLTDLYKVPGREPSFFCSDGCLEDGYQQHAKENHTCAARSDCTTLHDPDIEMAGTDGTDGPTTILCKECVLDLETESVFCSPRCFDANFQDHREDVHFREREKQGMEVDDEKMLVFDPDQPRTYRARVIEEHFVTLRDALAEWEGKFGGRFWIWPDPDNINNGSLSSCNPGNSDLYLSIFGASGTLNFTNITTLNTLSIDGSPDLEVLDFSQLEHLAHLEIKNGSTTNDLNSNFAFANITAFNSIDIDSCVNLSRLEDVEEFRLTGRPTCEYSLTSLKSIGVFVISNALNTIILGPYPGFTPSIQVTGPMTIENTVHAPPYNTDFDTDNRLSFSRVETARDLGIKLNTNIEIDFSGLRTVSERSNLFPGLTSVVKDMTIEPWDTDFDCSALELQHAAGIIRALTCNVPSSSTSTSPTSSRTSTTGTSTATTTSATSHNHRLSIGAYAGIGIGSGVALIGVILATIWLILHHKRRLKKIQEKSNTRPEESGGESEVGPPDTHGTMEFDGTGIIREKPDDPLTELDIGTNELPDDPLIELPIGDVELSGDSRR

SEQ ID NO: 20826 - DNA, 1900 bp, Muscodor strobelii
  misc_feature: SGI EST ID NO. CUFF.48895.0
  misc_feature: Variant of the nucleotide sequence at SEQ ID NO 20824
ttgctacttgcatactaacacgtcaactttacgaacccaagacattcgtgacaagtttgactgtaatcacttaaacacttgaatatctacctacgcgaatgaggggagacatagcattctaccaagatctgatcagctcactttaactgtaggcgcgcatccttgacgacctttaagcttcaccgagacttagctttgcattcaccgagtactctcaatacactctcaccgctaaaccaacgaatcaaatcaaacagtccagagtcattacgctcgctttaacaattcattcagagtgccacccagagcaacaagaagtgagacgcgccgagaaacgggtatcttcatttgcccctctcatagtgctctgtggagcccagcacataagccacgatgcttgaaccctgggatgagcttctcatcatccggaaagagcgccactcatgcgaaaaggatgttgaagctatcaaggaaacatgcgcccgagaacacggcaaagcacatccagtagaatgttcagattgctggaaaatactgctgaatcgcatgagagatcggtaccttctatccgcggataaggaatggtttgccggccggagggcatttttacaagaactggactccctattctcacaagcactacagcatgaagtcgatatgaataccattgagcagcgaataatggaggaaaagaacgaatggtatcgagataaagtccggaacctaggtctacatatcgctgcaaaaacaccagccgatgcgcggacactacagcaaaagcagaacgatagagcgactccgattgaacagcttcgtctagagttaaaagagagcctgggaaaagacttcgagctttcgaacgaggaattcaataacttcctcgagcagctcaaagcagcccaatcctcaccgcagtccgcacaggccaaagcagacgcatacatagaagtcctcttccgccccggccgtgactcagcagccgacgcaaaatcacaaaaatacatggacatgatcaaagacgggggactcgtatccgcagtgatgagcaccatatacctacaccagcaatctgtcaagggtggacaagaagaaaaacaacagcttcagaagaaactggaagagctcacgagagccaaagcagctcatgaggctgataaggcgaagagagacgaggcgagacaggctaagatacggactactgcaagttcggggactgagacaccgttaggaaattgttcggtgtgtgggaagggggttgataggcagaagcttgttgtttgtcctatttgtcaggttcttacggatttatataaggtaccggggcgagaacccagtttcttctgttcggacgggtgtcttgaggatggctaccaacaacacgcaaaagaaaaccacacctgtgcagccaggtcagactgcacaacgctgcacgatccggacatagaaatggccggtacggacggtacggacgggcccacgacaatactctgcaaagaatgcgtactagacctcgagaccgagtccgttttttgctcgccgaggtgtttcgatgcgaatttccaggatcatagggaagatgtgcattttagggagagggaaaaacagggcatggaggttgatgatgagaagatgcttgtgtttgatcccgatcagcctaggacttatagggcgagggttatcgaggagcattttgttacacttagagatgcgctcgcggagtgggaaggaaagttcgggggaaggttttggatttgtgaggtcgtgatgaggggggattgtattataggggcgaatgcgatgagttgtattattcatcatcaaaacgtgtcttcgataagttaggtgcttaatgataagtatttctattgagttctcaggccggttttgaagccatcaacat

SEQ ID NO: 20827 - DNA, 285 bp, Muscodor strobelii
  misc_feature: SGI cDNA ID NO. 567039
  misc_feature: Reduced expression when VOC is produced
  misc_feature: Encodes the peptide sequence at SEQ ID NO 20828
atggccgacaaactccgcacccagcaagagctcgagcggctccaagccaagtacatcggaaccggtcaccccgacacgacctcgtgggaatggcgaaccaacatcgcgcgcgacacctactcgagcatcgtcggccacccgccgcatctgtcatacatctccctcgcccagaacgagcccgccgccaaggtccgcgcccagctgatacgcaagatgatccagccctgtggcccgccgccgccgagggagggagaagagcctgtgatgcggaatggggaggcttga

SEQ ID NO: 20828 - protein, 94 aa, Muscodor strobelii
  misc_feature: SGI Peptide ID NO. 567039
  misc_feature (3)..(85): Pfam Id: PF07189 Pfam Desc: Splicing factor 3B subunit 10 (SF3b10)
  misc_feature (1)..(83): NCBI GI: 46129258 Blast Desc: FG08814.1 [Gibberella zeae PH-1]
  misc_feature (2)..(83): NCBI GI: 256733655 Blast Desc: [Nectria haematococca mpVI 77-13-4]
  misc_feature (1)..(76): NCBI GI: 164429616 Blast Desc: NCU02000 [Neurospora crassa OR74A] gi|38566880|emb|CAE76185.1| conserved [Neurospora crassa] gi|157073551|gb|EAA35629.2| conserved [Neurospora crassa OR74A]
  misc_feature (1)..(86): NCBI GI: 116193659 Blast Desc: conserved [Chaetomium globosum CBS 148.51] gi|88182460|gb|EAQ89928.1| conserved [Chaetomium globosum CBS 148.51]
  misc_feature (16)..(86): NCBI GI: 145615964 Blast Desc: conserved [Magnaporthe grisea 70-15] gi|145009752|gb|EDJ94408.1| conserved [Magnaporthe grisea 70-15]
  misc_feature (1)..(80): NCBI GI: 115389458 Blast Desc: ATEG_03056 [Aspergillus terreus NIH2624] gi|114194630|gb|EAU36330.1| ATEG_03056 [Aspergillus terreus NIH2624]
  misc_feature (1)..(80): NCBI GI: 238504000 Blast Desc: splicing factor 3B subunit 10 (SF3b10), [Aspergillus flavus NRRL3357] gi|220690703|gb|EED47052.1| splicing factor 3B subunit 10 (SF3b10), [Aspergillus flavus NRRL3357]
  misc_feature (1)..(80): NCBI GI: 255942557 Blast Desc: Pc18g02030 [Penicillium chrysogenum Wisconsin 54-1255] gi|211586780|emb|CAP94427.1| Pc18g02030 [Penicillium chrysogenum Wisconsin 54-1255]
  misc_feature (1)..(80): NCBI GI: 145254935 Blast Desc: An18g03460 [Aspergillus niger] gi|134084393|emb|CAK48732.1| protein product [Aspergillus niger]
  misc_feature (1)..(80): NCBI GI: 119496651 Blast Desc: splicing factor 3B subunit 10 (SF3b10), [Neosartorya fischeri NRRL 181] gi|119413261|gb|EAW23202.1| splicing factor 3B subunit 10 (SF3b10), [Neosartorya fischeri NRRL 181]
  misc_feature: Useful for introducing or modulating the production of volatile compounds
MADKLRTQQELERLQAKYIGTGHPDTTSWEWRTNIARDTYSSIVGHPPHLSYISLAQNEPAAKVRAQLIRKMIQPCGPPPPREGEEPVMRNGEA

SEQ ID NO: 20829 - DNA, 1314 bp, Muscodor strobelii
  misc_feature: SGI EST ID NO. CUFF.49350.0
  misc_feature: Variant of the nucleotide sequence at SEQ ID NO 20827
ctaacgacactcttgaattccacatagcttcatccgagcataggtacaacaccacaacgcccatcccgcacacgtatcctctagctcccgtaatattccatcatggccgacaaactccgcacccagcaagagctcgagcggctccaagccaagtacatcggaaccggtcaccccgacacgacctcgtgggaatggcgaaccaacatcgcgcgcgacacctactcgagcatcgtcggccacccgccgcatctgtcatacatctccctcgcccagaacgagcccgccgccaaggtccgcgcccagctgatacgcaagatgatccagccctgtggcccgccgccgccgagggagggagaagagcctgtgatgcggaatggggaggcttgaaaaaggtttgattgcgactacgaaatcttgatttacttgtgaagagtatgcgattgcaaggatggcatggaaatgcgatgttggaggaatattctattctctctgcggatgattacacgttatgaagactccgacactgttgtgcatcctcagcgcatgtactagcaactggctgtggcgaccaacgcccatcgccgctcacgaatttccggatcttaacacggattcgaaaccatcgccaacactataatcaacagtcttaagccgcctcttcagcctcctctgcctcttcctcctcctcaccatcgggctctctacgatctttcgcggccctgcgaacccccagactcttctcgagcttcgtgtcaaagtcatctggggggtcacgccaaacctcgcccacgaaatcggccatattctggggcgtcacctccgtcttgccccttggtccgacacaccacgtgatgacgtcctcgtccccctccactttctcgacaaccttctccagatacccctgtcgcacgagtttcgccatgacgttctcggttctgtccatgggcagatgctgtgctgcgttgaggcgcgttagatgacgtctcagcttggcgtcgctcatctcgccgtttgacaacgttataagtgtgatgacgagggtgtagaaggcgacatatgatgattcgtcgctctggctggggatgcgggagggcccgataatagcctcggttctgaatgctgggggtagggtgctgatcaggatgtattgtcgggaggaagcggttgccttagaacctctcttaacagcttctagagttgggcgaaagcgccgattagtaggcagacagacaggcaataaagacactacaaattactgacttgtcttctctcgcaatgtgcgcttctccttaaccggcagctcgaccatcttca

SEQ ID NO: 20830 - DNA, 945 bp, Muscodor strobelii
  misc_feature: SGI cDNA ID NO. 567040
  misc_feature: Encodes the peptide sequence at SEQ ID NO 20831
atgccgccgcaagcccagcgacggaggcgctccggcaacgacgacgatgacagccctgcccctccccaacgacgccagagacgtgcacaagactctgacgacgaatccgctgcctcttcagaaaatgaacaagacccagacgtcgatatgggggccacggggcttgcgaacggagtctccatcgagcaactcattaacaagctggtgcgctacgccctagcttgcgagtatgccaggctaccgattaagagagacggcatacgagagaaagtgctcggtaacaacgccagatccttccgacgtgtgtttgacggcgcccaggagcaactgcagagcgtcttcggcatgaagatggtcgagctgccggttaaggagaagcgcacattgcgagagaagacaaaagctgttaagagaggttctaaggcaaccgcttcctcccgacaatacatcctgatcagcaccctacccccagcattcagaaccgaggctattatcgggccctcccgcatccccagccagagcgacgaatcatcatatgtcgccttctacaccctcgtcatcacacttataacgttgtcaaacggcgagatgagcgacgccaagctgagacgtcatctaacgcgcctcaacgcagcacagcatctgcccatggacagaaccgagaacgtcatggcgaaactcgtgcgacaggggtatctggagaaggttgtcgagaaagtggagggggacgaggacgtcatcacgtggtgtgtcggaccaaggggcaagacggaggtgacgccccagaatatggccgatttcgtgggcgaggtttggcgtgaccccccagatgactttgacacgaagctcgagaagagtctgggggttcgcagggccgcgaaagatcgtagagagcccgatggtgaggaggaggaagaggcagaggaggctgaagaggcggcttaa

SEQ ID NO: 20831 - protein, 314 aa, Muscodor strobelii
  misc_feature: SGI Peptide ID NO. 567040
  misc_feature (68)..(264): Pfam Id: PF01454 Pfam Desc: MAGE family
  misc_feature (1)..(290): NCBI GI: 145615966 Blast Desc: MGG_03657 [Magnaporthe grisea 70-15] gi|145009753|gb|EDJ94409.1| MGG_03657 [Magnaporthe grisea 70-15]
  misc_feature (1)..(296): NCBI GI: 85115396 Blast Desc: NCU02001 [Neurospora crassa OR74A] gi|28926662|gb|EAA35630.1| conserved [Neurospora crassa OR74A] gi|38566881|emb|CAE76186.1| conserved [Neurospora crassa]
  misc_feature (3)..(290): NCBI GI: 46129256 Blast Desc: FG08813.1 [Gibberella zeae PH-1]
  misc_feature (1)..(290): NCBI GI: 256734148 Blast Desc: NECHADRAFT_77977 [Nectria haematococca mpVI 77-13-4]
  misc_feature (60)..(301): NCBI GI: 156031058 Blast Desc: SS1G_14137 [Sclerotinia sclerotiorum 1980] gi|154700528|gb|EDO00267.1| SS1G_14137 [Sclerotinia sclerotiorum 1980]
  misc_feature (4)..(306): NCBI GI: 171685083 Blast Desc: protein product [Podospora anserina] gi|170942502|emb|CAP68154.1| protein product [Podospora anserina]
  misc_feature (60)..(312): NCBI GI: 154305623 Blast Desc: BC1G_07626 [Botryotinia fuckeliana B05.10] gi|150853145|gb|EDN28337.1| BC1G_07626 [Botryotinia fuckeliana B05.10]
  misc_feature (1)..(290): NCBI GI: 116193657 Blast Desc: CHGG_06546 [Chaetomium globosum CBS 148.51] gi|88182459|gb|EAQ89927.1| CHGG_06546 [Chaetomium globosum CBS 148.51]
  misc_feature (1)..(294): NCBI GI: 258564072 Blast Desc: [Uncinocarpus reesii 1704] gi|237908288|gb|EEP82689.1| [Uncinocarpus reesii 1704]
  misc_feature (1)..(301): NCBI GI: 212527784 Blast Desc: conserved [Penicillium marneffei ATCC 18224] gi|210073447|gb|EEA27534.1| conserved [Penicillium marneffei ATCC 18224]
MPPQAQRRRRSGNDDDDSPAPPQRRQRRAQDSDDESAASSENEQDPDVDMGATGLANGVSIEQLINKLVRYALACEYARLPIKRDGIREKVLGNNARSFRRVFDGAQEQLQSVFGMKMVELPVKEKRTLREKTKAVKRGSKATASSRQYILISTLPPAFRTEAIIGPSRIPSQSDESSYVAFYTLVITLITLSNGEMSDAKLRRHLTRLNAAQHLPMDRTENVMAKLVRQGYLEKVVEKVEGDEDVITWCVGPRGKTEVTPQNMADFVGEVWRDPPDDFDTKLEKSLGVRRAAKDRREPDGEEEEEAEEAEEAA

SEQ ID NO: 20832 - DNA, 1251 bp, Muscodor strobelii
  misc_feature: SGI cDNA ID NO. 567041
  misc_feature: Reduced expression when VOC is produced
  misc_feature: Encodes the peptide sequence at SEQ ID NO 20833
atgaggacggtccgtcttatcaaggacaattccaacaaagaaaacctcgcatggcgagacaagctaaggcgatgggcgcgttatgtttcccctactcctcagacggctcagcagacagccatcaacgagaggtctcttcccatccaggacctcaagcttccgttcgaccctcttggatcctcgactttatcgactcaaccaaacgccaccatcgagaatgacgccgggaattctctcatctggcccagcagcccacgcaccgtgacgaccgcccatttcggccacgtcctacatccgtatccagccgtcaaccccaaagagctcgacctcgagaaccaagaccaccgcttctcccacatcgcacctcatcccagtgctctgatcagcctcaacaagaacacagagtcgattgtggaaacaacttcgacaatcgtgctccatttctcgccgcccctaatcttaaatactaagacctcatcctcacctacaccgctgaccctcgaactccatctcgccgtctccgacacccgcatcctcggcgtccgcgcccttcgcgccgtgaagcaaacccaccacaccaccgtcctccttccatcggcacccgtagatctccgcctaacccaaacccagtacacgccgctcaacatttcgccaccatactccctcatgtcctacggtcccataccaaactatctcagcaaggccgtagtcgacctgcgaaaaggaaaacttgactttcccgcagtagccgagttcaggataccaccacatctcttcaccctcccccccaattccagagcaccgaccttggattcgaatatcgtttacgactacatgggtctcgagtttcaccgctccgccaaaatcccataccaagggcacgagctaacttacacctccatcgaggctggacaaggtggtggccgacgagcagaagtcaccatcacacccttacctcaacaaccccaacagccccaacaggtggaaatacaaacatcggcagaggaaacagccacagaacaagcaacctcggaagaagcaccctccgaagagtcatcaaaccccacctcagaaacagactcagaagtgacctcagaatcacccacagaagccaatctacaaccaaccaaacccctaacaaacgaagagcagctccaatcattcctaaaagtctgctcagacttcgccaataaccacgctctctggttcggcaccgacgcacaagaacaagacaacaacacctcaagctga

SEQ ID NO: 20833 - protein, 416 aa, Muscodor strobelii
  misc_feature: SGI Peptide ID NO. 567041
  misc_feature (16)..(319): NCBI GI: 46129254 Blast Desc: FG08812.1 [Gibberella zeae PH-1]
  misc_feature (15)..(315): NCBI GI: 85115400 Blast Desc: NCU02002 [Neurospora crassa OR74A] gi|28926663|gb|EAA35631.1| [Neurospora crassa OR74A] gi|38566882|emb|CAE76187.1| [Neurospora crassa]
  misc_feature (17)..(319): NCBI GI: 108794894 Blast Desc: [Beauveria bassiana]
  misc_feature (17)..(319): NCBI GI: 108794897 Blast Desc: [Beauveria bassiana]
  misc_feature (17)..(319): NCBI GI: 108794900 Blast Desc: [Beauveria bassiana]
  misc_feature (17)..(324): NCBI GI: 108794802 Blast Desc: [Beauveria bassiana]
  misc_feature (17)..(319): NCBI GI: 108794912 Blast Desc: [Beauveria bassiana]
  misc_feature (17)..(319): NCBI GI: 108794903 Blast Desc: [Beauveria bassiana]
  misc_feature (17)..(324): NCBI GI: 108794838 Blast Desc: [Beauveria bassiana]
  misc_feature (17)..(319): NCBI GI: 108794906 Blast Desc: [Beauveria bassiana]
  misc_feature: Useful for introducing or modulating the production of volatile compounds
MRTVRLIKDNSNKENLAWRDKLRRWARYVSPTPQTAQQTAINERSLPIQDLKLPFDPLGSSTLSTQPNATIENDAGNSLIWPSSPRTVTTAHFGHVLHPYPAVNPKELDLENQDHRFSHIAPHPSALISLNKNTESIVETTSTIVLHFSPPLILNTKTSSSPTPLTLELHLAVSDTRILGVRALRAVKQTHHTTVLLPSAPVDLRLTQTQYTPLNISPPYSLMSYGPIPNYLSKAVVDLRKGKLDFPAVAEFRIPPHLFTLPPNSRAPTLDSNIVYDYMGLEFHRSAKIPYQGHELTYTSIEAGQGGGRRAEVTITPLPQQPQQPQQVEIQTSAEETATEQATSEEAPSEESSNPTSETDSEVTSESPTEANLQPTKPLTNEEQLQSFLKVCSDFANNHALWFGTDAQEQDNNTSS

SEQ ID NO: 20834 - DNA, 2952 bp, Muscodor strobelii
  misc_feature: SGI cDNA ID NO. 567042
  misc_feature: Reduced expression when VOC is produced
  misc_feature: Encodes the peptide sequence at SEQ ID NO 20835
atgtttgcgagaagcgcgtcagcagtcggcgccgtctgcctcagatgccgtgtacaacaacgactttttcgccagtccgccgcctttcgatatgcatctgacgatgccctgaacgatgcctccgaagatgccgcacgccatgaagacgctagcaaaaggcatcgtgacagtctccaagagagtacctccaagtttgaggacttgcttaagcccgacgcagcttctgacgatacctctggcgacccaggcttcggacgagctacacccgctccagacgcccccgagcccgagcccgaccaacgcagtacctttgctaggttcgaggaagcgatcgctaactcgaaccggcagaaacggcagaaccaacggggcagcaaattcaacaagttcgaatatatagaggatttcaagatgcgcgacagaattgattccacggtcaagtctatgaccaactcgatagccaccgatccctcctctcaggcagcatctcagtccgcatcttcgtccttggaagtcaggagagtcgtgtcagaaccccgagagagcgttgcctacaggtcgctactggacagcaacgagctggtcgaagccacccggaccaggatgaagcacctgaagattcaccgcgactacaaatcaggcaataggcgctacagggaggacagcaggtctttaggcaccgtcgtgctcggcaagcccgccgccgctattctcatgagagaccacggcgctatcaagcgcaagcgacacgctgatctcaagaagcaaaggacccccgccacctcggcctccgacctcgaaaagttgatcgacagcgaaggcggcaaggccaccacccaggaagtgctatccagcatccaccagcttcagcctgttgacaagatgctgcgcgacaaagatttccgaaagctgcagaaagtgctgtccgaagggttcttgagcgcccagctcctgcagtacatcgactggcagaagtccaagcccacacaggcaccagtcgaacagagcgcaaaggaagaacgtgccaagctcgaaaagcaatatccttggatatacacaataaagccctggacgcaaacggcgacggaggagtccagccagaccgatggccatcagcctcccgcctacacatcagagaccacaacccctaaagagtacatcgctatccacatcatgcgggactgttggggtctgtctttggccgaattggggcctccactcggtgaaacccatgtcagactcatggacaccgagtttgccctcctgatgcgtggatcccaaagattcatgcagcagatcggtgaggatttgctcgattccggcgagaagatcgaggccctacgcagcaagaatacactgcgcttcgtgacggcgcagggcaaggtaaagcagctcctcgagacgctggacagggtcttcgagtcgatgtcaaccgctgtttttcgggtgccaacgaccgggttggttcattttgacgatgcaactctggaagaagtgggaaggatcaccaattcccaagtcaagtttaccaaaaaccgttccggaactctcagacagttacatgtcaaatggctcgatctaaagtcaagagtgcaacggggcttgaagccactcgaggacatcggccacatcgtctaccgtctcctcctcggcgcagcagcccagaaacacatatcacagatgttcgtccagcccggcgccatgaggacggtccgtcttatcaaggacaattccaacaaagaaaacctcgcatggcgagacaagctaaggcgatgggcgcgttatgtttcccctactcctcagacggctcagcagacagccatcaacgagaggtctcttcccatccaggacctcaagcttccgttcgaccctcttggatcctcgactttatcgactcaaccaaacgccaccatcgagaatgacgccgggaattctctcatctggcccagcagcccacgcaccgtgacgaccgcccatttcggccacgtcctacatccgtatccagccgtcaaccccaaagagctcgacctcgagaaccaagaccaccgcttctcccacatcgcacctcatcccagtgctctgatcagcctcaacaagaacacagagtcgattgtggaaacaacttcgacaatcgtgctccatttctcgccgcccctaatcttaaatactaagacctcatcctcacctacaccgctgaccctcgaactccatctcgccgtctccgacacccgcatcctcggcgtccgcgcccttcgcgccgtgaagcaaacccaccacaccaccgtcctccttccatcggcacccgtagatctccgcctaacccaaacccagtacacgccgctcaacatttcgccaccatactccctcatgtcctacggtcccataccaaactatctcagcaaggccgtagtcgacctgcgaaaaggaaaacttgactttcccgcagtagccgagttcaggataccaccacatctcttcaccctcccccccaattccagagcaccgaccttggattcgaatatcgtttacgactacatgggtctcgagtttcaccgctccgccaaaatcccataccaagggcacgagctaacttacacctccatcgaggctggacaaggtggtggccgacgagcagaagtcaccatcacacccttacctcaacaaccccaacagccccaacaggtggaaatacaaacatcggcagaggaaacagccacagaacaagcaacctcggaagaagcaccctccgaagagtcatcaaaccccacctcagaaacagactcagaagtgacctcagaatcacccacagaagccaatctacaaccaaccaaacccctaacaaacgaagagcagctccaatcattcctaaaagtctgctcagacttcgccaataaccacgctctctggttcggcaccgacgcacaagaacaagacaacaacacctcaagctga

SEQ ID NO: 20835 - protein, 983 aa, Muscodor strobelii
  misc_feature: SGI Peptide ID NO. 567042
  misc_feature (225)..(882): NCBI GI: 85115400 Blast Desc: NCU02002 [Neurospora crassa OR74A] gi|28926663|gb|EAA35631.1| [Neurospora crassa OR74A] gi|38566882|emb|CAE76187.1| [Neurospora crassa]
  misc_feature (224)..(975): NCBI GI: 34481737 Blast Desc: [Podospora anserina]
  misc_feature (224)..(974): NCBI GI: 171685081 Blast Desc: protein product [Podospora anserina] gi|170942501|emb|CAP68153.1| protein product [Podospora anserina]
  misc_feature (208)..(890): NCBI GI: 116193655 Blast Desc: CHGG_06545 [Chaetomium globosum CBS 148.51] gi|88182458|gb|EAQ89926.1| CHGG_06545 [Chaetomium globosum CBS 148.51]
  misc_feature (216)..(886): NCBI GI: 46129254 Blast Desc: FG08812.1 [Gibberella zeae PH-1]
  misc_feature (205)..(884): NCBI GI: 39943152 Blast Desc: MGG_03656 [Magnaporthe grisea 70-15] gi|145009754|gb|EDJ94410.1| MGG_03656 [Magnaporthe grisea 70-15]
  misc_feature (224)..(882): NCBI GI: 256733656 Blast Desc: NECHADRAFT_77978 [Nectria haematococca mpVI 77-13-4]
  misc_feature (383)..(882): NCBI GI: 108794900 Blast Desc: [Beauveria bassiana]
  misc_feature (383)..(882): NCBI GI: 108794897 Blast Desc: [Beauveria bassiana]
  misc_feature (383)..(882): NCBI GI: 108794894 Blast Desc: [Beauveria bassiana]
  misc_feature: Useful for introducing or modulating the production of volatile compounds
MFARSASAVGAVCLRCRVQQRLFRQSAAFRYASDDALNDASEDAARHEDASKRHRDSLQESTSKFEDLLKPDAASDDTSGDPGFGRATPAPDAPEPEPDQRSTFARFEEAIANSNRQKRQNQRGSKFNKFEYIEDFKMRDRIDSTVKSMTNSIATDPSSQAASQSASSSLEVRRVVSEPRESVAYRSLLDSNELVEATRTRMKHLKIHRDYKSGNRRYREDSRSLGTVVLGKPAAAILMRDHGAIKRKRHADLKKQRTPATSASDLEKLIDSEGGKATTQEVLSSIHQLQPVDKMLRDKDFRKLQKVLSEGFLSAQLLQYIDWQKSKPTQAPVEQSAKEERAKLEKQYPWIYTIKPWTQTATEESSQTDGHQPPAYTSETTTPKEYIAIHIMRDCWGLSLAELGPPLGETHVRLMDTEFALLMRGSQRFMQQIGEDLLDSGEKIEALRSKNTLRFVTAQGKVKQLLETLDRVFESMSTAVFRVPTTGLVHFDDATLEEVGRITNSQVKFTKNRSGTLRQLHVKWLDLKSRVQRGLKPLEDIGHIVYRLLLGAAAQKHISQMFVQPGAMRTVRLIKDNSNKENLAWRDKLRRWARYVSPTPQTAQQTAINERSLPIQDLKLPFDPLGSSTLSTQPNATIENDAGNSLIWPSSPRTVTTAHFGHVLHPYPAVNPKELDLENQDHRFSHIAPHPSALISLNKNTESIVETTSTIVLHFSPPLILNTKTSSSPTPLTLELHLAVSDTRILGVRALRAVKQTHHTTVLLPSAPVDLRLTQTQYTPLNISPPYSLMSYGPIPNYLSKAVVDLRKGKLDFPAVAEFRIPPHLFTLPPNSRAPTLDSNIVYDYMGLEFHRSAKIPYQGHELTYTSIEAGQGGGRRAEVTITPLPQQPQQPQQVEIQTSAEETATEQATSEEAPSEESSNPTSETDSEVTSESPTEANLQPTKPLTNEEQLQSFLKVCSDFANNHALWFGTDAQEQDNNTSS

SEQ ID NO: 20836 - DNA, 310 bp, Muscodor strobelii
  misc_feature: SGI EST ID NO. CUFF.49362.0
  misc_feature: Variant of the nucleotide sequence at SEQ ID NO 20834
gtggatcccaaagattcatgcagcagatcggtgaggatttgctcgattccggcgagaagatcgaggccctacgcagcaagaatacactgcgcttcgtgacggcgcagggcaaggtaaagcagctcctcgagacgctggacagggtcttcgagtcgatgtcaaccgctgtttttcgggtgccaacgaccgggttggttcattttgacgatgcaactctggaagaagtgggaaggatcaccaattcccaagtcaagtttaccaaaaaccgttccggaactctcagacaggtgagtgctgattagtatagtct

SEQ ID NO: 20837 - DNA, 1383 bp, Muscodor strobelii
  misc_feature: SGI cDNA ID NO. 567043
  misc_feature: Encodes the peptide sequence at SEQ ID NO 20838
atgtcgagcaagcaggagaagccccatctcaacgtcgtcgtcatcggacacgtcgacagtggcaagtccaccaccaccggtcacttgatctacaagtgcggtggtatcgaccagcgtaccattgagaagttcgagaaggaagctgctgagctcggaaagggttccttcaagtatgcctgggttttggacaaactcaaggctgagcgtgagcgtggtatcaccatcgacatcgccctctggaagttcgagactcccaagtatatggtcaccgtcattgacgctcccggtcatcgtgatttcatcaagaacatgattactggtacttcccaggccgactgtgctattctcatcattgctgccggtactggtgagttcgaggctggtatctccaaggatggccagactcgtgagcacgctctgctcgcctacaccctcggtgtcaagcagctcatcgtcgccatcaacaagatggacaccaccaagtggtctgaggcccgttaccaagagatcatcaaggagaccacctccttcatcaagaaggtcggtttcaaccccaagaccgtcgctttcgttcccatctccggcttcaacggtgacaacatgttggagatcaccaccaacgctccctggtacaagggctgggagaaggagggtgccaagggtgtcaaggtcactggcaagacccttcttgacgccattgacgccatcgttccccctgagcgtcccttccagaagcctctccgccttccccttcaggatgtgtacaagattggtggtattggaacggttcctgtcggccgtatcgagactggtatcatcaagcccggtatggtcgttactttcgctccctctcaggttaccactgaagtcaagtccgtcgagatgcaccacgagcagcttcccgagggtaagcccggtgacaacgttggtttcaacgtcaagaacgtctccgtgaaggatatccgccgtggaaacgtcgctggtgacagcaagaacgacccccctgctggtgccgagtccttcaacgcccaggtcatcgtcctcaaccaccctggccaggtcggtgctggttacgctcccgtcttggactgccacaccgcccacattgcctgcaagttctctgagctcctcgagaagatcgaccgccgtaccggtaaggctaccgagtccaaccccaagttcatcaagtctggtgatgccgccatcgtcaagatgttgccttccaagcccatgtgtgttgaggccttcaccgactaccctcctctgggacgtttcgccgtccgtgacatgcgtcaaaccgtcgctgtcggtgtcatcaagtccgtcgtcaaggacaccaagaccaagggcaaggagaccaagtctgctgccaagaagaagtaa

SEQ ID NO: 20838 - protein, 460 aa, Muscodor strobelii
  misc_feature: SGI Peptide ID NO. 567043
  misc_feature (261)..(328): Pfam Id: PF03144 Pfam Desc: Elongation factor Tu domain 2
  misc_feature (7)..(239): Pfam Id: PF00009 Pfam Desc: Elongation factor Tu GTP binding domain
  misc_feature (335)..(443): Pfam Id: PF03143 Pfam Desc: Elongation factor Tu C-terminal domain
  misc_feature (7)..(460): NCBI GI: 47846871 Blast Desc: translation elongation factor 1 alpha chain [Rosellinia sp. PF1022]
  misc_feature (4)..(458): NCBI GI: 116193653 Blast Desc: elongation factor 1-alpha [Chaetomium globosum CBS 148.51] gi|88182457|gb|EAQ89925.1| elongation factor 1-alpha [Chaetomium globosum CBS 148.51]
  misc_feature (4)..(458): NCBI GI: 46129252 Blast Desc: EF1A_TRIRE ELONGATION FACTOR 1-ALPHA (EF-1-ALPHA) [Gibberella zeae PH-1]
  misc_feature (4)..(458): NCBI GI: 171684991 Blast Desc: protein product [Podospora anserina] gi|2494242|sp|Q01520.1|EF1A_PODAN RecName: Full=Elongation factor 1-alpha; Short=EF-1-alpha gi|452424|emb|CAA52806.1| translation
  misc_feature (4)..(458): NCBI GI: 2494243 Blast Desc: EF1A_PODCU RecName: Full=Elongation factor 1-alpha; Short=EF-1-alpha gi|1235573|emb|CAA65434.1| EF1-alpha translation elongation factor [Podospora curvicolla]
  misc_feature (4)..(458): NCBI GI: 38324516 Blast Desc: translation elongation factor 1 alpha [Metarhizium anisopliae]
  misc_feature (4)..(458): NCBI GI: 224178628 Blast Desc: translation elongation factor 1-alpha [Epichloe festucae] gi|224591317|gb|ACN59887.1| translation elongation factor 1-alpha [Epichloe festucae]
  misc_feature (5)..(458): NCBI GI: 189188584 Blast Desc: elongation factor 1-alpha [Pyrenophora tritici-repentis Pt-1C-BFP] gi|187972237|gb|EDU39736.1| elongation factor 1-alpha [Pyrenophora tritici-repentis
  misc_feature (4)..(453): NCBI GI: 164429618 Blast Desc: elongation factor 1-alpha [Neurospora crassa OR74A] gi|67476865|sp|Q01372.2|EF1A_NEUCR RecName: Full=Elongation factor 1-alpha; Short=EF-1-alpha gi|38566883|emb|CAE76188.1|
  misc_feature (5)..(458): NCBI GI: 3023693 Blast Desc: EF1A_AURPU RecName: Full=Elongation factor 1-alpha; Short=EF-1-alpha gi|643455|gb|AAA91636.1| translation elongation factor 1-alpha [Aureobasidium pullulans]
  misc_feature (1)..(439): SWISSPROT Homolog: EC 2.7.1.25 Adenylyl-sulfate kinase
  misc_feature (1)..(439): SWISSPROT Homolog: EC 2.7.7.4 Sulfate adenylyltransferase
MSSKQEKPHLNVVVIGHVDSGKSTTTGHLIYKCGGIDQRTIEKFEKEAAELGKGSFKYAWVLDKLKAERERGITIDIALWKFETPKYMVTVIDAPGHRDFIKNMITGTSQADCAILIIAAGTGEFEAGISKDGQTREHALLAYTLGVKQLIVAINKMDTTKWSEARYQEIIKETTSFIKKVGFNPKTVAFVPISGFNGDNMLEITTNAPWYKGWEKEGAKGVKVTGKTLLDAIDAIVPPERPFQKPLRLPLQDVYKIGGIGTVPVGRIETGIIKPGMVVTFAPSQVTTEVKSVEMHHEQLPEGKPGDNVGFNVKNVSVKDIRRGNVAGDSKNDPPAGAESFNAQVIVLNHPGQVGAGYAPVLDCHTAHIACKFSELLEKIDRRTGKATESNPKFIKSGDAAIVKMLPSKPMCVEAFTDYPPLGRFAVRDMRQTVAVGVIKSVVKDTKTKGKETKSAAKKK

SEQ ID NO: 20839 - DNA, 3520 bp, Muscodor strobelii
  misc_feature: SGI EST ID NO. CUFF.50822.0
  misc_feature: Variant of the nucleotide sequence at SEQ ID NO 20837
aaaaaaagtttttcacgccttttttttgagttgtggattgaatgaagggaaggaggggcttggaggggcagttgcccccggtgactctgccccgcaacacaataggcaagcagcgcaaagcactgatgctgggaatgcgcaacagtgccccctctgattctggcccctcctctggaataaaaaccaccgtcacccctccgcgacccttcttcttgatctttctttcgcttccttgtcactataccgttaatcaagcattaacatctggcaaaccttaccatcaaaacacacctgacaaccatccaacaccgacaagatgtcgagcaagcaggagaagccccatctcaacgtcgtcgtcatcggacacgtcgacagtggcaagtccaccaccaccggtcacttgatctacaagtgcggtggtatcgaccagcgtaccattgagaagttcgagaaggaagctgctgagctcggaaagggttccttcaagtatgcctgggttttggacaaactcaaggctgagcgtgagcgtggtatcaccatcgacatcgccctctggaagttcgagactcccaagtatatggtcaccgtcattgacgctcccggtcatcgtgatttcatcaagaacatgattactggtacttcccaggccgactgtgctattctcatcattgctgccggtactggtgagttcgaggctggtatctccaaggatggccagactcgtgagcacgctctgctcgcctacaccctcggtgtcaagcagctcatcgtcgccatcaacaagatggacaccaccaagtggtctgaggcccgttaccaagagatcatcaaggagaccacctccttcatcaagaaggtcggtttcaaccccaagaccgtcgctttcgttcccatctccggcttcaacggtgacaacatgttggagatcaccaccaacgctccctggtacaagggctgggagaaggagggtgccaagggtgtcaaggtcactggcaagacccttcttgacgccattgacgccatcgttccccctgagcgtcccttccagaagcctctccgccttccccttcaggatgtgtacaagattggtggtattggaacggttcctgtcggccgtatcgagactggtatcatcaagcccggtatggtcgttactttcgctccctctcaggttaccactgaagtcaagtccgtcgagatgcaccacgagcagcttcccgagggtaagcccggtgacaacgttggtttcaacgtcaagaacgtctccgtgaaggatatccgccgtggaaacgtcgctggtgacagcaagaacgacccccctgctggtgccgagtccttcaacgcccaggtcatcgtcctcaaccaccctggccaggtcggtgctggttacgctcccgtcttggactgccacaccgcccacattgcctgcaagttctctgagctcctcgagaagatcgaccgccgtaccggtaaggctaccgagtccaaccccaagttcatcaagtctggtgatgccgccatcgtcaagatgttgccttccaagcccatgtgtgttgaggccttcaccgactaccctcctctgggacgtttcgccgtccgtgacatgcgtcaaaccgtcgctgtcggtgtcatcaagtccgtcgtcaaggacaccaagaccaagggcaaggagaccaagtctgctgccaagaagaagtaaatactttcgccttagctggtgggaagatttgcggggttctacaacatgtgtgatgaatagtcacgaatacttcacgatgatctgttgataccaaaaagaaaagggtcagcagcggtaatgaatgtatgaggatgggatatggtcacttgacgacgctttttctcgtcccctgtttgtagtaaaatagagtcgtagaccatacctttgccgtgttctttcattatgtgacaaatgctgtgatatatgacgcgcccgaatagctcgtttgtttttaccgccccatgtggacgttttatgcttcgctatttgttgagtctcaaatttggttggtttatttgacatgttaagctagcttcctttgccacttgtgacccttgccggcactagcacttgaaagatcacggaaagctgttgcacatagttcaaccccatatctgttagtgggttgttatcttttcgtattgtacactgcatatacaagccactatcatggctattctacatatatcatttacaaggttgaactaccagttcttctcgtttctattgttacatggctgttgtttatatacagatacggctcagatcccaagttatttcaatacgctaggatgatttatcaaagatcaaaagtccaagatggttaggttgtgggatatatatagatgatctcagcttgaggtgttgttgtcttgttcttgtgcgtcggtgccgaaccagagagcgtggttattggcgaagtctgagcagacttttaggaatgattggagctgctcttcgtttgttaggggtttggttggttgtagattggcttctgtgggtgattctgaggtcacttctgagtctgtttctgaggtggggtttgatgactcttcggagggtgcttcttccgaggttgcttgttctgtggctgtttcctctgccgatgtttgtatttccacctgttggggctgttggggttgttgaggtaagggtgtgatggtgacttctgctcgtcggccaccaccttgtccagcctcgatggaggtgtaagttagctcgtgcccttggtatgggattttggcggagcggtgaaactcgagacccatgtagtcgtaaacgatattcgaatccaaggtcggtgctctggaattgggggggagggtgaagagatgtggtggtatcctgaactcggctactgcgggaaagtcaagttttccttttcgcaggtcgactacggccttgctgagatagtttggtatgggaccgtaggacatgagggagtatggtggcgaaatgttgagcggcgtgtactgggtttgggttaggcggagatctacgggtgccgatggaaggaggacggtggtgtggtgggtttgcttcacggcgcgaagggcgcggacgccgaggatgcgggtgtcggagacggcgagatggagttcgagggtcagcggtgtaggtgaggatgaggtcttagtatttaagattaggggcggcgagaaatggagcacgattgtcgaagttgtttccacaatcgactctgtgttcttgttgaggctgatcagagcactgggatgaggtgcgatgtgggagaagcggtggtcttggttctcgaggtcgagctctttggggttgacggctggatacggatgtaggacgtggccgaaatgggcggtcgtcacggtgcgtgggctgctgggccagatgagagaattcccggcgtcattctcgatggtggcgtttggttgagtcgataaagtcgaggatccaagagggtcgaacggaagcttgaggtcctggatgggaagagacctctcgttgatggctgtctgctgagccgtc

SEQ ID NO: 20840 - DNA, 1020 bp, Muscodor strobelii
  misc_feature: SGI cDNA ID NO. 567044
  misc_feature: Encodes the peptide sequence at SEQ ID NO 20841
atgtggcgcaggtgccgcaattcagcgcaccggaccggacacgcattgacgaggcacattgacgacccccagttgatcaaggttaggcaatccgcccatcaccctagccttgcattgagtttgacggatcacgaacccaacgattggatcgttgttcccggactcgggctagttgcgcgtgaaactgcgcctcccgccgcatgcttgatggccgccagacatcgcccacctcgaacgtcactgagcgaacacccgaaccccagcagcaatggcaaacctcccgaatatgagacggccctcgacgccgatgcggacccgaacccgcagcctgccgtgacggtgtcgcgcctcgagccacgcatcgctaccctcctccagatctccaagacctatcgttgcctcatctatatctgccgcttgtcatccattctcccttgcttgatatgggggctgcgacatgccgccttcttcgtcgcctctccaattgcgcggcggctctgggacggcaaagagctgaccagtagtgctcgcctgaggattaccttgactcttctcgctgcgttatggtcctctgcatcagcttatctcgcctacttcttcactgatcgcctcgtctctcgctggctgatcaattacacaccatcagcgactatcgtccgaatcctgactatcgactgcgttttcgcctatctcacatcatggaccgtatatctggtcggtggcacactcgaccctcttctgctcctctccgcctggattggaattgctacgattctcaccgcgtgctatcattacacacaacgcaagattaagattcacaaggagacgtcagctagtatacgtgtcttctcgatcgctagcttcattagcatggtcgccctgctcctgcattccagtaccagcagttcgcttgcagccgatcacatcccgctcgttggtgttttgcgatggactgggaagctcgtactaaagctcatcattaagatgaaggatgttcatgacgacgttacctggaactag

SEQ ID NO: 20841 - protein, 339 aa, Muscodor strobelii
  misc_feature: SGI Peptide ID NO. 567044
  misc_feature (87)..(297): NCBI GI: 239613855 Blast Desc: conserved [Ajellomyces dermatitidis ER-3]
  misc_feature (114)..(297): NCBI GI: 226294607 Blast Desc: conserved [Paracoccidioides brasiliensis Pb18]
  misc_feature (84)..(325): NCBI GI: 212544776 Blast Desc: conserved [Penicillium marneffei ATCC 18224] gi|210065511|gb|EEA19605.1| conserved [Penicillium marneffei ATCC 18224]
  misc_feature (134)..(334): NCBI GI: 116193699 Blast Desc: CHGG_06567 [Chaetomium globosum CBS 148.51] gi|88182480|gb|EAQ89948.1| CHGG_06567 [Chaetomium globosum CBS 148.51]
  misc_feature (110)..(297): NCBI GI: 242813440 Blast Desc: conserved [Talaromyces stipitatus ATCC 10500] gi|218714507|gb|EED13930.1| conserved [Talaromyces stipitatus ATCC 10500]
  misc_feature (137)..(329): NCBI GI: 240275162 Blast Desc: conserved [Ajellomyces capsulatus H143]
  misc_feature (177)..(297): NCBI GI: 238845601 Blast Desc: conserved [Microsporum canis CBS 113480]
  misc_feature (113)..(335): NCBI GI: 115402625 Blast Desc: conserved [Aspergillus terreus NIH2624] gi|114189235|gb|EAU30935.1| conserved [Aspergillus terreus NIH2624]
  misc_feature (177)..(297): NCBI GI: 240106232 Blast Desc: CPC735_057950 [Coccidioides posadasii C735 delta SOWgp]
  misc_feature (142)..(336): NCBI GI: 67537154 Blast Desc: AN4747.2 [Aspergillus nidulans FGSC A4] gi|40741599|gb|EAA60789.1| AN4747.2 [Aspergillus nidulans FGSC A4] gi|259482413|tpe|CBF76874.1| TPA: conserved [Aspergillus FGSC
MWRRCRNSAHRTGHALTRHIDDPQLIKVRQSAHHPSLALSLTDHEPNDWIVVPGLGLVARETAPPAACLMAARHRPPRTSLSEHPNPSSNGKPPEYETALDADADPNPQPAVTVSRLEPRIATLLQISKTYRCLIYICRLSSILPCLIWGLRHAAFFVASPIARRLWDGKELTSSARLRITLTLLAALWSSASAYLAYFFTDRLVSRWLINYTPSATIVRILTIDCVFAYLTSWTVYLVGGTLDPLLLLSAWIGIATILTACYHYTQRKIKIHKETSASIRVFSIASFISMVALLLHSSTSSSLAADHIPLVGVLRWTGKLVLKLIIKMKDVHDDVTWN

SEQ ID NO: 20842 - DNA, 1739 bp, Muscodor strobelii
  misc_feature: SGI EST ID NO. CUFF.48981.0
  misc_feature: Variant of the nucleotide sequence at SEQ ID NO 20840
tgacaacagtctgggaacgtggacaaataccgtaaaacaacgaccagatcaacggttatatgtggcgcaggtgccgcaattcagcgcaccggaccggacacgcattgacgaggcacattgacgacccccagttgatcaaggttgtcagtctgaacaattgagccgttcactcggtcctctctggccaggcgggtgctgtgcttcacaggcagaggcaatccgcccatcaccctagccttgcattgagtttgacggtaagttgacgcactcgacatttttttatcttgcccgatatcagctggtagttgccagccagtcgacggccggctccctttcgctcccacattgcctacgtgtacttaagcttctggattttgttgattgacagtatgtctgataggatcacgaacccaacgattggatcgttgttcccggactcgggctagttgcgcgtgaaactgcgcctcccgccgcatgcttgatggccgccagacatcgcccacctcgaacgtcactgagcgaacacccgaaccccagcagcaatggcaaacctcccgaatatgagacggccctcgacgccgatgcggacccgaacccgcagcctgccgtgacggtgtcgcgcctcgagccacgcatcgctaccctcctccagatctccaagacctatcgttgcctcatctatatctgccgcttgtcatccattctcccttgcttgatatgggggctgcgacatgccgccttcttcgtcgcctctccaattgcgcggcggctctgggacggcaaagagctgaccagtagtgctcgcctgaggattaccttgactcttctcgctgcgttatggtcctctgcatcagcttatctcgcctacttcttcactgatcgcctcgtctctcgctggctgatcaattacacaccatcagcgactatcgtccgaatcctgactatcgactgcgttttcgcctatctcacatcatggaccgtatatctggtcggtggcacactcgaccctcttctgctcctctccgcctggattggaattgctacgattctcaccgcgtgctatcattacacacaacgcaagattaagattcacaaggagacgtcagctagtatacgtgtcttctcgatcgctagcttcattagcatggtcgccctgctcctgcattccagtaccagcagttcgcttgcagccgatcacatcccgctcgttggtgttttgcgatggactgggaagctcgtactaaagctcatcattaagatgaaggatgttcatgacgacgttacctggaactaggaactttaactggagaagtgcttgacctatttgttttttttctgttctaatgcattgggtgttgaagtctcaatgctacgactagaatcttcggcggatataccttagagtgcgtttcatgtgtcctgcagccatagcggaggcgttggggcgttggttgttttgacagtcagtgttgatgcgccaattctgcggaccgagcacaacagcatgtgccatcttataagaggtggattccatagcttgctccgtatatgtggctataaaacgggattatccggcctctttgcagaccaatgaaatgttttcagcgtaaatattcattttacagtatctacaataaccaatcatcctttgagccgtggaatccgaaacataaacctgcacctagcaagaaagcttaccaacatgtaagataacaatgccaacaacagtttctatggag

SEQ ID NO: 20843 - DNA, 228 bp, Muscodor strobelii
  misc_feature: SGI cDNA ID NO. 567045
  misc_feature: Encodes the peptide sequence at SEQ ID NO 20844
atgtgtttagacaacattggcgacatcaaatccttttctatcgatgccattgacgctgaggatcttgatgagtggagtggatttttcgcgaagctgaacgattgcgacgacatacatgccttcgctgttcttgcacacgaggacagcccatgcataaactcgccggagaaaacgccgtttagaagcattcgataccgcaaccatattgcggtcgaaggcggagtctga

SEQ ID NO: 20844 - protein, 75 aa, Muscodor strobelii
  misc_feature: SGI Peptide ID NO. 567045
MCLDNIGDIKSFSIDAIDAEDLDEWSGFFAKLNDCDDIHAFAVLAHEDSPCINSPEKTPFRSIRYRNHIAVEGGV

SEQ ID NO: 20845 - DNA, 781 bp, Muscodor strobelii
  misc_feature: SGI EST ID NO. CUFF.48915.0
  misc_feature: Variant of the nucleotide sequence at SEQ ID NO 20843
gtttagacaacattggcgacatcaaatccttttctatcgatgccattgacgctgaggatcttgatgagtggagtggatttttcgcgaagctgaacgattgcgacgacatacatgccttcgctgttcttgcacacgaggacagcccatgcataaactcgccggagaaaacgccgtttagaagcattcgataccgcaaccatattgcggtcgaaggcggagtctgaagctttcggatgcttatcataatctcatcacatcacatacagcttttcagagaatgcatcgaactgggtaatcctcaggtatctatcttgatgcaccgtcataagaacttgggagctatcacgcacgagcagtggttcgcattcattttgtagcttggatacggtattaatctttttgaagtgtcggagccaacttgtcggattattgaagcttccaaactgatcaatgatgaatcaaaaggactacccttatcagcacgcatggacatcaggctctcaagaatataagtgtgataatgcgcgcgcaaccttttggagcactcgtgttcaaagcgacgatatatttgagacacttcgcttaggtattgaagttctccacctcacttatacacctctctgtccaattttttgcattcatgttgctcttttcgggtggtgatactttttccgtagttagaggtgctatgtagggtaatactgggttcacgcgtcttgcggatctaaagatctaggcaacgcatatagtgtaggacgaagccatcctcaagactagaatt

SEQ ID NO: 20846 - DNA, 1602 bp, Muscodor strobelii
  misc_feature: SGI cDNA ID NO. 567046
  misc_feature: Encodes the peptide sequence at SEQ ID NO 20847
atgtcgattgagctaggactagcaatagtcggaactgtcgacctctgtttaaaatacggcaatgaattgcggaaaatttgctctgcgctacggggtgcagaagcagagcttgaagagagagcattgcgattagagaacggatgggagcgatgtattgctcaattaaatttcttgaacaccatccaggacaatatggatgaaggccatcgtgacctccatgaccgcacgctccgtatgctcagtgcaaagcttggacttgcgaattcgatcctcaggagtcttgtcgccatccagccccttggggatgggtctgaggaacaggaatttaaatttgtacccaagaaggtcaagtatgcaatgaagaaggagaaattggacgaagcaatcgacgctctcgagacttggcaacggctatccgacccttcatggtttctgatattgaggatgaacaacaatacgcttaatagcttgttagagagccgtggagccggaacaataagtcgatcgatcccatccgtttcatcagttcgtatgagtgtcccatctaacaccaatacctttaccaatggtggtcaagggctttcattgcctgcaggtgcactcacgacgatgtgtatcagcaaaattcgattctgcggatctcaaagtgcagtcggtggtcgagcgactgtatatatcttggacaatattcaaccaccatcatcagatacgtatcaattaacgaagaaaaatatgcgtgaccttgctcgacgactccagcatgaggagcctcagaactttgggctgcttagctgtaagggatttgtggcagaaatgggcgatcctaccgcaggcatcaaagacaatttcatgacggtgctacgcgttccatccggcttatcgagcccgcgcagtctccgagaccatctaatcaacagtccaacaccaagcacactgtcacagcggttcgtcatggctcagcagctcgcaagatctgtttcgtacgtgcacgtttttggtttcgtacacaagaacatcaggccagagacgatccttactttcgagtcggatccttctcagatcattcaagcgtcacattcactcccatctattttcttggttgggttcgaaggctttcgaaaagaggagggtcaaactcgaaaggtaggagacaatgctctcgagaaaaatctgtaccgacacccatctcggcaaggagtaaatcccggcaactactactgtatgcagcacgacatttacagtttaggcgtatgtctacttgagctcggtctgtggcaaagcttcattgagtatgacttagaccaagatcatgctagtcccactctatcacaactaattcaaggcccacataatgccttcaacggcgatatatctcaatacctattcaattcagttaaaagtcgtctgctagagctcacacggacacacttacggcaatgcatgggcacacaatactctgagatcgttgaaacttgtctgacttgcctcgattcgacgggtaatacgtttggggatgaacacgagtttgaagacgaagatggaatccaagtcggcgttcgatacatagagaaggtaagattatgccctggtaatgcttcgtga

SEQ ID NO: 20847 - protein, 533 aa, Muscodor strobelii
  misc_feature: SGI Peptide ID NO. 567046
  misc_feature (3)..(527): NCBI GI: 171683005 Blast Desc: protein product [Podospora anserina] gi|170941462|emb|CAP67113.1| protein product [Podospora anserina]
  misc_feature (119)..(497): NCBI GI: 256725773 Blast Desc: NECHADRAFT_15666 [Nectria haematococca mpVI 77-13-4]
  misc_feature (5)..(525): NCBI GI: 212537613 Blast Desc: HET-s/LopB domain protein [Penicillium marneffei ATCC 18224] gi|210068704|gb|EEA22795.1| HET-s/LopB domain protein [Penicillium marneffei ATCC 18224]
  misc_feature (1)..(528): NCBI GI: 261353858 Blast Desc: conserved [Verticillium albo-atrum VaMs.102]
  misc_feature (9)..(525): NCBI GI: 115443148 Blast Desc: [Aspergillus terreus NIH2624] gi|114188250|gb|EAU29950.1| [Aspergillus terreus NIH2624]
  misc_feature (3)..(523): NCBI GI: 145237848 Blast Desc: An07g04880 [Aspergillus niger] gi|134076048|emb|CAK39407.1| protein product [Aspergillus niger]
  misc_feature (5)..(525): NCBI GI: 119477298 Blast Desc: NFIA_072690 [Neosartorya fischeri NRRL 181] gi|119407406|gb|EAW17355.1| NFIA_072690 [Neosartorya fischeri NRRL 181]
  misc_feature (1)..(525): NCBI GI: 171681014 Blast Desc: protein product [Podospora anserina] gi|170940465|emb|CAP65692.1| protein product [Podospora anserina]
  misc_feature (3)..(524): NCBI GI: 238500257 Blast Desc: conserved [Aspergillus flavus NRRL3357] gi|220693116|gb|EED49462.1| conserved [Aspergillus flavus NRRL3357]
  misc_feature (5)..(525): NCBI GI: 145243980 Blast Desc: An11g05100 [Aspergillus niger] gi|134079187|emb|CAK48409.1| protein product [Aspergillus niger]
MSIELGLAIVGTVDLCLKYGNELRKICSALRGAEAELEERALRLENGWERCIAQLNFLNTIQDNMDEGHRDLHDRTLRMLSAKLGLANSILRSLVAIQPLGDGSEEQEFKFVPKKVKYAMKKEKLDEAIDALETWQRLSDPSWFLILRMNNNTLNSLLESRGAGTISRSIPSVSSVRMSVPSNTNTFTNGGQGLSLPAGALTTMCISKIRFCGSQSAVGGRATVYILDNIQPPSSDTYQLTKKNMRDLARRLQHEEPQNFGLLSCKGFVAEMGDPTAGIKDNFMTVLRVPSGLSSPRSLRDHLINSPTPSTLSQRFVMAQQLARSVSYVHVFGFVHKNIRPETILTFESDPSQIIQASHSLPSIFLVGFEGFRKEEGQTRKVGDNALEKNLYRHPSRQGVNPGNYYCMQHDIYSLGVCLLELGLWQSFIEYDLDQDHASPTLSQLIQGPHNAFNGDISQYLFNSVKSRLLELTRTHLRQCMGTQYSEIVETCLTCLDSTGNTFGDEHEFEDEDGIQVGVRYIEKVRLCPGNAS

SEQ ID NO: 20848 - DNA, 2842 bp, Muscodor strobelii
  misc_feature: SGI EST ID NO. CUFF.48918.0
  misc_feature: Variant of the nucleotide sequence at SEQ ID NO 20846
accaaatcgagtcccgaatggacagaagtgaatgattcatgtgcatgctcgtctcgcaccgatagaatattatcggtgatcgaacaagtttgtcggcaagctgttattcaaacaaattaccgatgtcgattgagctaggactagcaatagtcggaactgtcgacctctgtttaaaatacggcaatgaattgcggaaaatttgctctgcgctacggggtgcagaagcagagcttgaagagagagcattgcgattagagaacggatgggagcgatgtattgctcaattaaatttcttgaacaccatccaggacaatatggatgaaggccatcgtgacctccatgaccgcacgctccgtatgctcagtgcaaagcttggacttgcgaattcgatcctcaggagtcttgtcgccatccagccccttggggatgggtctgaggaacaggaatttaaatttgtacccaagaaggtcaagtatgcaatgaagaaggagaaattggacgaagcaatcgacgctctcgagacttggcaacggctatccgacccttcatggtttctgatattgaggatgaacaacaatacgcttaatagcttgttagagagccgtggagccggaacaataagtcgatcgatcccatccgtttcatcagttcgtatgagtgtcccatctaacaccaatacctttaccaatggtggtcaagggctttcattgcctgcaggtgcactcacgacgatgtgtatcagcaaaattcgattctgcggatctcaaagtgcagtcggtggtcgagcgactgtatatatcttggacaatattcaaccaccatcatcagatacgtatcaattaacgaagaaaaatatgcgtgaccttgctcgacgactccagcatgaggagcctcagaactttgggctgcttagctgtaagggatttgtggcagaaatgggcgatcctaccgcaggcatcaaagacaatttcatgacggtgctacgcgttccatccggcttatcgagcccgcgcagtctccgagaccatctaatcaacagtccaacaccaagcacactgtcacagcggttcgtcatggctcagcagctcgcaagatctgtttcgtacgtgcacgtttttggtttcgtacacaagaacatcaggccagagacgatccttactttcgagtcggatccttctcagatcattcaagcgtcacattcactcccatctattttcttggttgggttcgaaggctttcgaaaagaggagggtcaaactcgaaaggtaggagacaatgctctcgagaaaaatctgtaccgacacccatctcggcaaggagtaaatcccggcaactactactgtatgcagcacgacatttacagtttaggcgtatgtctacttgagctcggtctgtggcaaagcttcattgagtatgacttagaccaagatcatgctagtcccactctatcacaactaattcaaggcccacataatgccttcaacggcgatatatctcaatacctattcaattcagttaaaagtcgtctgctagagctcacacggacacacttacggcaatgcatgggcacacaatactctgagatcgttgaaacttgtctgacttgcctcgattcgacgggtaatacgtttggggatgaacacgagtttgaagacgaagatggaatccaagtcggcgttcgatacatagagaaggtcttactgcgactgaatcacttgagtgtttagaccatgcccctctaaaaatctggcggtacatcgtatggaccttgtcacccagctctccgagccttgaatgaacaagctttacatcatctgcaccatcatcttcttcttcttcgtccgagtcattgaatattactctgcgtttcgaagcacttatgaagcatcggcacttatgccgaatcatttcaacatgccagtacgcattcccaactgctggcatcggatacatccccgctgccgcatctcagctccgggggataacctacagatgtttcttggcttatcgtttcacaacagcattcacaacagcattctcaacccattgaaaaacaaagtaatagagtccgaaggagtctgagagactctgcgatgttcatagtgatctataccaggcgccatgaacaggcggcaaaactcgtccgtctttgcctagggcctggttttagcaaccacacgttaccaattgccgattcgttccccgaggagaggctctattgtctgaccagccgtgcgccgctagcaaattgtcgccgtgtgcaaaaatgcagttagttacaggttatcggttccacaaacgtcttcaaattcagatacgagctaaagaatagcttaacaagttctttgcgagatgtcccattatcacgacttgattaggaatcatcgattgagaaattcgaattgctgtgtggtggttggtcgccatgttggtgtagtctgttctcggctcagttcatgccacaattgattactatcctcgtccactttgcccttgtaactgctgctatatgctatgaacatgcatcccataatggcttcattttaatgggagtcaagtttcatctgtatgggtttctattgcgtcgaacttgcatctaagagggttggagacgagaccgtcggcagcaccatccaacatatcgcaggcttcagacccacgcgtttgtgatagcctcgaaatgacactggttgacaaatccatcctgatgctgtactatacatggctgttgccctgctaggagcatttttgtccagttgattgctagcgaacctgcaaagatgctagtctgtactgtagcttagcatcagatcacaatcacctctagcattgtatacagact

SEQ ID NO: 20849 - DNA, 1605 bp, Muscodor strobelii
  misc_feature: SGI cDNA ID NO. 567047
  misc_feature: Elevated expression when VOC is produced
  misc_feature: Encodes the peptide sequence at SEQ ID NO 20850
atgtcgattgagctaggactagcaatagtcggaactgtcgacctctgtttaaaatacggcaatgaattgcggaaaatttgctctgcgctacggggtgcagaagcagagcttgaagagagagcattgcgattagagaacggatgggagcgatgtattgctcaattaaatttcttgaacaccatccaggacaatatggatgaaggccatcgtgacctccatgaccgcacgctccgtatgctcagtgcaaagcttggacttgcgaattcgatcctcaggagtcttgtcgccatccagccccttggggatgggtctgaggaacaggaatttaaatttgtacccaagaaggtcaagtatgcaatgaagaaggagaaattggacgaagcaatcgacgctctcgagacttggcaacggctatccgacccttcatggtttctgatattgaggatgaacaacaatacgcttaatagcttgttagagagccgtggagccggaacaataagtcgatcgatcccatccgtttcatcagttcgtatgagtgtcccatctaacaccaatacctttaccaatggtggtcaagggctttcattgcctgcaggtgcactcacgacgatgtgtatcagcaaaattcgattctgcggatctcaaagtgcagtcggtggtcgagcgactgtatatatcttggacaatattcaaccaccatcatcagatacgtatcaattaacgaagaaaaatatgcgtgaccttgctcgacgactccagcatgaggagcctcagaactttgggctgcttagctgtaagggatttgtggcagaaatgggcgatcctaccgcaggcatcaaagacaatttcatgacggtgctacgcgttccatccggcttatcgagcccgcgcagtctccgagaccatctaatcaacagtccaacaccaagcacactgtcacagcggttcgtcatggctcagcagctcgcaagatctgtttcgtacgtgcacgtttttggtttcgtacacaagaacatcaggccagagacgatccttactttcgagtcggatccttctcagatcattcaagcgtcacattcactcccatctattttcttggttgggttcgaaggctttcgaaaagaggagggtcaaactcgaaaggtaggagacaatgctctcgagaaaaatctgtaccgacacccatctcggcaaggagtaaatcccggcaactactactgtatgcagcacgacatttacagtttaggcgtatgtctacttgagctcggtctgtggcaaagcttcattgagtatgacttagaccaagatcatgctagtcccactctatcacaactaattcaaggcccacataatgccttcaacggcgatatatctcaatacctattcaattcagttaaaagtcgtctgctagagctcacacggacacacttacggcaatgcatgggcacacaatactctgagatcgttgaaacttgtctgacttgcctcgattcgacgggtaatacgtttggggatgaacacgagtttgaagacgaagatggaatccaagtcggcgttcgatacatagagaaggtcttactgcgactgaatcacttgagtgtttag

SEQ ID NO: 20850 - protein, 534 aa, Muscodor strobelii
  misc_feature: SGI Peptide ID NO. 567047
  misc_feature (3)..(534): NCBI GI: 171683005 Blast Desc: protein product [Podospora anserina] gi|170941462|emb|CAP67113.1| protein product [Podospora anserina]
  misc_feature (119)..(497): NCBI GI: 256725773 Blast Desc: NECHADRAFT_15666 [Nectria haematococca mpVI 77-13-4]
  misc_feature (5)..(526): NCBI GI: 212537613 Blast Desc: HET-s/LopB domain protein [Penicillium marneffei ATCC 18224] gi|210068704|gb|EEA22795.1| HET-s/LopB domain protein [Penicillium marneffei ATCC 18224]
  misc_feature (1)..(534): NCBI GI: 261353858 Blast Desc: conserved [Verticillium albo-atrum VaMs.102]
  misc_feature (9)..(534): NCBI GI: 115443148 Blast Desc: [Aspergillus terreus NIH2624] gi|114188250|gb|EAU29950.1| [Aspergillus terreus NIH2624]
  misc_feature (5)..(534): NCBI GI: 119477298 Blast Desc: NFIA_072690 [Neosartorya fischeri NRRL 181] gi|119407406|gb|EAW17355.1| NFIA_072690 [Neosartorya fischeri NRRL 181]
  misc_feature (3)..(523): NCBI GI: 145237848 Blast Desc: An07g04880 [Aspergillus niger] gi|134076048|emb|CAK39407.1| protein product [Aspergillus niger]
  misc_feature (3)..(528): NCBI GI: 238500257 Blast Desc: conserved [Aspergillus flavus NRRL3357] gi|220693116|gb|EED49462.1| conserved [Aspergillus flavus NRRL3357]
  misc_feature (1)..(534): NCBI GI: 171681014 Blast Desc: protein product [Podospora anserina] gi|170940465|emb|CAP65692.1| protein product [Podospora anserina]
  misc_feature (5)..(534): NCBI GI: 145243980 Blast Desc: An11g05100 [Aspergillus niger] gi|134079187|emb|CAK48409.1| protein product [Aspergillus niger]
  misc_feature: Useful for introducing or modulating the production of volatile compounds
MSIELGLAIVGTVDLCLKYGNELRKICSALRGAEAELEERALRLENGWERCIAQLNFLNTIQDNMDEGHRDLHDRTLRMLSAKLGLANSILRSLVAIQPLGDGSEEQEFKFVPKKVKYAMKKEKLDEAIDALETWQRLSDPSWFLILRMNNNTLNSLLESRGAGTISRSIPSVSSVRMSVPSNTNTFTNGGQGLSLPAGALTTMCISKIRFCGSQSAVGGRATVYILDNIQPPSSDTYQLTKKNMRDLARRLQHEEPQNFGLLSCKGFVAEMGDPTAGIKDNFMTVLRVPSGLSSPRSLRDHLINSPTPSTLSQRFVMAQQLARSVSYVHVFGFVHKNIRPETILTFESDPSQIIQASHSLPSIFLVGFEGFRKEEGQTRKVGDNALEKNLYRHPSRQGVNPGNYYCMQHDIYSLGVCLLELGLWQSFIEYDLDQDHASPTLSQLIQGPHNAFNGDISQYLFNSVKSRLLELTRTHLRQCMGTQYSEIVETCLTCLDSTGNTFGDEHEFEDEDGIQVGVRYIEKVLLRLNHLSV

SEQ ID NO: 20851 - DNA, 2842 bp, Muscodor strobelii; identical to SEQ ID NO: 20848
  misc_feature: SGI EST ID NO. CUFF.48918.0
  misc_feature: Variant of the nucleotide sequence at SEQ ID NO 20849

SEQ ID NO: 20852 - DNA, 2142 bp, Muscodor strobelii
  misc_feature: SGI cDNA ID NO. 567048
  misc_feature: Elevated expression when VOC is produced
  misc_feature: Encodes the peptide sequence at SEQ ID NO 20853
atggaccagggatctatcaggtctttaatcagctcctccgatgtcgacccgcgagacttagaacaagagattatcgactttgctcggcaaatccgagaggaagggttgcttgatgggctcgatctagacgatatcgacttaagtcaaaacgacgaactcagccgcaaaattacagaggcgtatcgcagacggcagagagctcggcggagggctgaatctgccaggtccagtactgccaaaaactccgccttcttaccggagtcagtgcacgattctcgctgggacgcagaatttcttccgagcgcctccgttgtgaaccggacgataaatacccaattctcaggtcgccgagtcttacaacaggaagtatgggatcgcgaaaggtcgcttgggcatggtggttacggtgtggtatggctcgagagatcccgtcacatcgagaatccgacccaattccaacgccgagcagtgaaggagttgagagtttctaggaatgatagactaagacaggaatatgtgagagaaatagaagctttgatcaagttttctcaaaagaaattcgtcaattcctttgtggagttctactcttggttcgagagtacagatacactattcatcgcgatggaatattgcgagcatggcgacttgaagcgttacatggacgatcatggaagactacccgaaggccaggcacatgctattacattgcaaattttacaaggtctacttctcatgcacgatagcagattcgcgcaccgcgatctcaaacccgcgaatattttgatcaagaatatgcctcacaatggcgattggaagataaaaatatgcgacatggggctcagcaaacgaattggaaacgaggtcacctccacggccataaaaggaacaccaggcttcatgccaccagagcgtttgccaggacttagccgcaatccatccaaagcggatccgtttccatgtgatatgtggtgcttcggcgagatcgtgttctatatgttgacgaaagagacaacattcgacaacgattttcagctacatagattcgtcaacgggccagtcatgtttccatcggagcgattgtcgaaagtaagagcgagtcgcgatgtgatcgatttcatagagcgtctcatgtcaccgtggccattacaaagactctctgcgaagttagctgatgagcacatgtggatcacacaatctcacggcgtagataggacaagacaatcatcttcatttcctagttaccattcagaaccgaatctttcctaccgtccaatccaaggttatcaggctccccaaagctccgagaattggttgcgtgcaaacgccaattgggatgcacacacatcacaaaacaataccttgccgtcgggagcctgggatacgattcaatacccgtcaaatgcgtcggccgatcgcgtccaaactcacaatactcacaccagaacagttcgggctgcttcagagaatccagttccaacacgacaagcgaccgctccgagcaaatttggagacctcgaagaagtgactgcgcgcattgggagtctaaatacattagcctcgtctaatttcgaacctcgtcacaatgagactggtaggaaaagtttgctcgatcaccctgtctcgatcaccgagagtggcaaacttacagctcgcgaacgcgagaatatgtggacagagatcaccaaagaccttgtcattcgcgaggcaattgaccgtataggatatgagtacgaagagacagagtgtttcttttacgtaatggagtatctaaactatgacgatgtgcttgaactcgtcaatctctcggaagatatccgcagaagatggagacaaatcataccacaaccattgaaacctagcttcgaacaaaaacatatccttgacaagagtagaggtgtcaagaggagggaaagggatatgaaggaagacgaggagaaaccgaatgcatcccaaaactttcttccccggaacgataataagaagtctgtcgacaacgacgatgcttcgtttttcaaggggccttcaacttcctatgctacttctaacagagaactcgcagcctttttgagaggtgacagtaatggtccagtgcgtgtagatagagttggcaagccaaattatagggacagatcgcctcgatag

SEQ ID NO: 20853 - protein, 713 aa, Muscodor strobelii
  misc_feature: SGI Peptide ID NO. 567048
  misc_feature (124)..(396): Pfam Id: PF00069 Pfam Desc: Protein kinase domain
  misc_feature (200)..(301): Pfam Id: PF07714 Pfam Desc: Protein tyrosine kinase
  misc_feature (85)..(393): NCBI GI: 256726178 Blast Desc: NECHADRAFT_81826 [Nectria haematococca mpVI 77-13-4]
  misc_feature (85)..(398): NCBI GI: 115386652 Blast Desc: [Aspergillus terreus NIH2624] gi|114190865|gb|EAU32565.1| [Aspergillus terreus NIH2624]
  misc_feature (84)..(397): NCBI GI: 256723317 Blast Desc: NECHADRAFT_86497 [Nectria haematococca mpVI 77-13-4]
  misc_feature (83)..(396): NCBI GI: 255939480 Blast Desc: Pc16g00910 [Penicillium chrysogenum Wisconsin 54-1255] gi|211585132|emb|CAP92761.1| Pc16g00910 [Penicillium chrysogenum Wisconsin 54-1255]
  misc_feature (85)..(398): NCBI GI: 255930945 Blast Desc: Pc12g01300 [Penicillium chrysogenum Wisconsin 54-1255] gi|211581648|emb|CAP79757.1| Pc12g01300 [Penicillium chrysogenum Wisconsin 54-1255]
  misc_feature (116)..(434): NCBI GI: 119477300 Blast Desc: protein kinase, [Neosartorya fischeri NRRL 181] gi|119407407|gb|EAW17356.1| protein kinase, [Neosartorya fischeri NRRL 181]
  misc_feature (121)..(398): NCBI GI: 261353859 Blast Desc: calcium/calmodulin-dependent protein kinase type 1B [Verticillium albo-atrum VaMs.102]
  misc_feature (120)..(439): NCBI GI: 169779591 Blast Desc: [Aspergillus oryzae RIB40] gi|83772999|dbj|BAE63127.1| protein product [Aspergillus oryzae]
  misc_feature (120)..(439): NCBI GI: 238500259 Blast Desc: serine/threonine protein kinase, [Aspergillus flavus NRRL3357] gi|220693117|gb|EED49463.1| serine/threonine protein kinase, [Aspergillus flavus NRRL3357]
  misc_feature (120)..(396): NCBI GI: 46126877 Blast Desc: FG07816.1 [Gibberella zeae PH-1]
  misc_feature: Useful for introducing or modulating the production of volatile compounds
MDQGSIRSLISSSDVDPRDLEQEIIDFARQIREEGLLDGLDLDDIDLSQNDELSRKITEAYRRRQRARRRAESARSSTAKNSAFLPESVHDSRWDAEFLPSASVVNRTINTQFSGRRVLQQEVWDRERSLGHGGYGVVWLERSRHIENPTQFQRRAVKELRVSRNDRLRQEYVREIEALIKFSQKKFVNSFVEFYSWFESTDTLFIAMEYCEHGDLKRYMDDHGRLPEGQAHAITLQILQGLLLMHDSRFAHRDLKPANILIKNMPHNGDWKIKICDMGLSKRIGNEVTSTAIKGTPGFMPPERLPGLSRNPSKADPFPCDMWCFGEIVFYMLTKETTFDNDFQLHRFVNGPVMFPSERLSKVRASRDVIDFIERLMSPWPLQRLSAKLADEHMWITQSHGVDRTRQSSSFPSYHSEPNLSYRPIQGYQAPQSSENWLRANANWDAHTSQNNTLPSGAWDTIQYPSNASADRVQTHNTHTRTVRAASENPVPTRQATAPSKFGDLEEVTARIGSLNTLASSNFEPRHNETGRKSLLDHPVSITESGKLTARERENMWTEITKDLVIREAIDRIGYEYEETECFFYVMEYLNYDDVLELVNLSEDIRRRWRQIIPQPLKPSFEQKHILDKSRGVKRRERDMKEDEEKPNASQNFLPRNDNKKSVDNDDASFFKGPSTSYATSNRELAAFLRGDSNGPVRVDRVGKPNYRDRSPR

SEQ ID NO: 20854 - DNA, 3454 bp, Muscodor strobelii
  misc_feature: SGI EST ID NO. CUFF.48923.0
  misc_feature: Variant of the nucleotide sequence at SEQ ID NO 20852
catacatatcgttgccaaagttatctcaaaatgaatttagatgattgtgcggattaatatttgagcattattgctgtattattcgcaagtatctgaacaacgtatctagtgacgctattgatttttgactcctacctgattggagaccaccaataaagcgacttcagcccccaactgatcacacataggcgctgaccccccgattgatccctcaaacggcgcattttggacgttcaatcaatcaaacatttgtttcgaactgctctactcatttgatttcccacatccacaggggatctatcaggtctttaatcagctcctccgatgtcgacccgcgagacttagaacaagagattatcgactttgctcggcaaatccgagaggaagggttgcttgatgggctcgatctagacgatatcgacttaagtcaaaacgacgaactcagccgcaaaattacagaggcgtatcgcagacggcagagagctcggcggagggctgaatctgccaggtccagtactgccaaaaactccgccttcttaccggagtcagtgcacgattctcgctgggacgcagaatttcttccgagcgcctccgttgtgaaccggacgataaatacccaattctcaggtcgccgagtcttacaacaggaagtatgggatcgcgaaaggtcgcttgggcatggtggttacggtgtggtatggctcgagagatcccgtcacatcgagaatccgacccaattccaacgccgagcagtgaaggagttgagagtttctaggaatgatagactaagacaggaatatgtgagagaaatagaagctttgatcaagttttctcaaaagaaattcgtcaattcctttgtggagttctactcttggttcgagagtacagatacactattcatcgcgatggaatattgcgagcatggcgacttgaagcgttacatggacgatcatggaagactacccgaaggccaggcacatgctattacattgcaaattttacaaggtctacttctcatgcacgatagcagattcgcgcaccgcgatctcaaacccgcgaatattttgatcaagaatatgcctcacaatggcgattggaagataaaaatatgcgacatggggctcagcaaacgaattggaaacgaggtcacctccacggccataaaaggaacaccaggcttcatgccaccagagcgtttgccaggacttagccgcaatccatccaaagcggatccgtttccatgtgatatgtggtgcttcggcgagatcgtgttctatatgttgacgaaagagacaacattcgacaacgattttcagctacatagattcgtcaacgggccagtcatgtttccatcggagcgattgtcgaaagtaagagcgagtcgcgatgtgatcgatttcatagagcgtctcatgtcaccgtggccattacaaagactctctgcgaagttagctgatgagcacatgtggatcacacaatctcacggcgtagataggacaagacaatcatcttcatttcctagttaccattcagaaccgaatctttcctaccgtccaatccaaggttatcaggctccccaaagctccgagaattggttgcgtgcaaacgccaattgggatgcacacacatcacaaaacaataccttgccgtcgggagcctgggatacgattcaatacccgtcaaatgcgtcggccgatcgcgtccaaactcacaatactcacaccagaacagttcgggctgcttcagagaatccagttccaacacgacaagcgaccgctccgagcaaatttggagacctcgaagaagtgactgcgcgcattgggagtctaaatacattagcctcgtctaatttcgaacctcgtcacaatgagactggtaggaaaagtttgctcgatcaccctgtctcgatcaccgagagtggcaaacttacagctcgcgaacgcgagaatatgtggacagagatcaccaaagaccttgtcattcgcgaggcaattgaccgtataggatatgagtacgaagagacagagtgtttcttttacgtaatggagtatctaaactatgacgatgtgcttgaactcgtcaatctctcggaagatatccgcagaagatggagacaaatcataccacaaccattgaaacctagcttcgaacaaaaacatatccttgacaagagtagaggtgtcaagaggagggaaagggatatgaaggaagacgaggagaaaccgaatgcatcccaaaactttcttccccggaacgataataagaagtctgtcgacaacgacgatgcttcgtttttcaaggggccttcaacttcctatgctacttctaacagagaactcgcagcctttttgagaggtgacagtaatggtccagtgcgtgtagatagagttggcaagccaaattatagggacagatcgcctcgataggggccgtcaggggacatcgctcgcccggcgaaagcagacgatgaccatctcgtcttcgccagaaaacgttacaaagatgacagagacaggcataggtgctaagcacttgattattagagcctttgattcatatcaaggctatctcgatccagcaaaattttgcaagggctctgccgaaccaaacgtattaaagtcctacagagcaatgcctagatgaacatcctcttaataccagaaagcatttatctgtagattaccaagaagatgaggaggaggagatagaagacaatgatgtaccacgaaggtctttgaataccgattgggacaatcggtgggagcatgagaaaacgaacgctaatgtctcgaacacttcttcgtccactaagaccgaattccaacattatgtcatgttatcgcagactaagcttggtgccgacagtcaggcgcgcaaggaaagaatgaagcagcgcataaatcgatcacttgatgctcaccctatccagaatcatcttaggaaggcttccagatcaaggaacgaatcgcacgaatcaaacatcggtcaagcaagcaacaaggaatttatcaagctggatcctactgagaaagcaatccgccgatacatgagaccaatgtcaatcgagccgaaacgaagacacaggcagtcccaaagaagccctatcacatcccatctttccggaactaagaatcccgaccgctgttgcctgatcatccttgtagatagggccgcgatagctgagccaattcggactccaatttctcttatgacgatcgggtggtgaggcggcagcaattacagcagttgttcctctccatagcaacaatggctggaaagggacccgataaaagcttggagcacgccatgttgccccagtataaacaagagatacttcatgagcatatctggacgtcgtgatgcccgagcgcatcagtcatgctatattaaggagtgttaacggttgagggtaatcagatgagactcgagaagttacgactggggggaggggggg

SEQ ID NO: 20855 - DNA, 894 bp, Muscodor strobelii
  misc_feature: SGI cDNA ID NO. 567049
  misc_feature: Encodes the peptide sequence at SEQ ID NO 20856
atggatgccaaatcacctgtgctcgccggcactgagccctcgcgtcgcagtccacgcaccgaagatctgcaagactctgccaccctcatgggcaactcccctctgaactctactgaatcccaagctgagcacaaggatcatattgtcgtccacttcgaggtgacaaagtctggcgatatcgtcgagctcaagaacttcaccgaggacgagaatactcacattatgcacggcgaatatagaaaaaaggtgaacattgccaagaacgggaagattgccaagtccaaaaaggcaacgacagccaaaggcaacaaactctggttcacgtttcttggacccacgaacattgccaaagttaacgaaatcatcaaatcggagaaggcaagcgatgataagcgccttatgatcagtgtcaagtttaccgagcccaaggatgttatgaatgcccgcaactctgtcaagcccagtatcaagaatcccgggattcctcgcaggctcagagctgtcaacgagcctgaggctgtcaacgagcctaaaactgtcgacgaagctaaaaatgtcaacgagtccgaagctgtcaacgacccggagagtgtcaccgagcgcgaagctgttaacaagcctaatagtatcgacaaagccaagactgttaagaagctcaggaatatcaacaagatcaaaggtgtcaacaagtccaagactgttagcaagcccaagactgctagcaagcttgaagctgtcaacgagcttgatgctatcaacgagcctgaggttgtcaacgagcccaaggttatcaacaagcccgaaggctatcaacgaacccgaagctatcaacaaatccgaaagtgtcaacgagcccaaaagtgtcaaaaaggtcaaagatatcaacaagcgtaa

SEQ ID NO: 20856 - protein, 297 aa, Muscodor strobelii
  misc_feature: SGI Peptide ID NO. 567049
  misc_feature (168)..(294): NCBI GI: 29828414 Blast Desc: SAV_1872 [Streptomyces avermitilis MA-4680] gi|29605517|dbj|BAC69583.1| [Streptomyces avermitilis MA-4680]
  misc_feature (168)..(267): NCBI GI: 156100371 Blast Desc: multidrug resistance protein 2 [Plasmodium vivax SaI-1] gi|148804787|gb|EDL46186.1| multidrug resistance protein 2, [Plasmodium vivax]
  misc_feature (163)..(297): NCBI GI: 170068356 Blast Desc: conserved [Culex quinquefasciatus] gi|167864402|gb|EDS27785.1| conserved [Culex quinquefasciatus]
  misc_feature (155)..(286): NCBI GI: 170068356 Blast Desc: conserved [Culex quinquefasciatus] gi|167864402|gb|EDS27785.1| conserved [Culex quinquefasciatus]
  misc_feature (155)..(277): NCBI GI: 170068356 Blast Desc: conserved [Culex quinquefasciatus] gi|167864402|gb|EDS27785.1| conserved [Culex quinquefasciatus]
  misc_feature (176)..(297): NCBI GI: 117925542 Blast Desc: TPR repeat-containing protein [Magnetococcus sp. MC-1] gi|117609298|gb|ABK44753.1| Tetratricopeptide TPR_2 repeat protein [Magnetococcus sp. MC-1]
  misc_feature (167)..(267): NCBI GI: 156100371 Blast Desc: multidrug resistance protein 2 [Plasmodium vivax SaI-1] gi|148804787|gb|EDL46186.1| multidrug resistance protein 2, [Plasmodium vivax]
  misc_feature (167)..(267): NCBI GI: 114683151 Blast Desc: : similar to RP4-591C20.6 [Pan troglodytes]
  misc_feature (142)..(270): NCBI GI: 220925481 Blast Desc: Mnod_5640 [Methylobacterium nodulans ORS 2060] gi|219950088|gb|ACL60480.1| Mnod_5640 [Methylobacterium nodulans ORS 2060]
  misc_feature (159)..(267): NCBI GI: 156100371 Blast Desc: multidrug resistance protein 2 [Plasmodium vivax SaI-1] gi|148804787|gb|EDL46186.1| multidrug resistance protein 2, [Plasmodium vivax]
MDAKSPVLAGTEPSRRSPRTEDLQDSATLMGNSPLNSTESQAEHKDHIVVHFEVTKSGDIVELKNFTEDENTHIMHGEYRKKVNIAKNGKIAKSKKATTAKGNKLWFTFLGPTNIAKVNEIIKSEKASDDKRLMISVKFTEPKDVMNARNSVKPSIKNPGIPRRLRAVNEPEAVNEPKTVDEAKNVNESEAVNDPESVTEREAVNKPNSIDKAKTVKKLRNINKIKGVNKSKTVSKPKTASKLEAVNELDAINEPEVVNEPKVINKPEGYQRTRSYQQIRKCQRAQKCQKGQRYQQA

SEQ ID NO: 20857 - DNA, 2922 bp, Muscodor strobelii
  misc_feature: SGI cDNA ID NO. 567050
  misc_feature: Encodes the peptide sequence at SEQ ID NO 20858
atgtcgataagcagatttaccgctgccttgttggcaggatctcaggagaatactgtagctttagcggctctcaatttcgatttctctttatacaaggttgaggctccgcgcgaataccatgctctcgggtcctgcttatcagatgagcgtcgggtcatggccgaacaaggttcacaacatgtaactgctcgaaagctcggggctctgttcaagtctatgcttcctagtgttcctgcattgctaaaagcatttggaacacgggtgtctgagactgctcaaaaggcagctgctaaagactggaatccacgtgatgctagccccaatcataacgtatttaccacgaagatgggaattgacgggacttctatttgggcagcagctacgtcaggaactgaggcactctgcgttcagctgctggcttgtctacttgctcgattctggaccgccggtgaggcaacatcgatctgggcagagattgtggaggctcgcaagctcgagctttcttcgagacagggagacttcgacttccctgaggtcgcagccatgcaggcgacaatttcgcgcgagcagcttgccgaatgggacgcgagcgctcgggcatggttaaggacagcggattatatacatgataaacaacaaacgcagtttagactgatcttcaacaacatatacggccctataaacaaaagaacgagcacgtatgaaagcgttatcacggcttggaaagattctatgatggttgcaaatatgctcattttaggtgcgccacaaagtgtatgcgatggtgctgcattagtgggactgtcagcatggcacttgtttcctaatatggcggtctatattagtggtatatacaaggagattgaccaacatgattcattggtaaaagcgggaggcctactcacaattggactagaagtcgaacctggcactaaagttggtgtaagatggtcgcttcccttatcgaaactccggtactacggcgacccagttccggtgacggaaactctcgactcttccaaatctcgagtttcacttgaccaatttattatggtggccctgggctgcctgtccctggagtggccagagatgccgaataagctggttagagtgtgtcaatactatgctgctatcggtgcaagagttggccccgcggtgtgtgcggacataaaaggttcttgggtcaagtatttggctacggcgagctcaaaattcctctcggcagaacacgatgaaaagaaatcgctcaaacagttgatggagtggggtgcccgtcgcggcggcaatttccttcttaatacagataaaacctccatcgccttagagtctcaattattcggattaagtaatctgcatgcgtatatgagtgcccttcgagaccctctatcgaaagccaactgcttaagaaacgcaatgagcgattattcaagcgaggatgctgagaattggatcattgcgtttaaccacaatagtgtcgaagaatggacttttgctactgctatactgccacgggacgaagagacacggcagcggcattgcatctggaccagtctatcacatcacgcgacgcacatttcagggcgcctgatctcccagtgcatcgacgagccagaccatcatatagaccatgccgtatggaaataccgtttcaaggaagacgaccgtcgtagctgtctttgttttactagggttaaagcaggcaaggacgggtttggctcgatatataaaccgaatcattccggactggaaccagagagaaaagagacggtgaaattcgaagtcgtcgaaaggaactccacatatggctttacgctatatgctgtgtataagaaagtctcttgtgtgaccagcgttaagaactttcggctcaagaaagtggctgtggacgaaatcatttcagtcatttccgacaataaaatcggcttggatcagctctcaattgcctcaaggtgtgcttgggcaccgttgcaggctttgagtatggttgcggctctctatgaacaaatgggtcgtgcgagtatatctcttgacgtggtactgggctccagtcttgtttcgaagccttggttcaaccctaaacagccatttaaaatgaatcacgctgaatcattctcgtgcattgtgagcatggagactggaagccaggatctcgatccaaagatgttaaagggagtgatagcggtctctatcgacgactctatattcgccctttcgaccctactgtcagatccttattgcgatcctggccaagctacgatagtccggagactcgggaatttcggaaaacatggtatctccttagtcatttcgccgccccatatgaggatgcgcaagcccagctccggagactggcgcatcattaatcatgacaaatgggatggcagccggcataattcgttcgagcaaacgtcgctacatctcctccttaccgattatcgagttccgtatgtcacttcacaccatggggatcgggatatacaggcatttttccaagaagcagccatttcgattcacgacgggaatagctggattggtgacatcgatgtagtcaaatcccttcaagaacactgggaaacgttcatcagggtccctgaacagtgtaggcatggagcaaaagctatcaacagcccagcagtaggtcctaaggtgagaccagcggccaagaaacgaatgggaactagttctgacgcaggagaaattgtatgtattgacaattggtacgaattgctcgataaaccgaatcaagcagcaattgtgcgctgccgcaagaattggttgggtcggcttgcaacggcatccttgagcgctcagctcggatatagagtgcttgtcattccagaagatggatgtcctcaaggatgcttcgctgatgttgagacgatgaagtctcttgcagaacctggagacgtggttattttctag

SEQ ID NO: 20858 - protein, 973 aa, Muscodor strobelii
  misc_feature: SGI Peptide ID NO. 567050
  misc_feature (2)..(934): NCBI GI: 46137867 Blast Desc: FG10449.1 [Gibberella zeae PH-1]
  misc_feature (1)..(973): NCBI GI: 115492241 Blast Desc: [Aspergillus terreus NIH2624] gi|114197608|gb|EAU39308.1| [Aspergillus terreus NIH2624]
  misc_feature (2)..(948): NCBI GI: 145244114 Blast Desc: An11g05770 [Aspergillus niger] gi|134079251|emb|CAK40734.1| [Aspergillus niger]
  misc_feature (1)..(948): NCBI GI: 255945597 Blast Desc: Pc20g10770 [Penicillium chrysogenum Wisconsin 54-1255] gi|211588301|emb|CAP86406.1| Pc20g10770 [Penicillium chrysogenum Wisconsin 54-1255]
  misc_feature (1)..(361): NCBI GI: 169604668 Blast Desc: SNOG_05349 [Phaeosphaeria nodorum SN15] gi|160706620|gb|EAT87740.2| SNOG_05349 [Phaeosphaeria nodorum SN15]
  misc_feature (1)..(458): NCBI GI: 238844746 Blast Desc: conserved [Microsporum canis CBS 113480]
  misc_feature (1)..(431): NCBI GI: 169605903 Blast Desc: SNOG_05984 [Phaeosphaeria nodorum SN15] gi|111065928|gb|EAT87048.1| SNOG_05984 [Phaeosphaeria nodorum SN15]
  misc_feature (1)..(510): NCBI GI: 119494152 Blast Desc: NFIA_007650 [Neosartorya fischeri NRRL 181] gi|119412148|gb|EAW22089.1| conserved [Neosartorya fischeri NRRL 181]
  misc_feature (2)..(361): NCBI GI: 145609608 Blast Desc: MGG_09129 [Magnaporthe grisea 70-15] gi|145017020|gb|EDK01383.1| MGG_09129 [Magnaporthe grisea 70-15]
  misc_feature (2)..(361): NCBI GI: 149210921 Blast Desc: MGCH7_ch7g933 [Magnaporthe grisea 70-15] gi|86196888|gb|EAQ71526.1| MGCH7_ch7g933 [Magnaporthe grisea 70-15]
MSISRFTAALLAGSQENTVALAALNFDFSLYKVEAPREYHALGSCLSDERRVMAEQGSQHVTARKLGALFKSMLPSVPALLKAFGTRVSETAQKAAAKDWNPRDASPNHNVFTTKMGIDGTSIWAAATSGTEALCVQLLACLLARFWTAGEATSIWAEIVEARKLELSSRQGDFDFPEVAAMQATISREQLAEWDASARAWLRTADYIHDKQQTQFRLIFNNIYGPINKRTSTYESVITAWKDSMMVANMLILGAPQSVCDGAALVGLSAWHLFPNMAVYISGIYKEIDQHDSLVKAGGLLTIGLEVEPGTKVGVRWSLPLSKLRYYGDPVPVTETLDSSKSRVSLDQFIMVALGCLSLEWPEMPNKLVRVCQYYAAIGARVGPAVCADIKGSWVKYLATASSKFLSAEHDEKKSLKQLMEWGARRGGNFLLNTDKTSIALESQLFGLSNLHAYMSALRDPLSKANCLRNAMSDYSSEDAENWIIAFNHNSVEEWTFATAILPRDEETRQRHCIWTSLSHHATHISGRLISQCIDEPDHHIDHAVWKYRFKEDDRRSCLCFTRVKAGKDGFGSIYKPNHSGLEPERKETVKFEVVERNSTYGFTLYAVYKKVSCVTSVKNFRLKKVAVDEIISVISDNKIGLDQLSIASRCAWAPLQALSMVAALYEQMGRASISLDVVLGSSLVSKPWFNPKQPFKMNHAESFSCIVSMETGSQDLDPKMLKGVIAVSIDDSIFALSTLLSDPYCDPGQATIVRRLGNFGKHGISLVISPPHMRMRKPSSGDWRIINHDKWDGSRHNSFEQTSLHLLLTDYRVPYVTSHHGDRDIQAFFQEAAISIHDGNSWIGDIDVVKSLQEHWETFIRVPEQCRHGAKAINSPAVGPKVRPAAKKRMGTSSDAGEIVCIDNWYELLDKPNQAAIVRCRKNWLGRLATASLSAQLGYRVLVIPEDGCPQGCFADVETMKSLAEPGDVVIF

SEQ ID NO: 20859 - DNA, 402 bp, Muscodor strobelii
  misc_feature: SGI EST ID NO. CUFF.48932.0
  misc_feature: Variant of the nucleotide sequence at SEQ ID NO 20857
cacaatagtgtcgaagaatggacttttgctactgctatactgccacgggacgaagagacacggcagcggcattgcatctggaccagtctatcacatcacgcgacgcacatttcagggcgcctgatctcccagtgcatcgacgagccagaccatcatatagaccatgccgtatggaaataccgtttcaaggaagacgaccgtcgtagctgtctttgttttactagggttaaagcaggcaaggacgggtttggctcgatatataaaccgaatcattccggactggaaccagagagaaaagagacggtgaaattcgaagtcgtcgaaaggaactccacatatggctttacgctatatgctgtgtataagaaagtctcttgtgtgaccagcgttaagaactttcgg

SEQ ID NO: 20860 - DNA, 1287 bp, Muscodor strobelii
  misc_feature: SGI cDNA ID NO. 567051
  misc_feature: Encodes the peptide sequence at SEQ ID NO 20861
atggccgagccaggatggtcagtatcagactgtacgaccaatgttaccatcacgacccaaattgatatcgccaatctgaagcttgttccctgggaacattgcttcaacaacctctcaattgtcaatgcagatggcttactgactttcaacaacttaacaactgctaaggggctctatgtgtacaatagtcctacacttgaagcccttagcttcccagatctaagagatctactaaatcttggcatctacgatgctacaacgctatccaatgtttcgattcccgaaatagctgcgcttggtgtattaccatctggggatgatggctggagaattttgcctccatcaaggccctggcctgataagagctacgtatcgctcacgattcacgatgccccagtcctccccgccattggatttggctattccagtggctttttcaaactcgacgtagcaggagccgataaacttgaatacgtggacccgtgggcctttgacactggatttattagctacattaattcatccgatactctgatacttgacggttgtttccagcttactgatctgattttcacgcgattcattcatttgaccggtcgagagggatgcaactatggtctttggcatttaaagaccgtctttaatctcaccctgacagacacggccagcagcatcatatacccattagagccccttgtggtgaacggatcgttaacggccgagtcactatacgtttcgcccgagaattcatctttataccctccgcccgttggattcatctcctcaatcaagtatgacgccaagctcacttcgagcagaagtgtggacctgtcacttgacactatcgaagcacttgaaggcgacctaacggtgaccaacaatacgaattgcaccctgtccttcaagacattggcagtagtcgataacggcatctcgatcatcgacaatgcggacacagtcgttccttggcttcctgcattacaaagagcagggaacattcatctacggggcaatatcgatacttctgtgggaccgaatatcttgccttcgctgacatccgtgcctggaacggtgattgtcgaggcttggaacagtgacttcaactgcacaaagttggttgacctgatgaatgctggtatcatccattatctatcctgcaacggaataaacagctacagcataagtagttctcccgatgatagttttgcgttagggcaacgagcaccgccgtttgtcaaattgacgatggcgataacactcatccttatgcgttctgttatatattag

SEQ ID NO: 20861 - protein, 428 aa, Muscodor strobelii
  misc_feature: SGI Peptide ID NO. 567051
MAEPGWSVSDCTTNVTITTQIDIANLKLVPWEHCFNNLSIVNADGLLTFNNLTTAKGLYVYNSPTLEALSFPDLRDLLNLGIYDATTLSNVSIPEIAALGVLPSGDDGWRILPPSRPWPDKSYVSLTIHDAPVLPAIGFGYSSGFFKLDVAGADKLEYVDPWAFDTGFISYINSSDTLILDGCFQLTDLIFTRFIHLTGREGCNYGLWHLKTVFNLTLTDTASSIIYPLEPLVVNGSLTAESLYVSPENSSLYPPPVGFISSIKYDAKLTSSRSVDLSLDTIEALEGDLTVTNNTNCTLSFKTLAVVDNGISIIDNADTVVPWLPALQRAGNIHLRGNIDTSVGPNILPSLTSVPGTVIVEAWNSDFNCTKLVDLMNAGIIHYLSCNGINSYSISSSPDDSFALGQRAPPFVKLTMAITLILMRSVIY

SEQ ID NO: 20862 - DNA, 187 bp, Muscodor strobelii
  misc_feature: SGI EST ID NO. CUFF.48948.0
  misc_feature: Variant of the nucleotide sequence at SEQ ID NO 20860
cggggcaatatcgatacttctgtgggaccgaatatcttgccttcgctgacatccgtgcctggaacggtgattgtcgaggcttggaacagtgacttcaactgcacaaagttggttgacctgatgaatgctggtatcatccattatctatcctgcaacggaataaacagctacagcataagtagttctc

SEQ ID NO: 20863 - DNA, 492 bp, Muscodor strobelii
  misc_feature: SGI cDNA ID NO. 567052
  misc_feature: Encodes the peptide sequence at SEQ ID NO 20864
atggaaggcgttccacagtttcgtatcagacggaaggcagagcaactctgtgtattcgaaataattggtatccgaacatcgttaatccatcacacagatttcggtactatcacgctgcttgccaacatcgtaggcggtcttcagattctgaaacgtggcggagaccctctcaatgacaatgattggtcttgggctcgaccacaacccggatgcctcatcgtcaatatgggcgatgccatggctcagtggacgggtggtattctacatagcagtacccatcgcgttcggcatgcccctggcgatcaacgattcgtcgacaagtacagcgtcgcatatctagccagacctaagcgcaatgcgagcatgaagagacttttgaacgtccaagaggtcgacggtagtgaggatgacagcctgacggcttgggagtgggaattcaagaaagccatgagtctagtgcgggcgtccgagaaaacatccggaaaagtctaa

SEQ ID NO: 20864 - protein, 163 aa, Muscodor strobelii
  misc_feature: SGI Peptide ID NO. 567052
  misc_feature (12)..(116): Pfam Id: PF03171 Pfam Desc: 2OG-Fe(II) oxygenase superfamily
  misc_feature (27)..(116): Pfam Id: PF03171 Pfam Desc: 2OG-Fe(II) oxygenase superfamily
  misc_feature (25)..(152): NCBI GI: 156065687 Blast Desc: SS1G_00854 [Sclerotinia sclerotiorum 1980] gi|154691713|gb|EDN91451.1| SS1G_00854 [Sclerotinia sclerotiorum 1980]
  misc_feature (31)..(153): NCBI GI: 145236539 Blast Desc: An06g00890 [Aspergillus niger] gi|134075373|emb|CAK44996.1| protein product [Aspergillus niger]
  misc_feature (25)..(144): NCBI GI: 238490780 Blast Desc: oxidoreductase, 2OG-Fe(II) oxygenase family, [Aspergillus flavus NRRL3357] gi|220697040|gb|EED53381.1| oxidoreductase, 2OG-Fe(II) oxygenase family, [Aspergillus flavus
  misc_feature (25)..(144): NCBI GI: 169772875 Blast Desc: [Aspergillus oryzae RIB40] gi|83768767|dbj|BAE58904.1| protein product [Aspergillus oryzae]
  misc_feature (25)..(144): NCBI GI: 156043910 Blast Desc: SS1G_10058 [Sclerotinia sclerotiorum 1980] gi|154694447|gb|EDN94185.1| SS1G_10058 [Sclerotinia sclerotiorum 1980]
  misc_feature (31)..(144): NCBI GI: 238506315 Blast Desc: gibberellin 2-beta-dioxygenase, [Aspergillus flavus NRRL3357] gi|220689072|gb|EED45423.1| gibberellin 2-beta-dioxygenase, [Aspergillus flavus NRRL3357]
  misc_feature (25)..(158): NCBI GI: 225558377 Blast Desc: oxidoreductase [Ajellomyces capsulatus G186AR]
  misc_feature (31)..(144): NCBI GI: 169785319 Blast Desc: [Aspergillus oryzae RIB40] gi|83775868|dbj|BAE65987.1| protein product [Aspergillus oryzae]
  misc_feature (25)..(150): NCBI GI: 239611981 Blast Desc: oxidoreductase [Ajellomyces dermatitidis ER-3]
  misc_feature (25)..(125): NCBI GI: 154286122 Blast Desc: [Ajellomyces capsulatus NAm1] gi|150407497|gb|EDN03038.1| [Ajellomyces capsulatus NAm1]
  misc_feature (28)..(123): SWISSPROT Homolog: EC 1.14.11.13 Gibberellin 2-beta-dioxygenase
MEGVPQFRIRRKAEQLCVFEIIGIRTSLIHHTDFGTITLLANIVGGLQILKRGGDPLNDNDWSWARPQPGCLIVNMGDAMAQWTGGILHSSTHRVRHAPGDQRFVDKYSVAYLARPKRNASMKRLLNVQEVDGSEDDSLTAWEWEFKKAMSLVRASEKTSGKV

SEQ ID NO: 20865 - DNA, 1440 bp, Muscodor strobelii
  misc_feature: SGI cDNA ID NO. 567053
  misc_feature: Encodes the peptide sequence at SEQ ID NO 20866
atggctactctcttcacccaccactgtaggctcaaggaggatatgggtctgtccaaggtcagagctgtccacaaccaaaattacaagcgtcatggccgtaagtcttatgtcaacatcatgcacaagtatggcttcgagcctaccaagaacggcccgttcgttcgagttgatgagcacgtgcataaccctctcacaaagatcaagaatgccctcgagggtggatcacataccccgaatcgtgtgcttgtcaaagtaaacaaggaagatgacgatgcaaagcctggagaggtgtccgctcaggatatgcagaacgacacactttatctctgcaaagtctcagttggcactcctgcccaagatctgatgctagactttgacactggctcggctgatacctggactttctctcccgccctccatcacaaggacacagccaaccacaacgtctttgacccgaagaagtcaagcactgccaaagagcttcctggcaagaagtggacgatcagctacggagatggttcgaccgcctcaggcacctgctactctgacgtcctccagctcggcggtctcaagatcaccggccagacaattgagctagctgacgacatatcaaagacgtttaccgctggcaccggagatggacttcttggtcttgcgttcagcagcatcaacacagttaccgaatcaggtatcgctgacccccaacttacccccgtagagaacatgatcaaagaggaagacatccctagctcatctgccctcttcacctcggcgttctacagtactcgtgatgaggatgctgagaaatcgttctacacctttggatggatcgacgaagatctcgtgaaagactcaggtgaagaaatatactggacagaagtcgataactcgcagggcttttggtcagtgagctccgagtccacgtctgtgaacggcgaagctattccccagtcaaacaacactgccatcatcgatactggcacaacccttgccatggttgctgatgaagttgttgagaagctttatgcacagattcccggtgctacttacgactggactaaccagggttacatcatcccaatatccatcactgctgaccaactccctgatttcactgtctcgattggtgacaaagactttgttatccagaaggaagacttactctttgctctgacggatgatggcaagagttggtatggtggcgtacagagccgtggaaacctgccatttgacatccttggtgatgtgtttctgaagagcgtttattgcatctgggacattggcaaccgccgcttcggcgccgtccccaagctcgagcaacgacaaaaccttacacctcccactgtaggtgacggtgactacggcgaaggcaagactagagtcaccagcatcgcgatggccaaggcgaacttcatcgaccccatgagcgttcccaagtag

SEQ ID NO: 20866 - protein, 479 aa, Muscodor strobelii
  misc_feature: SGI Peptide ID NO. 567053
  misc_feature (107)..(435): Pfam Id: PF00026 Pfam Desc: Eukaryotic aspartyl protease
  misc_feature (1)..(444): NCBI GI: 145583125 Blast Desc: aspartic endopeptidase [Hypocrea lixii]
  misc_feature (1)..(444): NCBI GI: 118161440 Blast Desc: aspartyl proteinase [Hypocrea lixii]
  misc_feature (1)..(444): NCBI GI: 51860175 Blast Desc: aspartyl proteinase [Trichoderma asperellum]
  misc_feature (1)..(447): NCBI GI: 85102020 Blast Desc: NCU04269 [Neurospora crassa OR74A] gi|16944483|emb|CAC28744.2| related to pepsin precursor [Neurospora crassa] gi|28922802|gb|EAA32024.1| NCU04269 crassa
  misc_feature (4)..(446): NCBI GI: 116197829 Blast Desc: CHGG_07070 [Chaetomium globosum CBS 148.51] gi|88178349|gb|EAQ85817.1| CHGG_07070 [Chaetomium globosum CBS 148.51]
  misc_feature (1)..(474): NCBI GI: 171693703 Blast Desc: protein product [Podospora anserina] gi|170946800|emb|CAP73604.1| protein product [Podospora anserina]
  misc_feature (16)..(447): NCBI GI: 12002205 Blast Desc: AF121229_1 aspartic proteinase precursor [Botryotinia fuckeliana]
  misc_feature (18)..(444): NCBI GI: 119887992 Blast Desc: PEPAb [Aspergillus niger]
  misc_feature (16)..(447): NCBI GI: 156055954 Blast Desc: SS1G_05329 [Sclerotinia sclerotiorum 1980] gi|154703113|gb|EDO02852.1| SS1G_05329 [Sclerotinia sclerotiorum 1980]
  misc_feature (19)..(447): NCBI GI: 119467426 Blast Desc: aspartic endopeptidase (AP1), [Neosartorya fischeri NRRL 181] gi|119405671|gb|EAW15622.1| aspartic endopeptidase (AP1), [Neosartorya fischeri NRRL 181]
  misc_feature (95)..(433): SWISSPROT Homolog: EC 3.4.23.18 Aspergillopepsin I
MATLFTHHCRLKEDMGLSKVRAVHNQNYKRHGRKSYVNIMHKYGFEPTKNGPFVRVDEHVHNPLTKIKNALEGGSHTPNRVLVKVNKEDDDAKPGEVSAQDMQNDTLYLCKVSVGTPAQDLMLDFDTGSADTWTFSPALHHKDTANHNVFDPKKSSTAKELPGKKWTISYGDGSTASGTCYSDVLQLGGLKITGQTIELADDISKTFTAGTGDGLLGLAFSSINTVTESGIADPQLTPVENMIKEEDIPSSSALFTSAFYSTRDEDAEKSFYTFGWIDEDLVKDSGEEIYWTEVDNSQGFWSVSSESTSVNGEAIPQSNNTAIIDTGTTLAMVADEVVEKLYAQIPGATYDWTNQGYIIPISITADQLPDFTVSIGDKDFVIQKEDLLFALTDDGKSWYGGVQSRGNLPFDILGDVFLKSVYCIWDIGNRRFGAVPKLEQRQNLTPPTVGDGDYGEGKTRVTSIAMAKANFIDPMSVPK

SEQ ID NO: 20867 - DNA, 2199 bp, Muscodor strobelii
  misc_feature: SGI cDNA ID NO. 567054
  misc_feature: Encodes the peptide sequence at SEQ ID NO 20868
atggctgctccggccaggcgcaggaagttgatcggccatcgccgccgtgtcgaggatgagggcgaagatgagggcagtccggaccacctcgaggctgatgacgactcccttagtgacggatccttggcatccgacgacgtcgaccctgctgacgacagcgacacgagcaacgtcgaggacacctctcccaccgtgaagaaaataacgggccgccacagtgctaacggccatggcagcaatggcaacgctgccaagccatccgccagctcggcaccatcgaagcagtccaagtcgagtcccggcgccgtcaccgtcactgacaccgagttcatgatgaacggcctcagcttgtccgacaaggctgccccggtcaaggagatggatttcgatgactcggtcaagtcacccccgaagccttcagcacccatcgtagtcagttccgaggctgtcaccggccgcgacgcctcacaaggcccccctggcgatcggaggcgtagagagcacgaggaatacaggcggaagcgggacgaagatccatctttcgttcccaaccggggggctttcttcatgcacgaccacagacacgcaggtccctctgccaacggcttccgcccctttggccgagcagctcgtggcggcagaggccgtggtggcatgggagccctctatgcacctgtccagtatgtgatatttacctctgcatggcaagtgtatgctaacgtggacagtcactctatgcacaatgcagccgacccgacgactagcgcaccgtgggcgcacgacatgcacgagactgttgcgcagccgttgcccagtcgcccgccacgctcttcctttgctgacgacggtccgcccaacggcaatggctacattcccacctgccctcaaagctcgacgcccatcaaccgggacatggactcggagagggtgcttggcaacgtgcagatccgcgtcttccttgccggcttcaaagagcccattgtcatatcgggcattcctataaaacagtacaccaaactgccgaaccaccggcctcctctacgacgtgacaaacccgtgcgcatctctctaccggactatccccatcgttatgtcttcccggctaccgatagatcgttcatcttcatcccccgtgccatgcggccgaaccaacggctccgtggcaaaccacggccggggctgggctctgtcggaggatggtcaaggcgcacaagcatctttggaggtagtacctatgctcccagcacctacactcccagtattgcactcagccgccggtcgtcggtggcgccagagttcaaccgagagtttcttgtgtcgcccactggatctgtcatgtcacgccctgcgcttccttatgactcggctcgcccagttgtccgcctccctccacaggctcggcaggagcaaagagtgcctatgcccatgtccatgcccagcgatccttcaaacgagatgcccatgatgccggctcagcccgtcctcagcgaacgacctccttctcaggtccacccactgccccaacggccagcgtttgtgcagaaccaggcagggtcattgcccatgcatcagcctcgtcctcagaagacggtgtcagtcgcgagcatcgagtctccagagagacaggaaaacatttcacagccctaccagtcggcattccaccaccaagtgcctgtccaggtatccaacggctatggccacgatgcccacagtcgccagccatcgtacccttcgcatcattcaactggaacgcctctctcgcaaataccagagcgcgctattcacgcggctccattccaacctacacagttctcacaacagagttactatcaaccctatcctatgatgccgcaacagcccggctattattatcctcaagctccatatcccggagccatggctcctggagcgcctgcatttgttcctggctcgcagcctggcccgccaacgcagaacgagatgccaggtccgcaaccccctggagcggccccggcctcccaaggttcgaacctcgtcgcacaagaggtcaatggaatggtctattactatgatgcgtcgcagttgccttccgtggcaccttcctactcctaccccacgtcgcaaggatatgctatgcccagcgtcggcatgaataatatggttacacccagcccggatgtcttttactatccgactaatggggtctactatcctcaatag

SEQ ID NO: 20868 - protein, 732 aa, Muscodor strobelii
  misc_feature: SGI Peptide ID NO. 567054
  misc_feature (144)..(291): Pfam Id: PF09405 Pfam Desc: CASC3/Barentsz eIF4AIII binding
  misc_feature (3)..(732): NCBI GI: 261352131 Blast Desc: conserved [Verticillium albo-atrum VaMs.102]
  misc_feature (22)..(732): NCBI GI: 39973743 Blast Desc: MGG_00982 [Magnaporthe grisea 70-15] gi|145018063|gb|EDK02342.1| MGG_00982 [Magnaporthe grisea 70-15]
  misc_feature (1)..(732): NCBI GI: 256731673 Blast Desc: NECHADRAFT_40681 [Nectria haematococca mpVI 77-13-4]
  misc_feature (2)..(732): NCBI GI: 46136961 Blast Desc: FG09996.1 [Gibberella zeae PH-1]
  misc_feature (2)..(732): NCBI GI: 85102024 Blast Desc: NCU04270 [Neurospora crassa OR74A] gi|28922803|gb|EAA32025.1| [Neurospora crassa OR74A]
  misc_feature (2)..(732): NCBI GI: 12718435 Blast Desc: conserved [Neurospora crassa]
  misc_feature (1)..(732): NCBI GI: 171694263 Blast Desc: protein product [Podospora anserina] gi|170947080|emb|CAP73885.1| protein product [Podospora anserina]
  misc_feature (17)..(732): NCBI GI: 154292175 Blast Desc: BC1G_14709 [Botryotinia fuckeliana B05.10] gi|150846260|gb|EDN21453.1| BC1G_14709 [Botryotinia fuckeliana B05.10]
  misc_feature (18)..(732): NCBI GI: 156055180 Blast Desc: SS1G_04941 [Sclerotinia sclerotiorum 1980] gi|154702726|gb|EDO02465.1| SS1G_04941 [Sclerotinia sclerotiorum 1980]
  misc_feature (1)..(394): NCBI GI: 116197831 Blast Desc: CHGG_07071 [Chaetomium globosum CBS 148.51] gi|88178350|gb|EAQ85818.1| CHGG_07071 [Chaetomium globosum CBS 148.51]
MAAPARRRKLIGHRRRVEDEGEDEGSPDHLEADDDSLSDGSLASDDVDPADDSDTSNVEDTSPTVKKITGRHSANGHGSNGNAAKPSASSAPSKQSKSSPGAVTVTDTEFMMNGLSLSDKAAPVKEMDFDDSVKSPPKPSAPIVVSSEAVTGRDASQGPPGDRRRREHEEYRRKRDEDPSFVPNRGAFFMHDHRHAGPSANGFRPFGRAARGGRGRGGMGALYAPVQYVIFTSAWQVYANVDSHSMHNAADPTTSAPWAHDMHETVAQPLPSRPPRSSFADDGPPNGNGYIPTCPQSSTPINRDMDSERVLGNVQIRVFLAGFKEPIVISGIPIKQYTKLPNHRPPLRRDKPVRISLPDYPHRYVFPATDRSFIFIPRAMRPNQRLRGKPRPGLGSVGGWSRRTSIFGGSTYAPSTYTPSIALSRRSSVAPEFNREFLVSPTGSVMSRPALPYDSARPVVRLPPQARQEQRVPMPMSMPSDPSNEMPMMPAQPVLSERPPSQVHPLPQRPAFVQNQAGSLPMHQPRPQKTVSVASIESPERQENISQPYQSAFHHQVPVQVSNGYGHDAHSRQPSYPSHHSTGTPLSQIPERAIHAAPFQPTQFSQQSYYQPYPMMPQQPGYYYPQAPYPGAMAPGAPAFVPGSQPGPPTQNEMPGPQPPGAAPASQGSNLVAQEVNGMVYYYDASQLPSVAPSYSYPTSQGYAMPSVGMNNMVTPSPDVFYYPTNGVYYPQ

SEQ ID NO: 20869 - DNA, 5422 bp, Muscodor strobelii
  misc_feature: SGI EST ID NO. CUFF.49032.0
  misc_feature: Variant of the nucleotide sequence at SEQ ID NO 20867
gggcgataccggagcgtgctgtcaaatccggggtgaaagccggggaatgctcattgctattagaaatggagatgcacgattcgtcagtgggtgataacatggtccttttgcgatcgagcatttgtcctcacactcactctcttgtacgatattttggagaatcactggccaaatgacattgtccaagaggagagcacgacttggggacgcatgggcagagcagagacgaaacgggaggtgaatagcgattgtttattgatctgacacgccatacgaagggatgattggcctgatgtggtgcatgaatgtatgcagatgagccgaatggaaggcaactctatttgtgcgcgtcccgttccagtgcctatcatctcgcccacgcgtgtgttggggaagccgctactgcgacgacacgttttcaaaacataaaatgctattacactgcttgaagtctacttcagtccgacgccacagagtagagatgattgcaaatgcagcggctcttggtgtagggtaaggtaaatagacccgtggatgataggaagtctgctagcgactgcactatgacaggataatagaaaggcattttcttgtaggaagaggtcgatggttctcgaccaaatcaaagtgtctaattgagtctcaatggtcgaagagaaagagctcaggagctctcaattctttgaagcaaccacgatcatttcgagtcttgatattggagagaggccctttggaactgccctttggaactgccctacctaccttatttgccacatgccttcaagtttccgttctattcaacggcattccaccactgctgcttgtctcctgttaaagccttctgccatataccttcttttatgccatttcttctagggtagtctgcatcagtgcttgggatgtctgggatgaatggctagattggtgttcaatgtggcccatcgctgcatccagcgagactgtgcgctaacattcaacgatgcacggaacctagatgaaaatcgattgggtgtcggggcagctccagcttctggaatccccaccgatggaagcgtccaccacgctttccacggcgtctggcgccactgctcagtgctggcggtcgcacgctagcgacagcagcccccgtcgccatcgattcaccccaagtcaccccaactctggcctcgacctcatcgaaacttttggatgtgctgccagactgctccatcatcatcatcgcctcccgcgcacacaccacaccacactcgcaccaccaccactctcctctcctctcgtcagtatacccctatagacgaacagcccgcggcagagaacgtgtctgatgcagcttcagatggtttaccattctgtcgccacgcattgtctcctctttctttcgtaatccaccagttcgctgtctctttcgtgccgcttcctctagctatccgtgtgtttttaagtgctgttgcctcgaaccccaaacgagtcaacaccaccacaacgaccaccgccaacgctcgactccgtcttgctccggacccaacacgacggtacacacggacacgctcgacacattcctgttcccatgtttggctgctgcatgttgtgcaggcgcccgggcttctgaattggctgtttcccgtttcccgtcctctttctgtctgctctgtctccttctgtgccgccggcggttattttgccccctgggtcagttgctgcttatccggtcccggcagtctcaaccaccaccgatcacgtattatcgtccgatcgtctttccatcgcgaatcagcacacgcatgattctgcctccagccacggcgcacacgtcgtgattcagctccccgcagctaagcctgactcttcccccgacggaagctatccatccatcgtcgtcgcccacacatccagcgcatcacccatcacccatccacatcgaccatggctgctccggccaggcgcaggaagttgatcggccatcgccgccgtgtcgaggatgagggcgaagatgagggcagtccggaccacctcgaggctgatgacgactcccttagtgacggatccttggcatccgacgacgtcgaccctgctgacgacagcgacacgagcaacgtcgaggacacctctcccaccgtgaagaaaataacgggccgccacagtgctaacggccatggcagcaatggcaacgctgccaagccatccgccagctcggcaccatcgaagcagtccaagtcgagtcccggcgccgtcaccgtcactgacaccgagttcatgatgaacggcctcagcttgtccgacaaggctgccccggtcaaggagatggatttcgatgactcggtcaagtcacccccgaagccttcagcacccatcgtagtcagttccgaggctgtcaccggccgcgacgcctcacaaggcccccctggcgatcggaggcgtagagagcacgaggaatacaggcggaagcgggacgaagatccatctttcgttcccaaccggggggctttcttcatgcacgaccacagacacgcaggtccctctgccaacggcttccgcccctttggccgagcagctcgtggcggcagaggccgtggtggcatgggagccctctatgcacctgtccatcactctatgcacaatgcagccgacccgacgactagcgcaccgtgggcgcacgacatgcacgagactgttgcgcagccgttgcccagtcgcccgccacgctcttcctttgctgacgacggtccgcccaacggcaatggctacattcccacctgccctcaaagctcgacgcccatcaaccgggacatggactcggagagggtgcttggcaacgtgcagatccgcgtcttccttgccggcttcaaagagcccattgtcatatcgggcattcctataaaacagtacaccaaactgccgaaccaccggcctcctctacgacgtgacaaacccgtgcgcatctctctaccggactatccccatcgttatgtcttcccggctaccgatagatcgttcatcttcatcccccgtgccatgcggccgaaccaacggctccgtggcaaaccacggccggggctgggctctgtcggaggatggtcaaggcgcacaagcatctttggaggtagtacctatgctcccagcacctacactcccagtattgcactcagccgccggtcgtcggtggcgccagagttcaaccgagagtttcttgtgtcgcccactggatctgtcatgtcacgccctgcgcttccttatgactcggctcgcccagttgtccgcctccctccacaggctcggcaggagcaaagagtgcctatgcccatgtccatgcccagcgatccttcaaacgagatgcccatgatgccggctcagcccgtcctcagcgaacgacctccttctcaggtccacccactgccccaacggccagcgtttgtgcagaaccaggcagggtcattgcccatgcatcagcctcgtcctcagaagacggtgtcagtcgcgagcatcgagtctccagagagacaggaaaacatttcacagccctaccagtcggcattccaccaccaagtgcctgtccaggtatccaacggctatggccacgatgcccacagtcgccagccatcgtacccttcgcatcattcaactggaacgcctctctcgcaaataccagagcgcgctattcacgcggctccattccaacctacacagttctcacaacagagttactatcaaccctatcctatgatgccgcaacagcccggctattattatcctcaagctccatatcccggagccatggctcctggagcgcctgcatttgttcctggctcgcagcctggcccgccaacgcagaacgagatgccaggtccgcaaccccctggagcggccccggcctcccaaggttcgaacctcgtcgcacaagaggtcaatggaatggtctattactatgatgcgtcgcagttgccttccgtggcaccttcctactcctaccccacgtcgcaaggatatgctatgcccagcgtcggcatgaataatatggttacacccagcccggatgtcttttactatccgactaatggggtctactatcctcaatagattatcgactctgtcgctccttagctcaccgctgcctcgcctgaagggctgacctcagcttatcccaatgtcggacctcgtggtcacgatgatatcagcagcactggacctgggtggcgtcgattgacttgtacagcataccaatgtgtggcacaacgtctccaaagtctcggcgactttacgagctcgtctgcgtcatggctgcatcagtcaatcacttctatctaagatacctaccaggactgacactcctccaaataaaagaaacttccacccacccatcctgcttcctcaagtacgcttccaactctgatgctctactgcgttcctctttcgactttccgtcatctccggtgaatgtgacattctgcaatggcgttggaggcgttcttttttcctttcgtatgtttacattgttcgcgattgcctccttccttacacgtcgcggcctgtctctagaatctcacttatgtgcacttcgcagagacacgcaagtggttcctcatcggtcggatcttggtttggttcacttcttcgactacggtacggagtgggtagacttgtatgttttgaggagtgtcagctttagtcgtccgtttccgatacatcgtcaactacctacttacatttcaagacgggggtttcccttagtttcttcatggagtcgggcagatgggggcttgcaatgctgggttttgatgaacgagaaaacagtcatgttcttacctgttctgttgtatcctcatcgatgtgctgagctgggtggagtattcattacttgcatgttggattacgacggattggggttggcatagcacttgttttcccttgatgtgatagcttccctcatccgagcccaggcaaagaaatcctagatgtgcatctattacctcgtcgtgcggacctcgttttgtctatgcctgtgcctgtgtgtatttatagcggtgcttaaatccgatctatcaaacacataatcccgaaggattcgcacactcaatccaaagtcatcagcatacactcttaagtgctgcacagccgaagctggtcacctggagaggaagtaccctgctcagcatgacggattgagaacgccgccagcgtcttcggggtcataatcaccatttaaagcaatgtgcaagtctttatgcgatccgaggacagaagaaaggtctaaaaaaagagaagaaaaacaaatcaagagtcagtaatcgagactttctagacatcaccgagtaactaacctaggtacactgtcctggactatataatccactaccgtatctttgaagaaggtcgtgcgcacgtatctcgagcaaggaaaactaaactaaattgcaagactttccag

SEQ ID NO: 20870 - DNA, 2151 bp, Muscodor strobelii
  misc_feature: SGI cDNA ID NO. 567055
  misc_feature: Reduced expression when VOC is produced
  misc_feature: Encodes the peptide sequence at SEQ ID NO 20871
atggctgctccggccaggcgcaggaagttgatcggccatcgccgccgtgtcgaggatgagggcgaagatgagggcagtccggaccacctcgaggctgatgacgactcccttagtgacggatccttggcatccgacgacgtcgaccctgctgacgacagcgacacgagcaacgtcgaggacacctctcccaccgtgaagaaaataacgggccgccacagtgctaacggccatggcagcaatggcaacgctgccaagccatccgccagctcggcaccatcgaagcagtccaagtcgagtcccggcgccgtcaccgtcactgacaccgagttcatgatgaacggcctcagcttgtccgacaaggctgccccggtcaaggagatggatttcgatgactcggtcaagtcacccccgaagccttcagcacccatcgtagtcagttccgaggctgtcaccggccgcgacgcctcacaaggcccccctggcgatcggaggcgtagagagcacgaggaatacaggcggaagcgggacgaagatccatctttcgttcccaaccggggggctttcttcatgcacgaccacagacacgcaggtccctctgccaacggcttccgcccctttggccgagcagctcgtggcggcagaggccgtggtggcatgggagccctctatgcacctgtccatcactctatgcacaatgcagccgacccgacgactagcgcaccgtgggcgcacgacatgcacgagactgttgcgcagccgttgcccagtcgcccgccacgctcttcctttgctgacgacggtccgcccaacggcaatggctacattcccacctgccctcaaagctcgacgcccatcaaccgggacatggactcggagagggtgcttggcaacgtgcagatccgcgtcttccttgccggcttcaaagagcccattgtcatatcgggcattcctataaaacagtacaccaaactgccgaaccaccggcctcctctacgacgtgacaaacccgtgcgcatctctctaccggactatccccatcgttatgtcttcccggctaccgatagatcgttcatcttcatcccccgtgccatgcggccgaaccaacggctccgtggcaaaccacggccggggctgggctctgtcggaggatggtcaaggcgcacaagcatctttggaggtagtacctatgctcccagcacctacactcccagtattgcactcagccgccggtcgtcggtggcgccagagttcaaccgagagtttcttgtgtcgcccactggatctgtcatgtcacgccctgcgcttccttatgactcggctcgcccagttgtccgcctccctccacaggctcggcaggagcaaagagtgcctatgcccatgtccatgcccagcgatccttcaaacgagatgcccatgatgccggctcagcccgtcctcagcgaacgacctccttctcaggtccacccactgccccaacggccagcgtttgtgcagaaccaggcagggtcattgcccatgcatcagcctcgtcctcagaagacggtgtcagtcgcgagcatcgagtctccagagagacaggaaaacatttcacagccctaccagtcggcattccaccaccaagtgcctgtccaggtatccaacggctatggccacgatgcccacagtcgccagccatcgtacccttcgcatcattcaactggaacgcctctctcgcaaataccagagcgcgctattcacgcggctccattccaacctacacagttctcacaacagagttactatcaaccctatcctatgatgccgcaacagcccggctattattatcctcaagctccatatcccggagccatggctcctggagcgcctgcatttgttcctggctcgcagcctggcccgccaacgcagaacgagatgccaggtccgcaaccccctggagcggccccggcctcccaaggttcgaacctcgtcgcacaagaggtcaatggaatggtctattactatgatgcgtcgcagttgccttccgtggcaccttcctactcctaccccacgtcgcaaggatatgctatgcccagcgtcggcatgaataatatggttacacccagcccggatgtcttttactatccgactaatggggtctactatcctcaatag

SEQ ID NO: 20871 - protein, 716 aa, Muscodor strobelii
  misc_feature: SGI Peptide ID NO. 567055
  misc_feature (144)..(275): Pfam Id: PF09405 Pfam Desc: CASC3/Barentsz eIF4AIII binding
  misc_feature (3)..(716): NCBI GI: 261352131 Blast Desc: conserved [Verticillium albo-atrum VaMs.102]
  misc_feature (22)..(716): NCBI GI: 39973743 Blast Desc: MGG_00982 [Magnaporthe grisea 70-15] gi|145018063|gb|EDK02342.1| MGG_00982 [Magnaporthe grisea 70-15]
  misc_feature (1)..(716): NCBI GI: 256731673 Blast Desc: NECHADRAFT_40681 [Nectria haematococca mpVI 77-13-4]
  misc_feature (2)..(716): NCBI GI: 46136961 Blast Desc: FG09996.1 [Gibberella zeae PH-1]
  misc_feature (1)..(716): NCBI GI: 171694263 Blast Desc: protein product [Podospora anserina] gi|170947080|emb|CAP73885.1| protein product [Podospora anserina]
  misc_feature (2)..(716): NCBI GI: 12718435 Blast Desc: conserved [Neurospora crassa]
  misc_feature (2)..(716): NCBI GI: 85102024 Blast Desc: NCU04270 [Neurospora crassa OR74A] gi|28922803|gb|EAA32025.1| [Neurospora crassa OR74A]
  misc_feature (17)..(716): NCBI GI: 154292175 Blast Desc: BC1G_14709 [Botryotinia fuckeliana B05.10] gi|150846260|gb|EDN21453.1| BC1G_14709 [Botryotinia fuckeliana B05.10]
  misc_feature (18)..(716): NCBI GI: 156055180 Blast Desc: SS1G_04941 [Sclerotinia sclerotiorum 1980] gi|154702726|gb|EDO02465.1| SS1G_04941 [Sclerotinia sclerotiorum 1980]
  misc_feature (1)..(378): NCBI GI: 116197831 Blast Desc: CHGG_07071 [Chaetomium globosum CBS 148.51] gi|88178350|gb|EAQ85818.1| CHGG_07071 [Chaetomium globosum CBS 148.51]
  misc_feature: Useful for introducing or modulating the production of volatile compounds
MAAPARRRKLIGHRRRVEDEGEDEGSPDHLEADDDSLSDGSLASDDVDPADDSDTSNVEDTSPTVKKITGRHSANGHGSNGNAAKPSASSAPSKQSKSSPGAVTVTDTEFMMNGLSLSDKAAPVKEMDFDDSVKSPPKPSAPIVVSSEAVTGRDASQGPPGDRRRREHEEYRRKRDEDPSFVPNRGAFFMHDHRHAGPSANGFRPFGRAARGGRGRGGMGALYAPVHHSMHNAADPTTSAPWAHDMHETVAQPLPSRPPRSSFADDGPPNGNGYIPTCPQSSTPINRDMDSERVLGNVQIRVFLAGFKEPIVISGIPIKQYTKLPNHRPPLRRDKPVRISLPDYPHRYVFPATDRSFIFIPRAMRPNQRLRGKPRPGLGSVGGWSRRTSIFGGSTYAPSTYTPSIALSRRSSVAPEFNREFLVSPTGSVMSRPALPYDSARPVVRLPPQARQEQRVPMPMSMPSDPSNEMPMMPAQPVLSERPPSQVHPLPQRPAFVQNQAGSLPMHQPRPQKTVSVASIESPERQENISQPYQSAFHHQVPVQVSNGYGHDAHSRQPSYPSHHSTGTPLSQIPERAIHAAPFQPTQFSQQSYYQPYPMMPQQPGYYYPQAPYPGAMAPGAPAFVPGSQPGPPTQNEMPGPQPPGAAPASQGSNLVAQEVNGMVYYYDASQLPSVAPSYSYPTSQGYAMPSVGMNNMVTPSPDVFYYPTNGVYYPQ

SEQ ID NO: 20872 - DNA, 5422 bp, Muscodor strobelii; identical to SEQ ID NO: 20869
  misc_feature: SGI EST ID NO. CUFF.49032.0
  misc_feature: Variant of the nucleotide sequence at SEQ ID NO 20870

SEQ ID NO: 20873 - DNA, 2652 bp, Muscodor strobelii
  misc_feature: SGI cDNA ID NO. 567056
  misc_feature: Encodes the peptide sequence at SEQ ID NO 20874
atggcttcgtcatcgacaaacgccaccacctcggataccctcatcagcctcaaggtcaacctcgacggtgccacccgccgcttcaagcttcccctacgtgacctcggtgcccaggtgttcgaggacaagctccgagccttcctccagatccctgtcgatacggcgaccgtcattgaccgctactcggactcggctgcctcctatgtgaccctcgacccccgaaatgtcagtgtgtacaagcagctataccgcgccgccaaggccaagcagaagctgaagctgcgtgtcgtcaccaaacccatagagcaagagcccgagctcgagcccgtccaggaatccgagactgctcccaagccggcaactgtcgaggatgaacgcgagcaggagacgcaggagacggtagaacccgaggtcaagcaggaaacgcaaccagaaccaacagcacgttccattttcgagtcggacagtggcgatcgcatcatctcatatacgcgtgccgatggcacaacagccttgtttggcgatttcttgcgacgagaatcctccaacacccagctggcaccgacctcgtacagttccactcctgccaagccagcccctattgtcgacctcagtgccctgctgcccaagccagagccggaggccactcagtcagactcgtctcgcccagtcgagacccaaaagcgccagttcactgtgtgctgcaacagctgcgaagagcccatccccgatgctcatttccactgctccatttgcgatgagggcgacttcgacctctgccaggattgcgtgaaccgaggcatctcgtgcaacggcgacggacactggctgatcaagcggactgtcgtggacggcgagatcaaatacagcactactcacatcgccccaaagccaaacaaaactgccgtcgccaagccctctccagcttcatccgtctctcctacaccgacccgcgttgagcctcaactcgttgccagcgtacccctcagtctacccattcgatcgtgcccgatgcgagtagaacaatccgtttcgtcgcctggctggaaccgagtcaacttccgcacgtgcaactcgtgcgtacaggagctcccggagaaggaattcttgcactgcacaagttgtgatgatttcgatctttgcaagaactgcttcgccaagaatcaacatggccaccacccaagtcacggcttcactgccgccattcctggcatgctgttcgaccaggccgtcacttcacgcctggctcctggacggaactgcgtgcacaacgccatctgcgatggttgcgataagtatgttcgtggggtccgccacaagtgcttggactgccctgactgggacttctgcgccgagtgcatccaaaatgccagcttcattcaccccaaccaccgtttcgtccccatctacgagcctttggcagaccggcctgtccgcttcacggcccgaaacgtccatgcgggcatctgctgcgatggcccacactgcacggaccgcgaggctgcgtccaagtacattgtcggagttcgctacaagtgtgccgtctgcaacgacctggacttctgcgccaactgtgaggccagtcccgccaatacgcataacaagacccatcctctcatcaagttcaagaccccggtgcgtcatgtcagcgtgaccacgactggagagcacgaggacgggcagcgtctacccaccatgggcgaccgtgctgcacgtagcagcggcgcgtctacacggttccgacagcgtagatgccaacgcgaagctgccttgaaggagcatattgcagccactcctgtccagactgtcgtcaatgtccagcctaccgaacagcccgaagctgtgaagcctgagcccgtggccgagctgaagacgcctgtccaggcaccaagtgtcgaggtcaaagaggaggaggtagccacaccctcggaagagctcagcgccacgttcatgtttgacaccgtgaaagacggttccatttatccacccaaccagaccttcgagcagacatgggtactgcgcaacgatgggcaagtgtcatggcctacgggatgctctgtcaagtttgtcggtggtgactacatgggagctgtcgaccccagtcatcccgctagtatccacgaggttgtctcggcatccgagtctaccgtatgctacggtgcccttagccccggcaaggaattccctttcacggtcttgctgcgcacccccagccgccctggaaaagtcatttcatattggcgtctcacaacccccgatggcaagaagttcggtcacaagctatggtgcgacgtaaatgtccagactcctcccaaggtcgagcaggctaaacccgaagcatccgctgccgctccggtgcaggaatcgactgagagcgaaatggccgagagccgtatgatcattccaaaattggttcacgaatctcctgctgccagtatccacgagagccgctctgagaccacactcgaagtagagaccgagacggagacacttgcgccttccgtggatgaggaggacttcgaggactgcgggggccaggatgagtgggccgaagagtctgacgacggtttcatgactgacgaggaatacgagattctggatgcctccgatgaggagtatctgtccgagcagcaaaagcacctgtctaagtaa

SEQ ID NO: 20874 - protein, 883 aa, Muscodor strobelii
  misc_feature: SGI Peptide ID NO. 567056
  misc_feature (351)..(394): Pfam Id: PF00569 Pfam Desc: Zinc finger, ZZ type
  misc_feature (371)..(394): Pfam Id: PF00569 Pfam Desc: Zinc finger, ZZ type
  misc_feature (506)..(535): Pfam Id: PF00569 Pfam Desc: Zinc finger, ZZ type
  misc_feature (2)..(883): NCBI GI: 261352133 Blast Desc: ZZ type zinc finger domain-containing protein [Verticillium albo-atrum VaMs.102]
  misc_feature (1)..(877): NCBI GI: 145610681 Blast Desc: MGG_00984 [Magnaporthe grisea 70-15] gi|145018061|gb|EDK02340.1| MGG_00984 [Magnaporthe grisea 70-15]
  misc_feature (9)..(873): NCBI GI: 171694267 Blast Desc: protein product [Podospora anserina] gi|170947082|emb|CAP73887.1| protein product [Podospora anserina]
  misc_feature (1)..(873): NCBI GI: 116197835 Blast Desc: CHGG_07073 [Chaetomium globosum CBS 148.51] gi|88178352|gb|EAQ85820.1| CHGG_07073 [Chaetomium globosum CBS 148.51]
  misc_feature (30)..(882): NCBI GI: 256731674 Blast Desc: NECHADRAFT_41318 [Nectria haematococca mpVI 77-13-4]
  misc_feature (4)..(878): NCBI GI: 156056230 Blast Desc: SS1G_05467 [Sclerotinia sclerotiorum 1980] gi|154703251|gb|EDO02990.1| SS1G_05467 [Sclerotinia sclerotiorum 1980]
  misc_feature (30)..(882): NCBI GI: 46136959 Blast Desc: FG09995.1 [Gibberella zeae PH-1]
  misc_feature (4)..(779): NCBI GI: 154291234 Blast Desc: BC1G_15245 [Botryotinia fuckeliana B05.10] gi|150847056|gb|EDN22249.1| BC1G_15245 [Botryotinia fuckeliana B05.10]
  misc_feature (12)..(879): NCBI GI: 225559575 Blast Desc: ZZ type zinc finger domain-containing protein [Ajellomyces capsulatus G186AR]
  misc_feature (12)..(879): NCBI GI: 154281135 Blast Desc: [Ajellomyces capsulatus NAm1] gi|150411559|gb|EDN06947.1| [Ajellomyces capsulatus NAm1]
MASSSTNATTSDTLISLKVNLDGATRRFKLPLRDLGAQVFEDKLRAFLQIPVDTATVIDRYSDSAASYVTLDPRNVSVYKQLYRAAKAKQKLKLRVVTKPIEQEPELEPVQESETAPKPATVEDEREQETQETVEPEVKQETQPEPTARSIFESDSGDRIISYTRADGTTALFGDFLRRESSNTQLAPTSYSSTPAKPAPIVDLSALLPKPEPEATQSDSSRPVETQKRQFTVCCNSCEEPIPDAHFHCSICDEGDFDLCQDCVNRGISCNGDGHWLIKRTVVDGEIKYSTTHIAPKPNKTAVAKPSPASSVSPTPTRVEPQLVASVPLSLPIRSCPMRVEQSVSSPGWNRVNFRTCNSCVQELPEKEFLHCTSCDDFDLCKNCFAKNQHGHHPSHGFTAAIPGMLFDQAVTSRLAPGRNCVHNAICDGCDKYVRGVRHKCLDCPDWDFCAECIQNASFIHPNHRFVPIYEPLADRPVRFTARNVHAGICCDGPHCTDREAASKYIVGVRYKCAVCNDLDFCANCEASPANTHNKTHPLIKFKTPVRHVSVTTTGEHEDGQRLPTMGDRAARSSGASTRFRQRRCQREAALKEHIAATPVQTVVNVQPTEQPEAVKPEPVAELKTPVQAPSVEVKEEEVATPSEELSATFMFDTVKDGSIYPPNQTFEQTWVLRNDGQVSWPTGCSVKFVGGDYMGAVDPSHPASIHEVVSASESTVCYGALSPGKEFPFTVLLRTPSRPGKVISYWRLTTPDGKKFGHKLWCDVNVQTPPKVEQAKPEASAAAPVQESTESEMAESRMIIPKLVHESPAASIHESRSETTLEVETETETLAPSVDEEDFEDCGGQDEWAEESDDGFMTDEEYEILDASDEEYLSEQQKHLSK

SEQ ID NO: 20875 - DNA, 3324 bp, Muscodor strobelii
  misc_feature: SGI EST ID NO. CUFF.49453.1
  misc_feature: Variant of the nucleotide sequence at SEQ ID NO 20873
cctcaggctgcctgggctccagagcactagactgctacccgccaggacgcaactcgtcacttcgacttcctctcacacacacgcaacctcctctcaccttcctcctccccttccgcccatcaccgccgcccatcccccatcatcatcatcaccacctcccgggaccaccccatcatcagcacttcatcggcgtatccctatttgcatattgattgcatatcacatattgtctattgtctactcacagccgtttgcacaggagcaggtccctctgtagcaaagatggcttcgtcatcgacaaacgccaccacctcggataccctcatcagcctcaaggtcaacctcgacggtgccacccgccgcttcaagcttcccctacgtgacctcggtgcccaggtgttcgaggacaagctccgagccttcctccagatccctgtcgatacggcgaccgtcattgaccgctactcggactcggctgcctcctatgtgaccctcgacccccgaaatgtcagtgtgtacaagcagctataccgcgccgccaaggccaagcagaagctgaagctgcgtgtcgtcaccaaacccatagagcaagagcccgagctcgagcccgtccaggaatccgagactgctcccaagccggcaactgtcgaggatgaacgcgagcaggagacgcaggagacggtagaacccgaggtcaagcaggaaacgcaaccagaaccaacagcacgttccattttcgagtcggacagtggcgatcgcatcatctcatatacgcgtgccgatggcacaacagccttgtttggcgatttcttgcgacgagaatcctccaacacccagctggcaccgacctcgtacagttccactcctgccaagccagcccctattgtcgacctcagtgccctgctgcccaagccagagccggaggccactcagtcagactcgtctcgcccagtcgagacccaaaagcgccagttcactgtgtgctgcaacagctgcgaagagcccatccccgatgctcatttccactgctccatttgcgatgagggcgacttcgacctctgccaggattgcgtgaaccgaggcatctcgtgcaacggcgacggacactggctgatcaagcggactgtcgtggacggcgagatcaaatacagcactactcacatcgccccaaagccaaacaaaactgccgtcgccaagccctctccagcttcatccgtctctcctacaccgacccgcgttgagcctcaactcgttgccagcgtacccctcagtctacccattcgatcgtgcccgatgcgagtagaacaatccgtttcgtcgcctggctggaaccgagtcaacttccgcacgtgcaactcgtgcgtacaggagctcccggagaaggaattcttgcactgcacaagttgtgatgatttcgatctttgcaagaactgcttcgccaagaatcaacatggccaccacccaagtcacggcttcactgccgccattcctggcatgctgttcgaccaggccgtcacttcacgcctggctcctggacggaactgcgtgcacaacgccatctgcgatggttgcgataagtatgttcgtggggtccgccacaagtgcttggactgccctgactgggacttctgcgccgagtgcatccaaaatgccagcttcattcaccccaaccaccgtttcgtccccatctacgagcctttggcagaccggcctgtccgcttcacggcccgaaacgtccatgcgggcatctgctgcgatggcccacactgcacggaccgcgaggctgcgtccaagtacattgtcggagttcgctacaagtgtgccgtctgcaacgacctggacttctgcgccaactgtgaggccagtcccgccaatacgcataacaagacccatcctctcatcaagttcaagaccccggtgcgtcatgtcagcgtgaccacgactggagagcacgaggacgggcagcgtctacccaccatgggcgaccgtgctgcacgtagcagcggcgcgtctacacggttccgacagcgtagatgccaacgcgaagctgccttgaaggagcatattgcagccactcctgtccagactgtcgtcaatgtccagcctaccgaacagcccgaagctgtgaagcctgagcccgtggccgagctgaagacgcctgtccaggcaccaagtgtcgaggtcaaagaggaggaggtagccacaccctcggaagagctcagcgccacgttcatgtttgacaccgtgaaagacggttccatttatccacccaaccagaccttcgagcagacatgggtactgcgcaacgatgggcaagtgtcatggcctacgggatgctctgtcaagtttgtcggtggtgactacatgggagctgtcgaccccagtcatcccgctagtatccacgaggttgtctcggcatccgagtctaccgtatgctacggtgcccttagccccggcaaggaattccctttcacggtcttgctgcgcacccccagccgccctggaaaagtcatttcatattggcgtctcacaacccccgatggcaagaagttcggtcacaagctatggtgcgacgtaaatgtccagactcctcccaaggtcgagcaggctaaacccgaagcatccgctgccgctccggtgcaggaatcgactgagagcgaaatggccgagagccgtatgatcattccaaaattggttcacgaatctcctgctgccagtatccacgagagccgctctgagaccacactcgaagtagagaccgagacggagacacttgcgccttccgtggatgaggaggacttcgaggactgcgggggccaggatgagtgggccgaagagtctgacgacggtttcatgactgacgaggaatacgagattctggatgcctccgatgaggagtatctgtccgagcagcaaaagcacctgtctaagtaaatcaacgctaagatggtaaccgaaagcgataccctctggaaaggggttcccgagagcacaaaatgttgggttcgttgtgagactaagtgggatctatttgtttcttcagtgctatcgctgtatcttcctctgacctcttctccacactagtggctttgtcgagtttcgtgtgaaattcccaactccgcttgatgatgacatgtatcattgatacgctccttacctccagaatgacttgttatgggaacacaatggatttgctctgtcatgggttgtttaggtagtagtttctgaaatcaactttctgttagtaatatcttcaatgtcttaacttgtatgaatgagttgtgatgagttgaggatgtgaatgtgttgactagtgactctgag

SEQ ID NO: 20876 - DNA, 1041 bp, Muscodor strobelii
  misc_feature: SGI cDNA ID NO. 567057
  misc_feature: Encodes the peptide sequence at SEQ ID NO 20877
atgacatccaaatacgagtggttaaggagcctcccgaaagctgaactacatttgcaccttgaaggtactgtcactcccgagacagttgtagttttatcacagcgccacgactcgaaacctctaacactcgaagaagtaaaagcattgtacgcatacgatgattttccgcacttcttacggacctttaagctcgtttatgagctcctcaaaactttggatgactacgccttgattgctagacagatgatccggagtctacgtgagcaaggcattcgccatgccgaggtttacgtctcttggggaaatttcgcgcttaggaagccggatcttgatattggcgaattgatggctgcattagaggacgcaaagcttcaggcaaattgtgaggattggactccttccgtcttctggattgtcgatgcgaaccgtgcaattggcggtgatgaggcagcaaaggtctttcggttggcagcgcagctcaagacccgtttcccctcaatcgtgggcgtgggtatagggggcaatgagatcattgcaccggttgaactgtttcgcgacgcttatgcggaagccagagcagccggtttacgtctcactgcgcatgttggtgaggccagcggccctgaaaatggaccttcgcaaatccgcactgctctagagatggggattgagagaataggacatggtatagacgcacagtacgacgaagaggtcatgggccttctcgccgcgaaaagatctgcgttggagattaacgtcacttcaaatgtgctcacaggggtttgctcagccgttgagctgcatccgctacctcagtatatggaaaggggtatgttttgtaccatcaattcggatgaccctgcaatgtttcattcgtcttgcttagaagagtactacaaagtctccgaggttttcgctttcaagttggagacaatgagaaaatttgcgcgaaactccttcgaagcaagtttcttgccagatgaagaaaaaagacgattgatattagaagttgatagctatccagtatatatggaacagtaa

SEQ ID NO: 20877 - protein, 346 aa, Muscodor strobelii
  misc_feature: SGI Peptide ID NO. 567057
  misc_feature (10)..(336): Pfam Id: PF00962 Pfam Desc: Adenosine/AMP deaminase
  misc_feature (7)..(338): NCBI GI: 256720341 Blast Desc: NECHADRAFT_17307 [Nectria haematococca mpVI 77-13-4]
  misc_feature (1)..(337): NCBI GI: 94967076 Blast Desc: adenosine deaminase [Candidatus Koribacter versatilis Ellin345] gi|94549126|gb|ABF39050.1| adenosine deaminase [Candidatus Koribacter versatilis Ellin345]
  misc_feature (32)..(340): NCBI GI: 225873620 Blast Desc: adenosine deaminase [Acidobacterium capsulatum ATCC 51196] gi|225793654|gb|ACO33744.1| adenosine deaminase [Acidobacterium capsulatum ATCC 51196]
  misc_feature (7)..(324): NCBI GI: 116626374 Blast Desc: adenosine deaminase [Solibacter usitatus Ellin6076] gi|116229536|gb|ABJ88245.1| adenosine deaminase [Candidatus Solibacter usitatus Ellin6076]
  misc_feature (1)..(340): NCBI GI: 256770196 Blast Desc: adenosine deaminase [Streptomyces sp. C]
  misc_feature (1)..(340): NCBI GI: 254382067 Blast Desc: adenosine deaminase [Streptomyces sp. Mg1] gi|194340974|gb|EDX21940.1| adenosine deaminase [Streptomyces sp. Mg1]
  misc_feature (5)..(340): NCBI GI: 239928653 Blast Desc: adenosine deaminase [Streptomyces ghanaensis ATCC 14672]
  misc_feature (7)..(340): NCBI GI: 260646587 Blast Desc: adenosine/AMP deaminase [Streptomyces scabiei 87.22]
  misc_feature (7)..(333): NCBI GI: 280964607 Blast Desc: adenosine deaminase [Frankia sp. EuI1c] gi|270731315|gb|EFA59551.1| adenosine deaminase [Frankia sp. EuI1c]
  misc_feature (6)..(339): NCBI GI: 134098750 Blast Desc: adenosine deaminase [Saccharopolyspora erythraea NRRL 2338] gi|133911373|emb|CAM01486.1| adenosine deaminase [Saccharopolyspora erythraea NRRL 2338]
  misc_feature (5)..(340): SWISSPROT Homolog: EC 3.5.4.4 Adenosine deaminase
MTSKYEWLRSLPKAELHLHLEGTVTPETVVVLSQRHDSKPLTLEEVKALYAYDDFPHFLRTFKLVYELLKTLDDYALIARQMIRSLREQGIRHAEVYVSWGNFALRKPDLDIGELMAALEDAKLQANCEDWTPSVFWIVDANRAIGGDEAAKVFRLAAQLKTRFPSIVGVGIGGNEIIAPVELFRDAYAEARAAGLRLTAHVGEASGPENGPSQIRTALEMGIERIGHGIDAQYDEEVMGLLAAKRSALEINVTSNVLTGVCSAVELHPLPQYMERGMFCTINSDDPAMFHSSCLEEYYKVSEVFAFKLETMRKFARNSFEASFLPDEEKRRLILEVDSYPVYMEQ

SEQ ID NO: 20878 - DNA, 1169 bp, Muscodor strobelii
  misc_feature: SGI EST ID NO. CUFF.48992.0
  misc_feature: Variant of the nucleotide sequence at SEQ ID NO 20876
tctggctgtgcacaaaagagaataaatacgtgcctcatccctcgtgaatctcccgtgtatttgacttttcaaatgcaattcgcatgtacaatcactcacatgatgccgaccatgacatccaaatacgagtggttaaggagcctcccgaaagctgaactacatttgcaccttgaaggtactgtcactcccgagacagttgtagttttatcacagcgccacgactcgaaacctctaacactcgaagaagtaaaagcattgtacgcatacgatgattttccgcacttcttacggacctttaagctcgtttatgagctcctcaaaactttggatgactacgccttgattgctagacagatgatccggagtctacgtgagcaaggcattcgccatgccgaggtttacgtctcttggggaaatttcgcgcttaggaagccggatcttgatattggcgaattgatggctgcattagaggacgcaaagcttcaggcaaattgtgaggattggactccttccgtcttctggattgtcgatgcgaaccgtgcaattggcggtgatgaggcagcaaaggtctttcggttggcagcgcagctcaagacccgtttcccctcaatcgtgggcgtgggtatagggggcaatgagatcattgcaccggttgaactgtttcgcgacgcttatgcggaagccagagcagccggtttacgtctcactgcgcatgttggtgaggccagcggccctgaaaatggaccttcgcaaatccgcactgctctagagatggggattgagagaataggacatggtatagacgcacagtacgacgaagaggtcatgggccttctcgccgcgaaaagatctgcgttggagattaacgtcacttcaaatgtgctcacaggggtttgctcagccgttgagctgcatccgctacctcagtatatggaaaggggtatgttttgtaccatcaattcggatgaccctgcaatgtttcattcgtcttgcttagaagagtactacaaagtctccgaggttttcgctttcaagttggagacaatgagaaaatttgcgcgaaactccttcgaagcaagtttcttgccagatgaagaaaaaagacgattgatattagaagttgatagctatccagtatatatggaacagtaaatcgtgtagaatgccga

SEQ ID NO: 20879 - DNA, 1149 bp, Muscodor strobelii
  misc_feature: SGI cDNA ID NO. 567058
  misc_feature: Encodes the peptide sequence at SEQ ID NO 20880
atgtcaacgccaggcgagcgccgtcaaagccatcggtccgccagcatggtgcccgaacaagctgccgccgatgaagtggacaacgaatacgcccacgtcttcgcccatattcgaatgacggatgaagcacgagcaaggcagtcggacgtccgaggtctctggaccaccgccaacaacaccatagcccacctttcatctcatttcgtgacgcaacccaatgtggatttcacaaacacctggatgttccagttgcagaatctttggcacttattttacgttgctgggaagcactgctccgaagatatggtggcaccgttggtcttgttggttgttgagacatctcaacggggactattggaacggaatcaggtagccagtgccggatctggagtgcagatcgaacacgctcctgtctttgtcacggttgggaaccacctaacacaacaatatctctggcgtgatcttcctctgatggtcccagacatgacggactattggatatcagactgtgcgcaaatgagccgcagccagcgagcgaggatcagcttcttttgggcttcattggtagccgcgagctcgtctccgtggtcgtatggactctgtcgagtggccctgatagtacttcgcgatggacttgagaaggagcggcctcttgtaagagcggggatcgatccgagtggagaagacagcgagaatgctgggaggacaatcgacatgcttaccattgcggacttactacccgctatcaatgcgtggctactacgagccgggggaaggatagcgcagctatgcgaggccggcgatggaaatgcggcagccggcttgacgctaccagagccggatgagctgagccaaccaggcccgcgtgccgaggcagcgggagtcgtaggcgtaccaggaggcttcagttcacagagatggttcttctggctccaacgcctcgaggaattgggggccgagtcacctacgtctcctcaaatgggagatgcttctttcggtggactcccgccgccatacctgcagagtattctggaggaaaagcagcaggcgaggcgaacagcgcataacatgatatacgtggccagccagtcgaactcaacaatggtccgagagctgatgagagttggacgactaccaatagctagataa

SEQ ID NO: 20880 - protein, 382 aa, Muscodor strobelii
  misc_feature: SGI Peptide ID NO. 567058
  misc_feature (77)..(321): NCBI GI: 121698330 Blast Desc: conserved [Aspergillus clavatus NRRL 1] gi|119395928|gb|EAW06360.1| conserved [Aspergillus clavatus NRRL 1]
  misc_feature (84)..(326): NCBI GI: 255938961 Blast Desc: Pc15g00220 [Penicillium chrysogenum Wisconsin 54-1255] gi|211584872|emb|CAP82908.1| Pc15g00220 [Penicillium chrysogenum Wisconsin 54-1255]
  misc_feature (60)..(376): NCBI GI: 159125795 Blast Desc: conserved [Aspergillus fumigatus A1163]
  misc_feature (84)..(326): NCBI GI: 70985536 Blast Desc: conserved [Aspergillus fumigatus Af293] gi|66845902|gb|EAL86236.1| conserved [Aspergillus fumigatus Af293]
  misc_feature (64)..(321): NCBI GI: 189195976 Blast Desc: conserved [Pyrenophora tritici-repentis Pt-1C-BFP] gi|187980205|gb|EDU46831.1| conserved [Pyrenophora tritici-repentis Pt-1C-BFP]
  misc_feature (84)..(317): NCBI GI: 255951862 Blast Desc: Pc24g00370 [Penicillium chrysogenum Wisconsin 54-1255] gi|211904319|emb|CAP86945.1| Pc24g00370 [Penicillium chrysogenum Wisconsin 54-1255]
  misc_feature (83)..(328): NCBI GI: 46119023 Blast Desc: FG04746.1 [Gibberella zeae PH-1]
  misc_feature (64)..(321): NCBI GI: 169594734 Blast Desc: SNOG_00096 [Phaeosphaeria nodorum SN15] gi|111070471|gb|EAT91591.1| SNOG_00096 [Phaeosphaeria nodorum SN15]
  misc_feature (75)..(326): NCBI GI: 189191080 Blast Desc: conserved [Pyrenophora tritici-repentis Pt-1C-BFP] gi|187973485|gb|EDU40984.1| conserved [Pyrenophora tritici-repentis Pt-1C-BFP]
  misc_feature (48)..(317): NCBI GI: 238845128 Blast Desc: conserved [Microsporum canis CBS 113480]
MSTPGERRQSHRSASMVPEQAAADEVDNEYAHVFAHIRMTDEARARQSDVRGLWTTANNTIAHLSSHFVTQPNVDFTNTWMFQLQNLWHLFYVAGKHCSEDMVAPLVLLVVETSQRGLLERNQVASAGSGVQIEHAPVFVTVGNHLTQQYLWRDLPLMVPDMTDYWISDCAQMSRSQRARISFFWASLVAASSSPWSYGLCRVALIVLRDGLEKERPLVRAGIDPSGEDSENAGRTIDMLTIADLLPAINAWLLRAGGRIAQLCEAGDGNAAAGLTLPEPDELSQPGPRAEAAGVVGVPGGFSSQRWFFWLQRLEELGAESPTSPQMGDASFGGLPPPYLQSILEEKQQARRTAHNMIYVASQSNSTMVRELMRVGRLPIAR

SEQ ID NO: 20881 - DNA, 1102 bp, Muscodor strobelii
  misc_feature: SGI EST ID NO. CUFF.49022.0
  misc_feature: Variant of the nucleotide sequence at SEQ ID NO 20879
atgtgttctgcgttacatgattctgcaagctgattctttcgaactgtatattcttattacgagtagcttttagtagcaaaaagaggtccccttgccccatcggttccgagactgggactgagttctggtacattgggcaagtgttatcttatggggcgatgctccttatttctggtttagcagatgatcgttcgtgttatttgtcaaatataacgactctagaccatgaactgatggcacgcgtcgtcacgagtttcaagctcgtgaaggttgccttgcttgacatcacgatccagaatcaccttcattaattggacggatcatccaatcttgacgaacttcgagtcgccaacagaaagcattaacctcgaagatgtcaacgccaggcgagcgccgtcaaagccatcggtccgccagcatggtgcccgaacaagctgccgccgatgaagtggacaacgaatacgcccacgtcttcgcccatattcgaatgacggatgaagcacgagcaaggcagtcggacgtccgaggtctctggaccaccgccaacaacaccatagcccacctttcatctcatttcgtgacgcaacccaatgtggatttcacaaacacctggatgttccagttgcagaatctttggcacttattttacgttgctgggaagcactgctccgaagatatggtggcaccgttggtcttgttggttgttgagacatctcaacggggactattggaacggaatcaggtagccagtgccggatctggagtgcagatcgaacacgctcctgtctttgtcacggttgggaaccacctaacacaacaatatctctggcgtgatcttcctctgatggtcccagacatgacggactattggatatcagactgtgcgcaaatgagccgcagccagcgagcgaggatcagcttcttttgggcttcattggtagccgcgagctcgtctccgtggtcgtatggactctgtcgagtggccctgatagtacttcgcgatggacttgagaaggagcggcctcttgtaagagcggggatcgatccgagtggagaagacagcgagaatgctgggaggacaatcgacatgcttaccattgcg

SEQ ID NO: 20882 - DNA, 1278 bp, Muscodor strobelii
  misc_feature: SGI cDNA ID NO. 567059
  misc_feature: Encodes the peptide sequence at SEQ ID NO 20883
atgatgaacggctacgacgaaaagtcccacctctacaggcaggacagcaaccaatacgggcagccaccccaatacggttccaataacgggccccaaacaccatatagccctcacaacggacagcaatccccatatggctccaatagtaattacgggtttccagacgagaagcgaggtttcgatgacgagccgccagaagggaagggcttcgtgcgcgcctttgatgccttcccaaaggccaaaccccagtacataaccaggacctcaggtggtggaaaatggaccgtagccatgggcatcatatccctcctactcttctggaccgagctctcaacctggtggacaggaaccgaagaccacaccttcagcgtcgagaaattcgttggccacgaattacagatcaacttggacgtcgtagtacgaatgcaatgcaaagacctccacatcaacgtccaagacgcagccggagaccgaattctcgccgcctcgaagctgaaagaagaccccaccatatggggacattgggtcgacaatcaaggaatacacaaactgggccatgatactcagggccgaaccgacaccggtgcggggtggcatgacgaaggtttcggcgaggcgcatgtccacgatattgtcgccatgacgaagaaacgcgcaaaatgggccaagacaccgaaagttagacgacagagacccgacagctgcaggatttacggaagtctggacttgaacaaagtccagggagatttccatatcacggcccgtggccacggatactctgagtttggcgcggcgcacttggatcacagcacgttcaacttctcccacatcatctccgagctctcattcggcccctattacccctctctcgtcaacccgctcgaccgcaccctcaacgtcgcagcggcaaacttccacaagttccaatacttcatgtctatcgtgcccaccatctacacggtctcgggcggcacatcatccgccagaaagacattcacgaaccagtacgccgtgacagaacaaagcaaggaaatcaacgagcgcatggtgcccggtttattctttaaatacgatatcgagcccatacttctcgaaattgatgaacgacgagaagggatcttgacatttcttatcaaggttgtcaatttgctgagcggtgtattagtagcaggacattggggctttacgctcacggaatgggcgagggaagccgttggcaagaggaggagagcgaggagtgaaggtgttattgggaggaagggtgggtatgatgattag

SEQ ID NO: 20883 - protein, 425 aa, Muscodor strobelii
  misc_feature: SGI Peptide ID NO. 567059
  misc_feature (209)..(411): Pfam Id: PF07970 Pfam Desc: Domain of function (DUF1692)
  misc_feature (235)..(389): Pfam Id: PF07970 Pfam Desc: Domain of function (DUF1692)
  misc_feature (55)..(421): NCBI GI: 85101064 Blast Desc: NCU04293 [Neurospora crassa OR74A] gi|11611445|emb|CAC18610.1| conserved [Neurospora crassa] gi|28922621|gb|EAA31847.1| conserved [Neurospora crassa OR74A]
  misc_feature (56)..(425): NCBI GI: 39973809 Blast Desc: MGG_00949 [Magnaporthe grisea 70-15] gi|145018098|gb|EDK02377.1| MGG_00949 [Magnaporthe grisea 70-15]
  misc_feature (56)..(424): NCBI GI: 46137745 Blast Desc: FG10388.1 [Gibberella zeae PH-1]
  misc_feature (56)..(425): NCBI GI: 256720914 Blast Desc: [Nectria haematococca mpVI 77-13-4]
  misc_feature (60)..(424): NCBI GI: 261352134 Blast Desc: endoplasmic reticulum-Golgi intermediate compartment protein [Verticillium albo-atrum VaMs.102]
  misc_feature (52)..(417): NCBI GI: 154305556 Blast Desc: BC1G_08547 [Botryotinia fuckeliana B05.10] gi|150853334|gb|EDN28526.1| BC1G_08547 [Botryotinia fuckeliana B05.10]
  misc_feature (66)..(401): NCBI GI: 156065931 Blast Desc: SS1G_00976 [Sclerotinia sclerotiorum 1980] gi|154691835|gb|EDN91573.1| SS1G_00976 [Sclerotinia sclerotiorum 1980]
  misc_feature (56)..(425): NCBI GI: 225558748 Blast Desc: conserved [Ajellomyces capsulatus G186AR]
  misc_feature (68)..(425): NCBI GI: 119497911 Blast Desc: COPII-coated vesicle protein (Erv41), [Neosartorya fischeri NRRL 181] gi|119413877|gb|EAW23816.1| COPII-coated vesicle protein (Erv41), [Neosartorya fischeri NRRL 181]
  misc_feature (56)..(424): NCBI GI: 255944653 Blast Desc: Pc20g05600 [Penicillium chrysogenum Wisconsin 54-1255] gi|211587829|emb|CAP85889.1| Pc20g05600 [Penicillium chrysogenum Wisconsin 54-1255]
MMNGYDEKSHLYRQDSNQYGQPPQYGSNNGPQTPYSPHNGQQSPYGSNSNYGFPDEKRGFDDEPPEGKGFVRAFDAFPKAKPQYITRTSGGGKWTVAMGIISLLLFWTELSTWWTGTEDHTFSVEKFVGHELQINLDVVVRMQCKDLHINVQDAAGDRILAASKLKEDPTIWGHWVDNQGIHKLGHDTQGRTDTGAGWHDEGFGEAHVHDIVAMTKKRAKWAKTPKVRRQRPDSCRIYGSLDLNKVQGDFHITARGHGYSEFGAAHLDHSTFNFSHIISELSFGPYYPSLVNPLDRTLNVAAANFHKFQYFMSIVPTIYTVSGGTSSARKTFTNQYAVTEQSKEINERMVPGLFFKYDIEPILLEIDERREGILTFLIKVVNLLSGVLVAGHWGFTLTEWAREAVGKRRRARSEGVIGRKGGYDD

SEQ ID NO: 20884 - DNA, 1819 bp, Muscodor strobelii
  misc_feature: SGI EST ID NO. CUFF.49028.0
  misc_feature: Variant of the nucleotide sequence at SEQ ID NO 20882
aagctgtcctcattcattcctacgattcaaccgacgacattgccgctattgtgcattgcgatgcctgatgaatcattctcgcaaggcaaaccacgatcattgataaccttatttccatgagcttttctttaaatttgatagacattgaacacctgtctgctggatcacaactgttcgtggcatcggcgcatgccgtgctagccttgcgcgaccatccgagctgagcactatctccagagcctgcagcgctttcgagatatctcgcagacgaccggaatagccaattcgcgctttaaacacctcaattggctttgtatttggacagcgtacgaccgtacgaccgacatacagctctcaagagttgaaccgccaccatgatgaacggctacgacgaaaagtcccacctctacaggcaggacagcaaccaatacgggcagccaccccaatacggttccaataacgggccccaaacaccatatagccctcacaacggacagcaatccccatatggctccaatagtaattacgggtttccagacgagaagcgaggtttcgatgacgagccgccagaagggaagggcttcgtgcgcgcctttgatgccttcccaaaggccaaaccccagtacataaccaggacctcaggtggtggaaaatggaccgtagccatgggcatcatatccctcctactcttctggaccgagctctcaacctggtggacaggaaccgaagaccacaccttcagcgtcgagaaattcgttggccacgaattacagatcaacttggacgtcgtagtacgaatgcaatgcaaagacctccacatcaacgtccaagacgcagccggagaccgaattctcgccgcctcgaagctgaaagaagaccccaccatatggggacattgggtcgacaatcaaggaatacacaaactgggccatgatactcagggccgaaccgacaccggtgcggggtggcatgacgaaggtttcggcgaggcgcatgtccacgatattgtcgccatgacgaagaaacgcgcaaaatgggccaagacaccgaaagttagacgacagagacccgacagctgcaggatttacggaagtctggacttgaacaaagtccagggagatttccatatcacggcccgtggccacggatactctgagtttggcgcggcgcacttggatcacagcacgttcaacttctcccacatcatctccgagctctcattcggcccctattacccctctctcgtcaacccgctcgaccgcaccctcaacgtcgcagcggcaaacttccacaagttccaatacttcatgtctatcgtgcccaccatctacacggtctcgggcggcacatcatccgccagaaagacattcacgaaccagtacgccgtgacagaacaaagcaaggaaatcaacgagcgcatggtgcccggtttattctttaaatacgatatcgagcccatacttctcgaaattgatgaacgacgagaagggatcttgacatttcttatcaaggttgtcaatttgctgagcggtgtattagtagcaggacattggggctttacgctcacggaatgggcgagggaagccgttggcaagaggaggagagcgaggagtgaaggtgttattgggaggaagggtgggtatgatgattagacgccttgtcctcccttccccgttgtacgtctgtggttcaggggcaggctgatagaccggatcgcgtagttatgggtgggttgtataggttttggttttggttccattgtggcgttcgggggttctttatcgttaaaaaggatataaatatcaggggttctctcgat

SEQ ID NO: 20885 - DNA, 3342 bp, Muscodor strobelii
  misc_feature: SGI cDNA ID NO. 567060
  misc_feature: Reduced expression when VOC is produced
  misc_feature: Encodes the peptide sequence at SEQ ID NO 20886
atggctccgaccgtcgatacatcctcgagtcctagtagtagtggtaccagtggagctgccacggccaacgcgggtacccccaagcccaccacgccacgccgggctagcaggagagccacggcaagaggtaagctccggaacggcacctggataatacccagcaccggcgagcgcacgcggcgacagttcaccctacgccaccccaacatcgacggccccaacgaccatgacagaatacatccactcgacgagggcggccactcgacccgcgacaaggcgcgaaatctatggcacaacttcctcgtcactttgcgccggatatggacttggtcgcagtcaccgacgggacggggcaccatcaagtgctccattgcctacctcatagccagtatgggcaccttctggcaccctgccgcgctatggctagggcccatggacgggaaacatattgtggctactatcgtcacctatttccacccagccagaacagccggctcgcaaatcgaagccattaccatctccatcgtcgccgtctgctatgctatgatcataggcatctgctccatggctacctcggtgctctttggtgacgtcttgaaccaagagcccttatcctacgtcctgatcttgatattgttcattgggtttggactgggttttgtcggatgggtcaagcagaagctgaacaaccctctggtgagcgtcggtgccagtatagcgtccattggcatcatcactatcatcaccaaggaggaatcggtacacaatgccgtcttctcgacagacaaggtcatccagtatctcaagatcctattcatggccaccattatatcgaccgtcgtcaacttaactctttggccggtttccgcccgtagcgggttgcgtagttccatgcgcaccgcttcgatatccttgggttccatgctgtctctaatttcaagtggctttctgaccggagcggaagaagacttcagctccaagcctttcatggatgcctcggctacctatacctcgaccttggccaaaatgaacaagaatgcccgagaagccaagtatgaatactatctcacaggacacgaacagatatatcgtcacgacaaaacagtcctaaaatccatggagaatcttgcccagtcgatcggtggtttgaggagtgcggcgaatacccaatttgagctcctcaaggaagtgaacagcggccccttatctgcaactataccggcatctccaggtaccaacgtgttctcgcccagctttggtaggtcattctcgtcgtcgctgcgcagtggtggccgtttcggaactctatcggccattgatgaagcgcccgacgagaggagcgatcgagaagacgagcctacgccatttgatgtcccgtccaccccgtcgaactttgcgccaaaagtgccatctgagatatttgagctattcatcgctcttctcggtccgtcgatgaaatcgctggtgtatacaatggccgaaatgctcaaggaaccacctttcgggactacggactcgtccctccggttgaatgataatttcaaaaacagtttgggagaggctgtcagtctatacaaccaagcgcgtggcagggcgctagaagaactgtacaaaaccattgaatcctcaagatccaattcggaatccattcaagccgattttgaggaggttgctgcggcctgcggtcacttctccttcagtttgatgagctttgcagatgaaatgaagaagtatttggatgcactcgaagaactcaagtacatatctgatcaaaagaaacgaacatggaactggttgaagatttggaccttattccgcccactgtggaaatcgaagccagcggatggagacgacatagagagacgtgccttaatggagcctgtcaaacgtatgaggcaatcgaaactaccgcaaggaattcccgattccatgaaaaatcgaagagactcactcagatgggagaccgcgtcagctgatgggtggtggaacgctattgttaggaaatcctcggagctggtgtggaggtttttcaatttccttgcgcgagatgatatccgattcggcctcaaagttggtattggtgccacactctatgccatgtttgccttcatccccgagaccatggcgatctacagaggctggagaggggaatggggtctcctgtccttcatgattgtgtgctccatgactgtgggcgcttccaatgctactggcttggctcgtttcacaggcactcttgtcggtgctcttttcgttgttgtcaattggatgatagcggatggcaatcccgtcggtttggctcttcttggttgggcggtctcttttggtgccttctacatcatggtacaccagggcaatgcgccgtttggtcgcttcatattgctgagctacaacgtgtctgcattatatgcgtactccctatctcagaatgtcgaagatgatgacgacgatgaaggcggaaccgacccgagaatcaaagacatcgcgttccaccgagttgtcgcagtaacgataggaattgtgtgggccctcatcatttgccgcctcatatggccaatgcccgctcgacagaagttcaaagagggcatggcagtgctgtatctgcaaatgggattgatctggaagagagggccgctcggcatcttgcttcgcgaggatcctacttttaccagctacatgaagatcggcgagcaagcagccatgcagcgatacgcgacacagctgcagacacttcgcgtcgccgccaacaacgaatacgagcttcgggggccgttccctttcgcagcttatggtcgcatcctggcgtctacgcaacgcctactggatgcgttccatgctatgagcctagtgacgcagaaacacggtcgtctgagcgagggtgagaaggctctcttgaatcacacggcggaggagagacagcaactttgcgctcgcatatgtcacgtcttccaggtgctagcctcgagcatgatgcttgagtacccgctcacggacgcgattccaagcgtgaatgtcatccgggataagctgctggggaagatctttcggtttaggaaagaacataatgcgaagactgcgcccacgcctacagacgacaggggcctggaaagtgagggcgaggagaatgggactgggaatgggaaggcggtgtcgacggggatgttgggcgctatggggtctgtgccggatcttggtgatcttacgcttgaggagccggattatgcattgctgtatgcgtatgcgttggttacgggccaggtggcgaaggaactcaaggttgtggagagggaggttgaggggctttttgggagacttgacgaggatgtgcttttgttgcagtga

SEQ ID NO: 20886 - protein, 1113 aa, Muscodor strobelii
  misc_feature: SGI Peptide ID NO. 567060
  misc_feature (27)..(1113): NCBI GI: 164425338 Blast Desc: NCU04614 [Neurospora crassa OR74A] gi|157070888|gb|EAA29621.2| conserved [Neurospora crassa OR74A]
  misc_feature (27)..(1113): NCBI GI: 21622507 Blast Desc: conserved [Neurospora crassa]
  misc_feature (44)..(1113): NCBI GI: 171691799 Blast Desc: protein product [Podospora anserina] gi|170945848|emb|CAP72649.1| protein product [Podospora anserina]
  misc_feature (21)..(1113): NCBI GI: 116179802 Blast Desc: CHGG_00529 [Chaetomium globosum CBS 148.51] gi|88184826|gb|EAQ92294.1| CHGG_00529 [Chaetomium globosum CBS 148.51]
  misc_feature (44)..(1113): NCBI GI: 145612647 Blast Desc: MGG_07275 [Magnaporthe grisea 70-15] gi|145019779|gb|EDK04007.1| MGG_07275 [Magnaporthe grisea 70-15]
  misc_feature (8)..(1113): NCBI GI: 156055724 Blast Desc: SS1G_05214 [Sclerotinia sclerotiorum 1980] gi|154702998|gb|EDO02737.1| SS1G_05214 [Sclerotinia sclerotiorum 1980]
  misc_feature (37)..(1113): NCBI GI: 256732076 Blast Desc: [Nectria haematococca mpVI 77-13-4]
  misc_feature (37)..(1113): NCBI GI: 46136769 Blast Desc: FG09900.1 [Gibberella zeae PH-1]
  misc_feature (44)..(1113): NCBI GI: 154296341 Blast Desc: BC1G_12997 [Botryotinia fuckeliana B05.10] gi|150843455|gb|EDN18648.1| BC1G_12997 [Botryotinia fuckeliana B05.10]
  misc_feature (110)..(1113): NCBI GI: 256733798 Blast Desc: [Nectria haematococca mpVI 77-13-4]
  misc_feature: Useful for introducing or modulating the production of volatile compounds
MAPTVDTSSSPSSSGTSGAATANAGTPKPTTPRRASRRATARGKLRNGTWIIPSTGERTRRQFTLRHPNIDGPNDHDRIHPLDEGGHSTRDKARNLWHNFLVTLRRIWTWSQSPTGRGTIKCSIAYLIASMGTFWHPAALWLGPMDGKHIVATIVTYFHPARTAGSQIEAITISIVAVCYAMIIGICSMATSVLFGDVLNQEPLSYVLILILFIGFGLGFVGWVKQKLNNPLVSVGASIASIGIITIITKEESVHNAVFSTDKVIQYLKILFMATIISTVVNLTLWPVSARSGLRSSMRTASISLGSMLSLISSGFLTGAEEDFSSKPFMDASATYTSTLAKMNKNAREAKYEYYLTGHEQIYRHDKTVLKSMENLAQSIGGLRSAANTQFELLKEVNSGPLSATIPASPGTNVFSPSFGRSFSSSLRSGGRFGTLSAIDEAPDERSDREDEPTPFDVPSTPSNFAPKVPSEIFELFIALLGPSMKSLVYTMAEMLKEPPFGTTDSSLRLNDNFKNSLGEAVSLYNQARGRALEELYKTIESSRSNSESIQADFEEVAAACGHFSFSLMSFADEMKKYLDALEELKYISDQKKRTWNWLKIWTLFRPLWKSKPADGDDIERRALMEPVKRMRQSKLPQGIPDSMKNRRDSLRWETASADGWWNAIVRKSSELVWRFFNFLARDDIRFGLKVGIGATLYAMFAFIPETMAIYRGWRGEWGLLSFMIVCSMTVGASNATGLARFTGTLVGALFVVVNWMIADGNPVGLALLGWAVSFGAFYIMVHQGNAPFGRFILLSYNVSALYAYSLSQNVEDDDDDEGGTDPRIKDIAFHRVVAVTIGIVWALIICRLIWPMPARQKFKEGMAVLYLQMGLIWKRGPLGILLREDPTFTSYMKIGEQAAMQRYATQLQTLRVAANNEYELRGPFPFAAYGRILASTQRLLDAFHAMSLVTQKHGRLSEGEKALLNHTAEERQQLCARICHVFQVLASSMMLEYPLTDAIPSVNVIRDKLLGKIFRFRKEHNAKTAPTPTDDRGLESEGEENGTGNGKAVSTGMLGAMGSVPDLGDLTLEEPDYALLYAYALVTGQVAKELKVVEREVEGLFGRLDEDVLLLQ

SEQ ID NO: 20887 - DNA, 3901 bp, Muscodor strobelii
  misc_feature: SGI EST ID NO. CUFF.49209.1
  misc_feature: Variant of the nucleotide sequence at SEQ ID NO 20885
ctccaagtctgcatctaaggcttaactctgtctgtttttgccgtgatcatcaccaagaataggcacctgttgttgatcatacacatattacgcgaatgctacacactcctcccggacacgcctaatcactctctcactttcactttgtagcatctcccaaaatactctacgtagcaatacaagccgattcacgcttacactcgtacacccatattcacactcacacatacccgtatccagccacacccttggccccctcgggaacatcccgcgacaatgctgatgcctctggccaaggcgcgcgactaggaagaggctcgcacaaagaggaacaaatcacaagagatggctccgaccgtcgatacatcctcgagtcctagtagtagtggtaccagtggagctgccacggccaacgcgggtacccccaagcccaccacgccacgccgggctagcaggagagccacggcaagaggtaagctccggaacggcacctggataatacccagcaccggcgagcgcacgcggcgacagttcaccctacgccaccccaacatcgacggccccaacgaccatgacagaatacatccactcgacgagggcggccactcgacccgcgacaaggcgcgaaatctatggcacaacttcctcgtcactttgcgccggatatggacttggtcgcagtcaccgacgggacggggcaccatcaagtgctccattgcctacctcatagccagtatgggcaccttctggcaccctgccgcgctatggctagggcccatggacgggaaacatattgtggctactatcgtcacctatttccacccagccagaacagccggctcgcaaatcgaagccattaccatctccatcgtcgccgtctgctatgctatgatcataggcatctgctccatggctacctcggtgctctttggtgacgtcttgaaccaagagcccttatcctacgtcctgatcttgatattgttcattgggtttggactgggttttgtcggatgggtcaagcagaagctgaacaaccctctggtgagcgtcggtgccagtatagcgtccattggcatcatcactatcatcaccaaggaggaatcggtacacaatgccgtcttctcgacagacaaggtcatccagtatctcaagatcctattcatggccaccattatatcgaccgtcgtcaacttaactctttggccggtttccgcccgtagcgggttgcgtagttccatgcgcaccgcttcgatatccttgggttccatgctgtctctaatttcaagtggctttctgaccggagcggaagaagacttcagctccaagcctttcatggatgcctcggctacctatacctcgaccttggccaaaatgaacaagaatgcccgagaagccaagtatgaatactatctcacaggacacgaacagatatatcgtcacgacaaaacagtcctaaaatccatggagaatcttgcccagtcgatcggtggtttgaggagtgcggcgaatacccaatttgagctcctcaaggaagtgaacagcggccccttatctgcaactataccggcatctccaggtaccaacgtgttctcgcccagctttggtaggtcattctcgtcgtcgctgcgcagtggtggccgtttcggaactctatcggccattgatgaagcgcccgacgagaggagcgatcgagaagacgagcctacgccatttgatgtcccgtccaccccgtcgaactttgcgccaaaagtgccatctgagatatttgagctattcatcgctcttctcggtccgtcgatgaaatcgctggtgtatacaatggccgaaatgctcaaggaaccacctttcgggactacggactcgtccctccggttgaatgataatttcaaaaacagtttgggagaggctgtcagtctatacaaccaagcgcgtggcagggcgctagaagaactgtacaaaaccattgaatcctcaagatccaattcggaatccattcaagccgattttgaggaggttgctgcggcctgcggtcacttctccttcagtttgatgagctttgcagatgaaatgaagaagtatttggatgcactcgaagaactcaagtacatatctgatcaaaagaaacgaacatggaactggttgaagatttggaccttattccgcccactgtggaaatcgaagccagcggatggagacgacatagagagacgtgccttaatggagcctgtcaaacgtatgaggcaatcgaaactaccgcaaggaattcccgattccatgaaaaatcgaagagactcactcagatgggagaccgcgtcagctgatgggtggtggaacgctattgttaggaaatcctcggagctggtgtggaggtttttcaatttccttgcgcgagatgatatccgattcggcctcaaagttggtattggtgccacactctatgccatgtttgccttcatccccgagaccatggcgatctacagaggctggagaggggaatggggtctcctgtccttcatgattgtgtgctccatgactgtgggcgcttccaatgctactggcttggctcgtttcacaggcactcttgtcggtgctcttttcgttgttgtcaattggatgatagcggatggcaatcccgtcggtttggctcttcttggttgggcggtctcttttggtgccttctacatcatggtacaccagggcaatgcgccgtttggtcgcttcatattgctgagctacaacgtgtctgcattatatgcgtactccctatctcagaatgtcgaagatgatgacgacgatgaaggcggaaccgacccgagaatcaaagacatcgcgttccaccgagttgtcgcagtaacgataggaattgtgtgggccctcatcatttgccgcctcatatggccaatgcccgctcgacagaagttcaaagagggcatggcagtgctgtatctgcaaatgggattgatctggaagagagggccgctcggcatcttgcttcgcgaggatcctacttttaccagctacatgaagatcggcgagcaagcagccatgcagcgatacgcgacacagctgcagacacttcgcgtcgccgccaacaacgaatacgagcttcgggggccgttccctttcgcagcttatggtcgcatcctggcgtctacgcaacgcctactggatgcgttccatgctatgagcctagtgacgcagaaacacggtcgtctgagcgagggtgagaaggctctcttgaatcacacggcggaggagagacagcaactttgcgctcgcatatgtcacgtcttccaggtgctagcctcgagcatgatgcttgagtacccgctcacggacgcgattccaagcgtgaatgtcatccgggataagctgctggggaagatctttcggtttaggaaagaacataatgcgaagactgcgcccacgcctacagacgacaggggcctggaaagtgagggcgaggagaatgggactgggaatgggaaggcggtgtcgacggggatgttgggcgctatggggtctgtgccggatcttggtgatcttacgcttgaggagccggattatgcattgctgtatgcgtatgcgttggttacgggccaggtggcgaaggaactcaaggttgtggagagggaggttgaggggctttttgggagacttgacgaggatgtgcttttgttgcagtgagttgggggtatatacctatgttgacttcgaaatcggctttttggtttcaagttttggatttcatgcctgatgcgaggtatgttcatagcaagcaagcacggcgtttggataggatacctcataaactggccatagggtcaaaagctggaaacttagggtgaatttgttaggctttggcatatataccccctaaatacattgaattggttatgct

SEQ ID NO: 20888 - DNA, 786 bp, Muscodor strobelii
  misc_feature: SGI cDNA ID NO. 567061
  misc_feature: Encodes the peptide sequence at SEQ ID NO 20889
atgcccgctcgacagaagttcaaagagggcatggcagtgctgtatctgcaaatgggattgatctggaagagagggccgctcggcatcttgcttcgcgaggatcctacttttaccagctacatgaagatcggcgagcaagcagccatgcagcgatacgcgacacagctgcagacacttcgcgtcgccgccaacaacgaatacgagcttcgggggccgttccctttcgcagcttatggtcgcatcctggcgtctacgcaacgcctactggatgcgttccatgctatgagcctagtgacgcagaaacacggtcgtctgagcgagggtgagaaggctctcttgaatcacacggcggaggagagacagcaactttgcgctcgcatatgtcacgtcttccaggtgctagcctcgagcatgatgcttgagtacccgctcacggacgcgattccaagcgtgaatgtcatccgggataagctgctggggaagatctttcggtttaggaaagaacataatgcgaagactgcgcccacgcctacagacgacaggggcctggaaagtgagggcgaggagaatgggactgggaatgggaaggcggtgtcgacggggatgttgggcgctatggggtctgtgccggatcttggtgatcttacgcttgaggagccggattatgcattgctgtatgcgtatgcgttggttacgggccaggtggcgaaggaactcaaggttgtggagagggaggttgaggggctttttgggagacttgacgaggatgtgcttttgttgcagtga

SEQ ID NO: 20889 - protein, 261 aa, Muscodor strobelii
  misc_feature: SGI Peptide ID NO. 567061
  misc_feature (1)..(261): NCBI GI: 145612647 Blast Desc: MGG_07275 [Magnaporthe grisea 70-15] gi|145019779|gb|EDK04007.1| MGG_07275 [Magnaporthe grisea 70-15]
  misc_feature (1)..(261): NCBI GI: 116179802 Blast Desc: CHGG_00529 [Chaetomium globosum CBS 148.51] gi|88184826|gb|EAQ92294.1| CHGG_00529 [Chaetomium globosum CBS 148.51]
  misc_feature (1)..(261): NCBI GI: 171691799 Blast Desc: protein product [Podospora anserina] gi|170945848|emb|CAP72649.1| protein product [Podospora anserina]
  misc_feature (1)..(261): NCBI GI: 164425338 Blast Desc: NCU04614 [Neurospora crassa OR74A] gi|157070888|gb|EAA29621.2| conserved [Neurospora crassa OR74A]
  misc_feature (1)..(261): NCBI GI: 21622507 Blast Desc: conserved [Neurospora crassa]
  misc_feature (1)..(261): NCBI GI: 261351796 Blast Desc: conserved [Verticillium albo-atrum VaMs.102]
  misc_feature (1)..(261): NCBI GI: 46127551 Blast Desc: FG08153.1 [Gibberella zeae PH-1]
  misc_feature (1)..(261): NCBI GI: 256733798 Blast Desc: [Nectria haematococca mpVI 77-13-4]
  misc_feature (1)..(261): NCBI GI: 156055724 Blast Desc: SS1G_05214 [Sclerotinia sclerotiorum 1980] gi|154702998|gb|EDO02737.1| SS1G_05214 [Sclerotinia sclerotiorum 1980]
  misc_feature (53)..(261): NCBI GI: 256732076 Blast Desc: [Nectria haematococca mpVI 77-13-4]
MPARQKFKEGMAVLYLQMGLIWKRGPLGILLREDPTFTSYMKIGEQAAMQRYATQLQTLRVAANNEYELRGPFPFAAYGRILASTQRLLDAFHAMSLVTQKHGRLSEGEKALLNHTAEERQQLCARICHVFQVLASSMMLEYPLTDAIPSVNVIRDKLLGKIFRFRKEHNAKTAPTPTDDRGLESEGEENGTGNGKAVSTGMLGAMGSVPDLGDLTLEEPDYALLYAYALVTGQVAKELKVVEREVEGLFGRLDEDVLLLQ

SEQ ID NO: 20890 - DNA, 3675 bp, Muscodor strobelii
  misc_feature: SGI EST ID NO. CUFF.49208.0
  misc_feature: Variant of the nucleotide sequence at SEQ ID NO 20888
agactttgtgcattgctgctgtccgacgtatcgtcgttcctctgtccagagcctcgagtcaggagtttcttgtttgccgcttgccttttgtcgtcttaacttttgttttgtctgattctttcctcccgtgtttgtctgccatgttacacaaaaagacccccgaccgtagctagctgacacgatgccctcccgacgacagaagctccggaacggcacctggataatacccagcaccggcgagcgcacgcggcgacagttcaccctacgccaccccaacatcgacggccccaacgaccatgacagaatacatccactcgacgagggcggccactcgacccgcgacaaggcgcgaaatctatggcacaacttcctcgtcactttgcgccggatatggacttggtcgcagtcaccgacgggacggggcaccatcaagtgctccattgcctacctcatagccagtatgggcaccttctggcaccctgccgcgctatggctagggcccatggacgggaaacatattgtggctactatcgtcacctatttccacccagccagaacagccggctcgcaaatcgaagccattaccatctccatcgtcgccgtctgctatgctatgatcataggcatctgctccatggctacctcggtgctctttggtgacgtcttgaaccaagagcccttatcctacgtcctgatcttgatattgttcattgggtttggactgggttttgtcggatgggtcaagcagaagctgaacaaccctctggtgagcgtcggtgccagtatagcgtccattggcatcatcactatcatcaccaaggaggaatcggtacacaatgccgtcttctcgacagacaaggtcatccagtatctcaagatcctattcatggccaccattatatcgaccgtcgtcaacttaactctttggccggtttccgcccgtagcgggttgcgtagttccatgcgcaccgcttcgatatccttgggttccatgctgtctctaatttcaagtggctttctgaccggagcggaagaagacttcagctccaagcctttcatggatgcctcggctacctatacctcgaccttggccaaaatgaacaagaatgcccgagaagccaagtatgaatactatctcacaggacacgaacagatatatcgtcacgacaaaacagtcctaaaatccatggagaatcttgcccagtcgatcggtggtttgaggagtgcggcgaatacccaatttgagctcctcaaggaagtgaacagcggccccttatctgcaactataccggcatctccaggtaccaacgtgttctcgcccagctttggtaggtcattctcgtcgtcgctgcgcagtggtggccgtttcggaactctatcggccattgatgaagcgcccgacgagaggagcgatcgagaagacgagcctacgccatttgatgtcccgtccaccccgtcgaactttgcgccaaaagtgccatctgagatatttgagctattcatcgctcttctcggtccgtcgatgaaatcgctggtgtatacaatggccgaaatgctcaaggaaccacctttcgggactacggactcgtccctccggttgaatgataatttcaaaaacagtttgggagaggctgtcagtctatacaaccaagcgcgtggcagggcgctagaagaactgtacaaaaccattgaatcctcaagatccaattcggaatccattcaagccgattttgaggaggttgctgcggcctgcggtcacttctccttcagtttgatgagctttgcagatgaaatgaagaagtatttggatgcactcgaagaactcaagtacatatctgatcaaaagaaacgaacatggaactggttgaagatttggaccttattccgcccactgtggaaatcgaagccagcggatggagacgacatagagagacgtgccttaatggagcctgtcaaacgtatgaggcaatcgaaactaccgcaaggaattcccgattccatgaaaaatcgaagagactcactcagatgggagaccgcgtcagctgatgggtggtggaacgctattgttaggaaatcctcggagctggtgtggaggtttttcaatttccttgcgcgagatgatagtatgttggttccggctttcaaattgacaattctctaacattgcgctagtccgattcggcctcaaagttggtattggtgccacactctatgccatgtttgccttcatccccgagaccatggcgatctacagaggctggagaggggaatggggtctcctgtccttcatgattgtgtgctccatgactgtgggcgcttccaatgctactggcttggctcgtttcacaggcactcttgtcggtgctcttttcgttgttgtcaattggatgatagcggatggcaatcccgtcggtttggctcttcttggttgggcggtctcttttggtgccttctacatcatggtacaccagggcaatgcgccgtttggtcgcttcatattgctgagctacaacgtgtctgcattatatgcgtactccctatctcagaatgtcgaagatgatgacgacgatgaaggcggaaccgacccgagaatcaaagacatcgcgttccaccgagttgtcgcagtaacgataggaattgtgtgggccctcatcatttgccgcctcatatggccaatgcccgctcgacagaagttcaaagagggcatggcagtgctgtatctgcaaatgggattgatctggaagagagggccgctcggcatcttgcttcgcgaggatcctacttttaccagctacatgaagatcggcgagcaagcagccatgcagcgatacgcgacacagctgcagacacttcgcgtcgccgccaacaacgaatacgagcttcgggggccgttccctttcgcagcttatggtcgcatcctggcgtctacgcaacgcctactggatgcgttccatgctatgagcctagtgacgcagaaacacggtcgtctgagcgagggtgagaaggctctcttgaatcacacggcggaggagagacagcaactttgcgctcgcatatgtcacgtcttccaggtgctagcctcgagcatgatgcttgagtacccgctcacggacgcgattccaagcgtgaatgtcatccgggataagctgctggggaagatctttcggtttaggaaagaacataatgcgaagactgcgcccacgcctacagacgacaggggcctggaaagtgagggcgaggagaatgggactgggaatgggaaggcggtgtcgacggggatgttgggcgctatggggtctgtgccggatcttggtgatcttacgcttgaggagccggattatgcattgctgtatgcgtatgcgttggttacgggccaggtggcgaaggaactcaaggttgtggagagggaggttgaggggctttttgggagacttgacgaggatgtgcttttgttgcagtgagttgggggtatatacctatgttgacttcgaaatcggctttttggtttcaagttttggatttcatgcctgatgcgaggtatgttcatagcaagcaagcacggcgtttggataggatacctcataaactggccatagggtcaaaagctggaaacttagggtgaatttgttaggctttggcatatataccccctaaatacattgaattggttatgct

SEQ ID NO: 20891 - DNA, 720 bp, Muscodor strobelii
  misc_feature: SGI cDNA ID NO. 567062
  misc_feature: Reduced expression when VOC is produced
  misc_feature: Encodes the peptide sequence at SEQ ID NO 20892
atggcgaacctcccatcccaacacccacacctctccctccacctcgccgaccggtccacgaccccgttaataacatcctcacgcacacaatcccaactctcctccttgacctccttaacatcgacctccctaacagcacacgaaaccgtcctgcgtctcggtctcggcacaccccaacgaataatggtcgagcacggcagcggtccaatcctgctccaaacctacataaatccccaaccacacccacaatcgaattcacaagctccaaccccatccgccgaacaatcaccaccaaccaccaatcccgtctcagaagctctagaagccccagaaccaacaagtctagcagcagcccacctagcatccctctccctatcaccttcccaaacctccacctccaaccacaatcataaccaaccccaaaactcaacacaccaaggcgcgctatcactcgcagcagagtcccgtctgggcgccgatccctcaacctcgacactccgcggcggtgcggaagccgaagccgaagaaccacataccctcctcctcgactcgcccaccgaaacagaggacgagaatagtccaccaatgttagtcggcatcgtcgtagcgccgagcaatgacgaggcgcgggaggctagacgggcggccgcaaggttagagcgcgtcggcagggagatacaggggaggtggggagaggttatgggtggggatggagattaa

SEQ ID NO: 20892 - protein, 239 aa, Muscodor strobelii
  misc_feature: SGI Peptide ID NO. 567062
  misc_feature (1)..(79): NCBI GI: 46136963 Blast Desc: FG09997.1 [Gibberella zeae PH-1]
  misc_feature (1)..(79): NCBI GI: 256732050 Blast Desc: NECHADRAFT_102635 [Nectria haematococca mpVI 77-13-4]
  misc_feature (1)..(78): NCBI GI: 261352103 Blast Desc: [Verticillium albo-atrum VaMs.102]
  misc_feature (5)..(227): NCBI GI: 156044288 Blast Desc: [Sclerotinia sclerotiorum 1980] gi|154694636|gb|EDN94374.1| [Sclerotinia sclerotiorum 1980]
  misc_feature (182)..(230): NCBI GI: 39968759 Blast Desc: [Magnaporthe grisea 70-15] gi|145013919|gb|EDJ98560.1| [Magnaporthe grisea 70-15]
  misc_feature (191)..(231): NCBI GI: 46136963 Blast Desc: FG09997.1 [Gibberella zeae PH-1]
  misc_feature (9)..(230): NCBI GI: 154305410 Blast Desc: [Botryotinia fuckeliana B05.10] gi|150853261|gb|EDN28453.1| [Botryotinia fuckeliana B05.10]
  misc_feature: Useful for introducing or modulating the production of volatile compounds
MANLPSQHPHLSLHLADRSTTPLITSSRTQSQLSSLTSLTSTSLTAHETVLRLGLGTPQRIMVEHGSGPILLQTYINPQPHPQSNSQAPTPSAEQSPPTTNPVSEALEAPEPTSLAAAHLASLSLSPSQTSTSNHNHNQPQNSTHQGALSLAAESRLGADPSTSTLRGGAEAEAEEPHTLLLDSPTETEDENSPPMLVGIVVAPSNDEAREARRAAARLERVGREIQGRWGEVMGGDGD

SEQ ID NO: 20893 - DNA, 2058 bp, Muscodor strobelii
  misc_feature: SGI cDNA ID NO. 567063
  misc_feature: Encodes the peptide sequence at SEQ ID NO 20894
atggggtacacagagacagattggctcgccatcaacacgatccgtaccttgacgatcgatgccgtcggcaaggccaactcgggtcatccaggtgcccctatgggcatggctcccgtggcccacgttctcttcaataagttcatgaagttcaacccaaagaaccccaactgggttaaccgcgatagattcgtcctctccaatggccacggatgcatgttgatatattccctcctccacttgttcggctatgccgtttccatggatgacatcaaggccttccgctccatcgactccatcaccgccggtcaccccgagtcccacgaggttcccggtgttgaggtcaccactggtccccttggccagggtatttgcaatgccgttggtctggccattgctcaagcccacactgccgccgtcttcaacaaggatggcttcaacatcatcgacaactacacatactgcttcttaggcgatggttgtctgatggagggtgtctccagcgaggccagctccttggctggtcacttgcagcttggcaacctcattgctgtctacgacgacaaccacatctccattgatggtgacaccaactgcgccttcactgaggatgtcgtcaagagatacgaggcttacggctggcacgtcatcaccgtcagcgacggtgaccacgacctcgacggtatggagaaggctattgcagaggccaaggccgtcaaggataagcccactctgatcaagctcaagaccaccatcggcttcggctcccttcagcagggtacccacggcgtccacggtgccgccctcaaggctgacgacatccgacagatcaaggagaagtttggcttcaaccctgacgagaacttcgccgttccccaggccgtctatgacctgtatcacaagcactctgccgagggtgctgctgccgaggaggagtggaacaagctgttcgctagctacggcgagaagtacagcgctgagcacaaggacttgtcccgccggctaaagggcgaccttcccgagggctgggagaaggctctccccacctacacacccagcgacgccgctgtcgcatcgcggaagctctccgagactgttctgaccaagatcgagagcgttattcccgagctattgagtggatccgccgacttgaccggctccaacttgacgagatggaagtcggctgtcgacttccagcccgctgccactggtctcggtgactactctggtcgctacctccgctacggtgtccgtgagcacggtatgggtgccatcatgaacggtttagccgcctacggcaccgtcatccctgccggtggcactttcttgaactttgtttcttatgctgctggtgccgtccgtctctctgctttggctcaggagcgcgtcatctgggtcgctacacatgactctatcggtctgggcgaggatggtcctactcaccagcctatcgagactctggctcacttccgcgctctgcccaactgcatggtctggcgccctgctgacggaaacgagacgtcggccgcttactacgtcgccctgacctccaagcacactcccactatcctagccctctcccgacagaacctgcctcagcttgagtcttcaacgatcgagagggccatcaagggtggctacgtcgtccacgaggttgagggcgcccagatcacgctcgtctcgactggctcggaggtgtgcatctgcatcgactccgctaaggagttggctgagaagcacaacatcaaggcccgcgtcgtgtccatcccctgcttcgaggtcttcgatacccagtccaaggaatacagactcagcgttctccccgacggcatcccctctctatcggttgaggtcatgtccactctcggctgggagaggtatacccacgagcagttcggcctgaacagattcggtgcctctggtgcctacaaggatgtctacaagaagttcgagttcacccctgagggcgtctccaagcgtgcccttgcgaccatcgacttctggaagaacgtacccaacatccgctcgcccctcaaccgtgcttttgagcagatcatctag

SEQ ID NO: 20894 - protein, 685 aa, Muscodor strobelii
  misc_feature: SGI Peptide ID NO. 567063
  misc_feature (354)..(532): Pfam Id: PF02779 Pfam Desc: Transketolase, pyrimidine binding domain
  misc_feature (545)..(656): Pfam Id: PF02780 Pfam Desc: Transketolase, C-terminal domain
  misc_feature (6)..(339): Pfam Id: PF00456 Pfam Desc: Transketolase, thiamine diphosphate binding domain
  misc_feature (545)..(616): Pfam Id: PF02780 Pfam Desc: Transketolase, C-terminal domain
  misc_feature (1)..(685): NCBI GI: 39968757 Blast Desc: conserved [Magnaporthe grisea 70-15] gi|145013920|gb|EDJ98561.1| conserved [Magnaporthe grisea 70-15]
  misc_feature (3)..(685): NCBI GI: 164426308 Blast Desc: transketolase [Neurospora crassa OR74A] gi|11595598|emb|CAC18218.1| TRANSKETOLASE [Neurospora crassa] gi|157071283|gb|EAA32178.2| transketolase [Neurospora crassa
  misc_feature (1)..(685): NCBI GI: 256731672 Blast Desc: [Nectria haematococca mpVI 77-13-4]
  misc_feature (15)..(685): NCBI GI: 116206716 Blast Desc: conserved [Chaetomium globosum CBS 148.51] gi|88183248|gb|EAQ90716.1| conserved [Chaetomium globosum CBS 148.51]
  misc_feature (1)..(685): NCBI GI: 171692225 Blast Desc: protein product [Podospora anserina] gi|170946061|emb|CAP72862.1| protein product [Podospora anserina]
  misc_feature (1)..(676): NCBI GI: 156044286 Blast Desc: SS1G_10246 [Sclerotinia sclerotiorum 1980] gi|154694635|gb|EDN94373.1| SS1G_10246 [Sclerotinia sclerotiorum 1980]
  misc_feature (1)..(685): NCBI GI: 46136965 Blast Desc: FG09998.1 [Gibberella zeae PH-1]
  misc_feature (3)..(685): NCBI GI: 261190482 Blast Desc: transketolase TktA [Ajellomyces dermatitidis SLH14081] gi|239591073|gb|EEQ73654.1| transketolase TktA [Ajellomyces dermatitidis SLH14081]
  misc_feature (3)..(685): NCBI GI: 239614763 Blast Desc: transketolase TktA [Ajellomyces dermatitidis ER-3]
  misc_feature (1)..(685): NCBI GI: 119495238 Blast Desc: transketolase TktA [Neosartorya fischeri NRRL 181] gi|119412570|gb|EAW22511.1| transketolase TktA [Neosartorya fischeri NRRL 181]
  misc_feature (3)..(681): SWISSPROT Homolog: EC 2.2.1.1 Transketolase
  misc_feature: Useful for introducing or modulating the production of volatile compounds
  misc_feature: Useful for fungicidal and/or biocontrol applications
MGYTETDWLAINTIRTLTIDAVGKANSGHPGAPMGMAPVAHVLFNKFMKFNPKNPNWVNRDRFVLSNGHGCMLIYSLLHLFGYAVSMDDIKAFRSIDSITAGHPESHEVPGVEVTTGPLGQGICNAVGLAIAQAHTAAVFNKDGFNIIDNYTYCFLGDGCLMEGVSSEASSLAGHLQLGNLIAVYDDNHISIDGDTNCAFTEDVVKRYEAYGWHVITVSDGDHDLDGMEKAIAEAKAVKDKPTLIKLKTTIGFGSLQQGTHGVHGAALKADDIRQIKEKFGFNPDENFAVPQAVYDLYHKHSAEGAAAEEEWNKLFASYGEKYSAEHKDLSRRLKGDLPEGWEKALPTYTPSDAAVASRKLSETVLTKIESVIPELLSGSADLTGSNLTRWKSAVDFQPAATGLGDYSGRYLRYGVREHGMGAIMNGLAAYGTVIPAGGTFLNFVSYAAGAVRLSALAQERVIWVATHDSIGLGEDGPTHQPIETLAHFRALPNCMVWRPADGNETSAAYYVALTSKHTPTILALSRQNLPQLESSTIERAIKGGYVVHEVEGAQITLVSTGSEVCICIDSAKELAEKHNIKARVVSIPCFEVFDTQSKEYRLSVLPDGIPSLSVEVMSTLGWERYTHEQFGLNRFGASGAYKDVYKKFEFTPEGVSKRALATIDFWKNVPNIRSPLNRAFEQII

SEQ ID NO: 20895 - DNA, 4384 bp, Muscodor strobelii
  misc_feature: SGI EST ID NO. CUFF.49411.0
  misc_feature: Variant of the nucleotide sequence at SEQ ID NO 20893
cacggaacatattggggggaattcccgcgcatttattgagatagctgttggatacgctgcgttatatgcaaagacttatccaatgatatgaggctagttcgccacgtattggcatgtaaatcgtgaaggtccagtgtttacaaaagactgcaatcggtgacgtcgtgtcgtctgaaatctgggtcggtggcaatcagtgaatgaatcgatgcatgaagaattatttgatgctatcgtgttgaaggtgtccaccaaggcccatcctttccgtccaggctgtatcttgcctgcagaaagcgtgcttgattgacggacaagctgctcaacaaaaccccccacccaagcatctcactaatcgcgtcaaggcaaaacggttccatcatcccatccatccgcttcgtacttctcacctctgcactccattcctccataaacacaaatcctcccttcttcccctcccattgtttttcctttgatacttcatatacatcaaagttccatcatagaatccgcaatcatggggtacacagagacagattggctcgccatcaacacgatccgtaccttgacggtatgaaccccgcccccgcccagctctcatgccccgccatcgcgaacgcctttgctgagagctcgatactttttaaatctcgcatctcaagcccaagtctcccagcaatgacaatcatgctaatgccgcgatgaatagatcgatgccgtcggcaaggccaactcgggtcatccaggtgcccctatgggcatggctcccgtggcccacgttctcttcaataagttcatgaagttcaacccaaagaaccccaactgggttaaccgcgatagattcgtcctctccaatggccacggatgcatgttgatatattccctcctccacttgttcggctatgccgtttccatggatgacatcaaggccttccgctccatcgactccatcaccgccggtcaccccgagtcccacgaggttcccggtgttgaggtcaccactggtccccttggccagggtatttgcaatgccgttggtctggccattgctcaagcccacactgccgccgtcttcaacaaggatggcttcaacatcatcgacaactacacatactgcttcttaggcgatggttgtctgatggagggtgtctccagcgaggccagctccttggctggtcacttgcagcttggcaacctcattgctgtctacgacgacaaccacatctccattgatggtgacaccaactgcgccttcactgaggatgtcgtcaagagatacgaggcttacggctggcacgtcatcaccgtcagcgacggtgaccacgacctcgacggtatggagaaggctattgcagaggccaaggccgtcaaggataagcccactctgatcaagctcaagaccaccatcggcttcggctcccttcagcagggtacccacggcgtccacggtgccgccctcaaggctgacgacatccgacagatcaaggagaagtttggcttcaaccctgacgagaacttcgccgttccccaggccgtctatgacctgtatcacaagcactctgccgagggtgctgctgccgaggaggagtggaacaagctgttcgctagctacggcgagaagtacagcgctgagcacaaggacttgtcccgccggctaaagggcgaccttcccgagggctgggagaaggctctccccacctacacacccagcgacgccgctgtcgcatcgcggaagctctccgagactgttctgaccaagatcgagagcgttattcccgagctattgagtggatccgccgacttgaccggctccaacttgacgagatggaagtcggctgtcgacttccagcccgctgccactggtctcggtgactactctggtcgctacctccgctacggtgtccgtgagcacggtatgggtgccatcatgaacggtttagccgcctacggcaccgtcatccctgccggtggcactttcttgaactttgtttcttatgctgctggtgccgtccgtctctctgctttggctcaggagcgcgtcatctgggtcgctacacatgactctatcggtctgggcgaggatggtcctactcaccagcctatcgagactctggctcacttccgcgctctgcccaactgcatggtctggcgccctgctgacggaaacgagacgtcggccgcttactacgtcgccctgacctccaagcacactcccactatcctagccctctcccgacagaacctgcctcagcttgagtcttcaacgatcgagagggccatcaagggtggctacgtcgtccacgaggttgagggcgcccagatcacgctcgtctcgactggctcggaggtgtgcatctgcatcgactccgctaaggagttggctgagaagcacaacatcaaggcccgcgtcgtgtccatcccctgcttcgaggtcttcgatacccagtccaaggaatacagactcagcgttctccccgacggcatcccctctctatcggttgaggtcatgtccactctcggctgggagaggtatacccacgagcagttcggcctgaacagattcggtgcctctggtgcctacaaggatgtctacaagaagttcgagttcacccctgagggcgtctccaagcgtgcccttgcgaccatcgacttctggaagaacgtacccaacatccgctcgcccctcaaccgtgcttttgagcagatcatctagatgtcaaagttgtatctagagttgaagacggggccgtgagaagagaagagaagagcggcaggtgtaatggctactgcaaataccagacttagcgatatatagacgggaaaagccattttggggctaaaataaaataagtcaaagatcatagcagaagtttgtcattgctgagagcgatatgacacccttttggagttattacatccatctcgcacaggaacatattcctcttgaactatacccacagtcgtacaaggcgactacttggggtaaatcccatttgtgtctcattgcttttctcggcgcgtattccttggtagacacatgtgcctcgcatcatgaccattaccataaatcattaagtccttttcatcccattgcatgaccacgccgcattttatcccctccccttccctttcgccaacccttaagtagtccattaatctccatccccacccataacctctccccacctcccctgtatctccctgccgacgcgctctaaccttgcggccgcccgtctagcctcccgcgcctcgtcattgctcggcgctacgacgatgccgactaacattggtggactattctcgtcctctgtttcggtgggcgagtcgaggaggagggtatgtggttcttcggcttcggcttccgcaccgccgcggagtgtcgaggttgagggatcggcgcccagacgggactctgctgcgagtgatagcgcgccttggtgtgttgagttttggggttggttatgattgtggttggaggtggaggtttgggaaggtgatagggagagggatgctaggtgggctgctgctagacttgttggttctggggcttctagagcttctgagacgggattggtggttggtggtgattgttcggcggatggggttggagcttgtgaattcgattgtgggtgtggttggggatttatgtaggtttggagcaggattggaccgctgccgtgctcgaccattattcgttggggtgtgccgagaccgagacgcaggacggtttcgtgtgctgttagggaggtcgatgttaaggaggtcaaggaggagagttgggattgtgtgcgtgaggatgttattaacggggtcgtggaccggtcggcgaggtggagggagaggtgtgggtgttgggatgggaggttcgccattgtgagggttcggtgcgttggcgatcgtaaggttggcgattgttggtttggtgttaaggatgtcgatggtttgtatgactccctggatagctactatttactattcgccggagaagagctagtcttgtggtttttattcccggtaactatgacaataggtctgaatgctatatagctcaagagacataagatatatcattaagagagctccattcgaagctcccagcttagataagaatggccaaactcaacgtgacgaggttgacgtagtgggcatcgacgtgggggttttgtcccgctctcaagtcgtactgctatctgcccaaggtactttaggtagctaagaattgcggtataccgagatattattgtcctacgttttgcgctgattcgaatagatttcttagatttcgtcccaagtccaggtatctccaattgacgttttacaagaaggacatgatgatatctggtgatcgtcgctggtgatcatcaacttggaggggacagcaaac

SEQ ID NO: 20896 - DNA, 774 bp, Muscodor strobelii
  misc_feature: SGI cDNA ID NO. 567064
  misc_feature: Encodes the peptide sequence at SEQ ID NO 20897
atgcaaccaactgactacgagcttgaaggcttcgtcttcatagcttcttcaagtcgccaaatgacgactgcccccaaggctacagagaaccaccagtgtgctattacgggcagagttatcgtcctcaacggatacccagggaccgggaagctcacagtgctcaggcaggttgcaaagtctctaccagcgaataagacgtgtctcctagacaatcacttgcttagcgatgtcgtagaagcagccattccagatcgcggcgacgagcaccatgaactctgctctaagattcgggctccggtcttcgacgccctgaggcaacgcgtgatgaatggtgacatcatactcatgtcaacatgcctcactagggataataaaagggacgcatggctgttcatggagcatatcaaccttgtacgtggtactggcatgcctattgtctgggttaatgtgcactgcgaccaagaaagtttagagcaacgcctcacaagcgcggaacgatgcctaagtagtaagaacaagttgacagatgtcgaggttctgcgaaaatttgtctctgcgcatcagctcattgcgccgtgtcaaattcacaacaaggagctaaggctgtttgttgagaacatggatatcagtgggtcggtggaagcctctgccgaaagcttgatagacagtttgaccatcataacggatcttatagaggttcagagagcagcagtccgaaccagagaaatgggcgagacatcgttggttcgattgcttaattcattgaacatatag

SEQ ID NO: 20897 - protein, 257 aa, Muscodor strobelii
  misc_feature: SGI Peptide ID NO. 567064
  misc_feature (36)..(224): NCBI GI: 46126015 Blast Desc: FG07385.1 [Gibberella zeae PH-1]
  misc_feature (26)..(221): NCBI GI: 256728840 Blast Desc: NECHADRAFT_79879 [Nectria haematococca mpVI 77-13-4]
  misc_feature (37)..(220): NCBI GI: 256732534 Blast Desc: NECHADRAFT_78819 [Nectria haematococca mpVI 77-13-4]
  misc_feature (32)..(190): NCBI GI: 169612199 Blast Desc: SNOG_09218 [Phaeosphaeria nodorum SN15] gi|111062290|gb|EAT83410.1| SNOG_09218 [Phaeosphaeria nodorum SN15]
  misc_feature (37)..(190): NCBI GI: 218682935 Blast Desc: RetlC8_29561 [Rhizobium etli CIAT 894]
  misc_feature (38)..(190): NCBI GI: 190890593 Blast Desc: RHECIAT_CH0000972 [Rhizobium etli CIAT 652] gi|190695872|gb|ACE89957.1| conserved protein [Rhizobium etli CIAT 652]
  misc_feature (38)..(200): NCBI GI: 86356528 Blast Desc: RHE_CH00882 [Rhizobium etli CFN 42] gi|86280630|gb|ABC89693.1| conserved protein [Rhizobium etli CFN 42]
  misc_feature (39)..(180): NCBI GI: 256722431 Blast Desc: NECHADRAFT_34920 [Nectria haematococca mpVI 77-13-4]
  misc_feature (38)..(200): NCBI GI: 218674029 Blast Desc: RetlG_22092 [Rhizobium etli GR56]
  misc_feature (35)..(192): NCBI GI: 58696995 Blast Desc: conserved [Wolbachia endosymbiont of Drosophila simulans] gi|58698301|ref|ZP_00373218.1| conserved [Wolbachia endosymbiont of Drosophila ananassae] WRi_012910 [Wolbachia sp.
MQPTDYELEGFVFIASSSRQMTTAPKATENHQCAITGRVIVLNGYPGTGKLTVLRQVAKSLPANKTCLLDNHLLSDVVEAAIPDRGDEHHELCSKIRAPVFDALRQRVMNGDIILMSTCLTRDNKRDAWLFMEHINLVRGTGMPIVWVNVHCDQESLEQRLTSAERCLSSKNKLTDVEVLRKFVSAHQLIAPCQIHNKELRLFVENMDISGSVEASAESLIDSLTIITDLIEVQRAAVRTREMGETSLVRLLNSLNI

SEQ ID NO: 20898 - DNA, 1816 bp, Muscodor strobelii
  misc_feature: SGI EST ID NO. CUFF.49413.0
  misc_feature: Variant of the nucleotide sequence at SEQ ID NO 20896
tggacatttgtctggcattttctggatgctcgggaagcctcaactaccatcatatcacactcaaattgcaagggttcacaaagccgacttgattatcgcaacacagaaactcaggatgcaaccaactgactacgagcttgaaggcttcgtcttcatagcttcttcaagtcgccaaatgacgactgcccccaaggctacagagaaccaccagtgtgctattacgggcagagttatcgtcctcaacggatacccagggaccgggaagctcacagtgctcaggcaggttgcaaagtctctaccagcgaataagacgtgtctcctagacaatcacttgcttagcgatgtcgtagaagcagccattccagatcgcggcgacgagcaccatgaactctgctctaagattcgggctccggtcttcgacgccctgaggcaacgcgtgatgaatggtgacatcatactcatgtcaacatgcctcactagggataataaaagggacgcatggctgttcatggagcatatcaaccttgtacgtggtactggcatgcctattgtctgggttaatgtgcactgcgaccaagaaagtttagagcaacgcctcacaagcgcggaacgatgcctaagtagtaagaacaagttgacagatgtcgaggttctgcgaaaatttgtctctgcgcatcagctcattgcgccgtgtcaaattcacaacaaggagctaaggctgtttgttgagaacatggatatcagtgggtcggtggaagcctctgccgaaagcttgatagacagtttgaccatcataacggatcttatagaggttcagagagcagcagtccgaaccagagaaatgggcgagacatcgttggttcgattgcttaattcattgaacatatagatatgtgaatgagtgggattttgaatctcacatagacttttcattggcttccgcgatctggactccgagccgggacgcgacgggctgacatcgtccttgtctgattattgcagcctcgcatcgcggctgatgcgcggtcacagaaggtacggcattcctttggcggttaaacgtcgtcgtcgtcgtcgtcgccgacctttagtattccttcctttgccgaagcgcagaacttgacgcgagatggctcgttacgccgggtttagctgaagagggtatcccgggttgaatcatgtcactaagtattaggcttagcgcaagccgaagcgcgataccggaacgccctttctctagctcaaagagccctgaggtgtcttgggtgagtttgccctggaaacaaaggaatacctaatgcgccccaatgggaatcagaattccgccagaccaggcacgtgtgtatggaatggcattattctggtcctggatccttgttctcaatcggcaacttcccgccgtagaccagtctgttatcagtcgtcttggccggtggcactgggcggctgttaacctgcatggagcaaaatgaggggcacatgccatgaagacccttcagacatctttatcgtatcggggctcggccacctttccgcgcagcgaggggtacaataagctcaaggcgattgttagacaaccgaccaaatcatcagtcgctgagtaaataaacccagatattggtcagaatgtgaaatgtctcataccaacggccgagcatctgtatgttgcatatacgccgtttaatcatagcttcaacacggagtcttctttgtgcctttcgggtcgctagcagagcgttttcattatgaaacggccgaactagcgaaaaagtcaagtcaaagagaaatgtaaatgatattggtaagataatttcaa

SEQ ID NO: 20899 - DNA, 1353 bp, Muscodor strobelii
  misc_feature: SGI cDNA ID NO. 567065
  misc_feature: Encodes the peptide sequence at SEQ ID NO 20900
atgaaggagaaaaacagcagaccagatcgaataagctcaaagacgagcacgaaaaaacagccctcaaagcccaactcaaaaaatagtgggaagaacacacagcctagcgcatcacgtgcgaacgcacccacgtctcagaaatcagagccaaaggaaagtccagaagaacggaagcgacaagagagacttctagatatctttcgtttggcgtttcgcgatgtgctagaggacgaagagacattcacagccagacttcaggacctgaagagcgcgctcttcaatcgcgattttgcgggtgcgtttgagcgcgaagaggcgctggatgtctatgcagcgcgttggtcacccacgagggcattggggtacgcgaggatattacgcgatatcgatgagcatgtgagaccgcttgtcgatgccggttgcgctggcgctggcagcgagatctctgctggtgtagacgcacttaagttgagatcggaggaaaccacggacataagtcaagatgcagaaaaaggagtaagtaagcccctcaaagtgttagcgataggcggcgcagctgcagagatcgttgcaatcgccgattacatctcaacctcatccgcgcatgcaagaacagatatcacactccttgacatcgggccgtggggtccagtggtgaggaaattgaatgacgctctcataacaccgcctcctatttccaagtttgccagcgctgcagcgcaagaagcgaacaaggctctcgtccaatctgatgacttcaatgccaagttcgttcagaaagacattttatcactagacaaagagggtcttggaagcctcctacgaagcccaacggatttaaagtcaccaagcagcagtagtatcctacgcgcgtacagcacctcgcaaccatcgacttctgtccccgaaacctcaccactcttgatcacactcctcttcaccctaaatgagctttacactatcagcggcataaaagccacaacatccttcttccgtcttctcactagtctcgtacccgccggatccctactacttgtcgttgactcccctggtagctattcagaagccgccgtaggcaaggaagcaaagaagtatcccatgcaatggctacttcaccacacactaatgccagcaccgcgtaaaggagcttcggcgtcaaaaccagaggcgaaagacggcggtgaggacggtgaagagagaggaggcaaggaaatggaaaatgaagaggcgcatagatgggaaagactagagacacatgactctgtttggttccgcgtcgcggagggcctgagatatcctatttcgcttgagaatatgcgatatcaaatgcatctatatcgtgcgcttagctag

SEQ ID NO: 20900 - protein, 450 aa, Muscodor strobelii
  misc_feature: SGI Peptide ID NO. 567065
  misc_feature (41)..(447): NCBI GI: 46136967 Blast Desc: FG09999.1 [Gibberella zeae PH-1]
  misc_feature (53)..(448): NCBI GI: 116206718 Blast Desc: CHGG_02652 [Chaetomium globosum CBS 148.51] gi|88183249|gb|EAQ90717.1| CHGG_02652 [Chaetomium globosum CBS 148.51]
  misc_feature (4)..(447): NCBI GI: 154305388 Blast Desc: BC1G_08463 [Botryotinia fuckeliana B05.10] gi|150853250|gb|EDN28442.1| BC1G_08463 [Botryotinia fuckeliana B05.10]
  misc_feature (16)..(447): NCBI GI: 256732049 Blast Desc: NECHADRAFT_40591 [Nectria haematococca mpVI 77-13-4]
  misc_feature (60)..(448): NCBI GI: 145606196 Blast Desc: MGG_02469 [Magnaporthe grisea 70-15] gi|145013921|gb|EDJ98562.1| MGG_02469 [Magnaporthe grisea 70-15]
  misc_feature (53)..(449): NCBI GI: 171692227 Blast Desc: protein product [Podospora anserina] gi|170946062|emb|CAP72863.1| protein product [Podospora anserina]
  misc_feature (56)..(447): NCBI GI: 85102897 Blast Desc: NCU01329 [Neurospora crassa OR74A] gi|28922960|gb|EAA32179.1| [Neurospora crassa OR74A]
  misc_feature (63)..(449): NCBI GI: 261352101 Blast Desc: conserved [Verticillium albo-atrum VaMs.102]
  misc_feature (56)..(447): NCBI GI: 16944334 Blast Desc: conserved [Neurospora crassa]
  misc_feature (24)..(448): NCBI GI: 189199524 Blast Desc: conserved [Pyrenophora tritici-repentis Pt-1C-BFP] gi|187983198|gb|EDU48686.1| conserved [Pyrenophora tritici-repentis Pt-1C-BFP]
MKEKNSRPDRISSKTSTKKQPSKPNSKNSGKNTQPSASRANAPTSQKSEPKESPEERKRQERLLDIFRLAFRDVLEDEETFTARLQDLKSALFNRDFAGAFEREEALDVYAARWSPTRALGYARILRDIDEHVRPLVDAGCAGAGSEISAGVDALKLRSEETTDISQDAEKGVSKPLKVLAIGGAAAEIVAIADYISTSSAHARTDITLLDIGPWGPVVRKLNDALITPPPISKFASAAAQEANKALVQSDDFNAKFVQKDILSLDKEGLGSLLRSPTDLKSPSSSSILRAYSTSQPSTSVPETSPLLITLLFTLNELYTISGIKATTSFFRLLTSLVPAGSLLLVVDSPGSYSEAAVGKEAKKYPMQWLLHHTLMPAPRKGASASKPEAKDGGEDGEERGGKEMENEEAHRWERLETHDSVWFRVAEGLRYPISLENMRYQMHLYRALS

SEQ ID NO: 20901 - DNA, 1426 bp, Muscodor strobelii
  misc_feature: SGI EST ID NO. CUFF.49034.0
  misc_feature: Variant of the nucleotide sequence at SEQ ID NO 20899
tacaagcaagctggacgcaaaccaaatttgaatttagacttccaaaatatgaaggagaaaaacagcagaccagatcgaataagctcaaagacgagcacgaaaaaacagccctcaaagcccaactcaaaaaatagtgggaagaacacacagcctagcgcatcacgtgcgaacgcacccacgtctcagaaatcagagccaaaggaaagtccagaagaacggaagcgacaagagagacttctagatatctttcgtttggcgtttcgcgatgtgctagaggacgaagagacattcacagccagacttcaggacctgaagagcgcgctcttcaatcgcgattttgcgggtgcgtttgagcgcgaagaggcgctggatgtctatgcagcgcgttggtcacccacgagggcattggggtacgcgaggatattacgcgatatcgatgagcatgtgagaccgcttgtcgatgccggttgcgctggcgctggcagcgagatctctgctggtgtagacgcacttaagttgagatcggaggaaaccacggacataagtcaagatgcagaaaaaggagtaagtaagcccctcaaagtgttagcgataggcggcgcagctgcagagatcgttgcaatcgccgattacatctcaacctcatccgcgcatgcaagaacagatatcacactccttgacatcgggccgtggggtccagtggtgaggaaattgaatgacgctctcataacaccgcctcctatttccaagtttgccagcgctgcagcgcaagaagcgaacaaggctctcgtccaatctgatgacttcaatgccaagttcgttcagaaagacattttatcactagacaaagagggtcttggaagcctcctacgaagcccaacggatttaaagtcaccaagcagcagtagtatcctacgcgcgtacagcacctcgcaaccatcgacttctgtccccgaaacctcaccactcttgatcacactcctcttcaccctaaatgagctttacactatcagcggcataaaagccacaacatccttcttccgtcttctcactagtctcgtacccgccggatccctactacttgtcgttgactcccctggtagctattcagaagccgccgtaggcaaggaagcaaagaagtatcccatgcaatggctacttcaccacacactaatgccagcaccgcgtaaaggagcttcggcgtcaaaaccagaggcgaaagacggcggtgaggacggtgaagagagaggaggcaaggaaatggaaaatgaagaggcgcatagatgggaaagactagagacacatgactctgtttggttccgcgtcgcggagggcctgagatatcctatttcgcttgagaatatgcgatatcaaatgcatctatatcgtgcgcttagctagatagtaatacaaattatgatcgcgt

SEQ ID NO: 20902 - DNA, 447 bp, Muscodor strobelii
  misc_feature: SGI cDNA ID NO. 567066
  misc_feature: Encodes the peptide sequence at SEQ ID NO 20903
atgtcgaacctctcgccccaaccctcctcctcctcatcttcacccccacccccatcctcaacctcaccgtcatccacagcgacatcctcgccaccaagcaagctcgtatctgacaatctccccaacgccttcctccattcccgcctcttcgacgtccccgaacaggacctccaagaccacctgcgtcgtctcaaaaacttcgacctaatcctccttctccaaattctccgtaaattcccctctaccacccacccccatagatccgcgctagccgcggacctgatctctcatcttcacgctgtagtcttcgctgagatggacttcttccatcgtacggggaaacggcccgatgaggacagcaaggggtatgcggactgggtcgagaagttgctcgttgaggcccaggttgaaaatgaaagagaaggaaaggagtgtagcttgcagtag

SEQ ID NO: 20903 - protein, 148 aa, Muscodor strobelii
  misc_feature: SGI Peptide ID NO. 567066
MSNLSPQPSSSSSSPPPPSSTSPSSTATSSPPSKLVSDNLPNAFLHSRLFDVPEQDLQDHLRRLKNFDLILLLQILRKFPSTTHPHRSALAADLISHLHAVVFAEMDFFHRTGKRPDEDSKGYADWVEKLLVEAQVENEREGKECSLQ

SEQ ID NO: 20904 - DNA, 229 bp, Muscodor strobelii
  misc_feature: SGI EST ID NO. CUFF.49046.0
  misc_feature: Variant of the nucleotide sequence at SEQ ID NO 20902
gtaaattcccctctaccacccacccccatagatccgcgctagccgcggacctgatctctcatcttcacgctgtagtcttcgctgagatggacttcttccatcgtacggggaaacggcccgatgaggacagcaaggggtatgcggactgggtcgagaagttgctcgttgaggcccaggttgaaaatgaaagagaaggaaaggagtgtagcttgcagtagatacgttgttg

SEQ ID NO: 20905 - DNA, 2955 bp, Muscodor strobelii
  misc_feature: SGI cDNA ID NO. 567067
  misc_feature: Encodes the peptide sequence at SEQ ID NO 20906
atgccaggactagcgcgcaagctgctgatttgcgccgctgtcgacggccttatcatccagccgctcgccagcaagggccagagaacgcctgtttcggtccaggtcaaatatggcgacgcggctgtccgcccagtgccccgagaccaaaccatagcttccacgtcctctaagccaagtataagctttgaggcgttcggcatcgttggcatattcaccgttgcccgcctcagctacctcgtctccatcaccggccgacagcaggtcgcccagatccgcggacaccccgtctacgtcataacagatgtcgccgtgacgccttgtacctcccagaccgaagccgagaccgcaataagacacacatctcaacaaatacgcgcaaggtcagccgagaaacacgatgacgagctctcagaatccgaaagcgaagtcgagccacccccatccaaagtgggcgtcgaagagacagacgaccccggcgcgctgagtgacctcgaacagtccgggaagaagccaggggatgagagcggcattgccgaagatgtatacaagagaagtggtagtgggagctacggtcgggtcgcccagcgctggttcaataacaaagcctggatggctacgcgccgccgcagtctgggattaagcggtgtcgggtcgggctcagccgaaaatatcagcaagaccgacgagacgatcaagggggaagacgaggacaaggagctgagcaagacagtcgtgaaagagaaagtcgacccgccgccggcgccctcagcaggcgagagcttgatcccaaagttattacggatggcacacatctggtttggcacctcgaaaagcttttacttctcctatgacctggatcttaccaggagcctggccaatggagcgatctcgaacaacaacgcaccgttgcaccgaacagcagaccctacattcttctggaaccagaacatgttgaaacccttcggagtcctgagcgacgactctcttttactacctatcatgcagggctttgtgggacagaggacatttgtcgtagatcggaacccgccgcaaatggactcccaacttgattctctggaattaaatgacatgagcccgggtacggagtccaaaccgggatctccgccagtagagagatcatcgcttgacctaaggcctactgagaagaagtatgctatcaccgtagtttcacgaagatctatcaagcgagccggcttgcgctatctacgtcgaggtatcgacgaagaaggaaataccgcaaactctgtcgagacggagcagattctttccaccccggcatgggagccatcttccaagatttactcattcgtgcaagtcagaggtagcatacctcttttcttcacgcagtctccatattcgttgaaaccggcacccatgctccagcattctcccgaggccaactatcgtgcgttctcgaagcattttgatcgcatgaatgagacatacggcgccgtgcaactggttaatctggtcgagaagcatggagtagaatccatcgttggtaacaagtatcaagaaaatgctgaaaaatacaacgacgagaagtcagatgggtcacagcctttagcttttgaatggttcgatttccacaacgcttgtcgtgggatgaagttcgaaaacgtgagcttgcttctagacactctgggaaagaagctcgaagagaccagaagcaccgtcgagacaaatggcaccatcgctcagaaacagagcggagtggtaaggacgaactgcatggactgcttagaccggacaaatgtctgccagagctcttttggcaaattcatgctcgatcttcaactgaaggatgagggtttcgacatgtccgcccagcctgatcaagtcaactcttggttcaacacgctttgggctgacaacggagacgcaatttctaaacagtatgcctcaacggctgcgatgaagggcgactacaccagaacaaggaagagagactatcgaggtatggtcaatgacctcgggctctctctgactcgatactacaacggcatggtaaatgactacttcagtcaagccggcatcgacttcttcctgggaaatgtcacgtcgcttgtgttcgatgaatttgaatcgacaatgatgacgaaagacccaggcgtatcaatgtcgaggatgcgagagctagcaatcgagacgtcgcagaagattgccattgaggatgcacaagaagactttattggcggctggacactcctctctcctcatacctccgactccttgaagtcgttgcccttcgaggaagttgtctttctacttacagatgcagccctatacctctgtcgcttcgactggaaattggacaaggtatcctctttcgaacgagtcgcgctatcacacgtcgttggtatcaaagttggcacgtacatcacttcaacagtttctaaagcccaagccgacgaggagaaaaacgtagggatcgtcattacttacgaaccaggtaagacagatgtgaagcgcaccaacacaaggtctctctccagcattacgaccaaaaatggtacctccgaagaagctgcaccgaatagctcggcgacagtatcaggtgtactaaaccaaggaatactaagcgcgatatcggggtcgaaagcaccacgcccaccagtgaggaagatcattgcgttgaaggcgttgtatgcgcatacggctatctcagatgcgaggggcgtcgagaggctgaatgagaaggaacagattaatgtcgttgcgggagagattgagagacttgttcttcggggcagacctccagcgcctgatacaacaactgaaagcagcgcaggtggagagggagaagatagtggtaaaggcggggaacaagggttgatcgaaaaaggcgatattatatcgcttgctgatgccaggaagagtaccggggtacttgagcagctgggacatagtattaagaagttggtatgggcttag

SEQ ID NO: 20906 - protein, 984 aa, Muscodor strobelii
  misc_feature: SGI Peptide ID NO. 567067
  misc_feature (64)..(548): Pfam Id: PF02383 Pfam Desc: SacI homology domain
  misc_feature (393)..(548): Pfam Id: PF02383 Pfam Desc: SacI homology domain
  misc_feature (275)..(349): Pfam Id: PF02383 Pfam Desc: SacI homology domain
  misc_feature (64)..(108): Pfam Id: PF02383 Pfam Desc: SacI homology domain
  misc_feature (1)..(984): NCBI GI: 121700807 Blast Desc: SacI domain protein [Aspergillus clavatus NRRL 1] gi|119396811|gb|EAW07242.1| SacI domain protein [Aspergillus clavatus NRRL 1]
  misc_feature (1)..(984): NCBI GI: 169767222 Blast Desc: [Aspergillus oryzae RIB40] gi|83765937|dbj|BAE56080.1| protein product [Aspergillus oryzae]
  misc_feature (1)..(984): NCBI GI: 238484057 Blast Desc: SacI domain protein [Aspergillus flavus NRRL3357] gi|220701317|gb|EED57655.1| SacI domain protein [Aspergillus flavus NRRL3357]
  misc_feature (1)..(984): NCBI GI: 240108713 Blast Desc: CPC735_010660 [Coccidioides posadasii C735 delta SOWgp]
  misc_feature (1)..(984): NCBI GI: 239612698 Blast Desc: SacI domain-containing protein [Ajellomyces dermatitidis ER-3]
  misc_feature (1)..(984): NCBI GI: 115397581 Blast Desc: conserved [Aspergillus terreus NIH2624] gi|114192573|gb|EAU34273.1| conserved [Aspergillus terreus NIH2624]
  misc_feature (1)..(984): NCBI GI: 261191442 Blast Desc: SacI domain-containing protein [Ajellomyces dermatitidis SLH14081] gi|239589895|gb|EEQ72538.1| SacI domain-containing protein [Ajellomyces dermatitidis SLH14081]
  misc_feature (1)..(984): NCBI GI: 70996400 Blast Desc: SacI domain protein [Aspergillus fumigatus Af293] gi|66850590|gb|EAL90917.1| SacI domain protein [Aspergillus fumigatus Af293] gi|159131709|gb|EDP56822.1| SacI domain protein
  misc_feature (1)..(984): NCBI GI: 212531783 Blast Desc: SacI domain protein [Penicillium marneffei ATCC 18224] gi|210071412|gb|EEA25501.1| SacI domain protein [Penicillium marneffei ATCC 18224]
  misc_feature (1)..(984): NCBI GI: 255941970 Blast Desc: Pc16g14570 [Penicillium chrysogenum Wisconsin 54-1255] gi|211586377|emb|CAP94127.1| Pc16g14570 [Penicillium chrysogenum Wisconsin 54-1255]
MPGLARKLLICAAVDGLIIQPLASKGQRTPVSVQVKYGDAAVRPVPRDQTIASTSSKPSISFEAFGIVGIFTVARLSYLVSITGRQQVAQIRGHPVYVITDVAVTPCTSQTEAETAIRHTSQQIRARSAEKHDDELSESESEVEPPPSKVGVEETDDPGALSDLEQSGKKPGDESGIAEDVYKRSGSGSYGRVAQRWFNNKAWMATRRRSLGLSGVGSGSAENISKTDETIKGEDEDKELSKTVVKEKVDPPPAPSAGESLIPKLLRMAHIWFGTSKSFYFSYDLDLTRSLANGAISNNNAPLHRTADPTFFWNQNMLKPFGVLSDDSLLLPIMQGFVGQRTFVVDRNPPQMDSQLDSLELNDMSPGTESKPGSPPVERSSLDLRPTEKKYAITVVSRRSIKRAGLRYLRRGIDEEGNTANSVETEQILSTPAWEPSSKIYSFVQVRGSIPLFFTQSPYSLKPAPMLQHSPEANYRAFSKHFDRMNETYGAVQLVNLVEKHGVESIVGNKYQENAEKYNDEKSDGSQPLAFEWFDFHNACRGMKFENVSLLLDTLGKKLEETRSTVETNGTIAQKQSGVVRTNCMDCLDRTNVCQSSFGKFMLDLQLKDEGFDMSAQPDQVNSWFNTLWADNGDAISKQYASTAAMKGDYTRTRKRDYRGMVNDLGLSLTRYYNGMVNDYFSQAGIDFFLGNVTSLVFDEFESTMMTKDPGVSMSRMRELAIETSQKIAIEDAQEDFIGGWTLLSPHTSDSLKSLPFEEVVFLLTDAALYLCRFDWKLDKVSSFERVALSHVVGIKVGTYITSTVSKAQADEEKNVGIVITYEPGKTDVKRTNTRSLSSITTKNGTSEEAAPNSSATVSGVLNQGILSAISGSKAPRPPVRKIIALKALYAHTAISDARGVERLNEKEQINVVAGEIERLVLRGRPPAPDTTTESSAGGEGEDSGKGGEQGLIEKGDIISLADARKSTGVLEQLGHSIKKLVWA

SEQ ID NO: 20907 - DNA, 3375 bp, Muscodor strobelii
  misc_feature: SGI EST ID NO. CUFF.49062.1
  misc_feature: Variant of the nucleotide sequence at SEQ ID NO 20905
gccaaagcaccttgcatcgtcgatttgaaatgtcatgttcagctgcgaatacctaatgctaccttctccctctctctatgtatcactagatcccatgtttatacttctttccaataagatacctagagaggagaacaaagaagaataaaactatctcctcacacaaccatcttgtctatctgtctgactactcctttgtcctttgtgctatgattacttgatcccagataccccgccatttgtcggccatcacatacctaattcgagtggaatatgccaggactagcgcgcaagctgctgatttgcgccgctgtcgacggccttatcatccagccgctcgccagcaagggccagagaacgcctgtttcggtccaggtcaaatatggcgacgcggctgtccgcccagtgccccgagaccaaaccatagcttccacgtcctctaagccaagtataagctttgaggcgttcggcatcgttggcatattcaccgttgcccgcctcagctacctcgtctccatcaccggccgacagcaggtcgcccagatccgcggacaccccgtctacgtcataacagatgtcgccgtgacgccttgtacctcccagaccgaagccgagaccgcaataagacacacatctcaacaaatacgcgcaaggtcagccgagaaacacgatgacgagctctcagaatccgaaagcgaagtcgagccacccccatccaaagtgggcgtcgaagagacagacgaccccggcgcgctgagtgacctcgaacagtccgggaagaagccaggggatgagagcggcattgccgaagatgtatacaagagaagtggtagtgggagctacggtcgggtcgcccagcgctggttcaataacaaagcctggatggctacgcgccgccgcagtctgggattaagcggtgtcgggtcgggctcagccgaaaatatcagcaagaccgacgagacgatcaagggggaagacgaggacaaggagctgagcaagacagtcgtgaaagagaaagtcgacccgccgccggcgccctcagcaggcgagagcttgatcccaaagttattacggatggcacacatctggtttggcacctcgaaaagcttttacttctcctatgacctggatcttaccaggagcctggccaatggagcgatctcgaacaacaacgcaccgttgcaccgaacagcagaccctacattcttctggaaccagaacatgttgaaacccttcggagtcctgagcgacgactctcttttactacctatcatgcagggctttgtgggacagaggacatttgtcgtagatcggaacccgccgcaaatggactcccaacttgattctctggaattaaatgacatgagcccgggtacggagtccaaaccgggatctccgccagtagagagatcatcgcttgacctaaggcctactgagaagaagtatgctatcaccgtagtttcacgaagatctatcaagcgagccggcttgcgctatctacgtcgaggtatcgacgaagaaggaaataccgcaaactctgtcgagacggagcagattctttccaccccggcatgggagccatcttccaagatttactcattcgtgcaagtcagaggtagcatacctcttttcttcacgcagtctccatattcgttgaaaccggcacccatgctccagcattctcccgaggccaactatcgtgcgttctcgaagcattttgatcgcatgaatgagacatacggcgccgtgcaactggttaatctggtcgagaagcatggagtagaatccatcgttggtaacaagtatcaagaaaatgctgaaaaatacaacgacgagaagtcagatgggtcacagcctttagcttttgaatggttcgatttccacaacgcttgtcgtgggatgaagttcgaaaacgtgagcttgcttctagacactctgggaaagaagctcgaagagaccagaagcaccgtcgagacaaatggcaccatcgctcagaaacagagcggagtggtaaggacgaactgcatggactgcttagaccggacaaatgtctgccagagctcttttggcaaattcatgctcgatcttcaactgaaggatgagggtttcgacatgtccgcccagcctgatcaagtcaactcttggttcaacacgctttgggctgacaacggagacgcaatttctaaacagtatgcctcaacggctgcgatgaagggcgactacaccagaacaaggaagagagactatcgaggtatggtcaatgacctcgggctctctctgactcgatactacaacggcatggtaaatgactacttcagtcaagccggcatcgacttcttcctgggaaatgtcacgtcgcttgtgttcgatgaatttgaatcgacaatgatgacgaaagacccaggcgtatcaatgtcgaggatgcgagagctagcaatcgagacgtcgcagaagattgccattgaggatgcacaagaagactttattggcggctggacactcctctctcctcatacctccgactccttgaagtcgttgcccttcgaggaagttgtctttctacttacagatgcagccctatacctctgtcgcttcgactggaaattggacaaggtatcctctttcgaacgagtcgcgctatcacacgtcgttggtatcaaagttggcacgtacatcacttcaacagtttctaaagcccaagccgacgaggagaaaaacgtagggatcgtcattacttacgaaccaggtaagacagatgtgaagcgcaccaacacaaggtctctctccagcattacgaccaaaaatggtacctccgaagaagctgcaccgaatagctcggcgacagtatcaggtgtactaaaccaaggaatactaagcgcgatatcggggtcgaaagcaccacgcccaccagtgaggaagatcattgcgttgaaggcgttgtatgcgcatacggctatctcagatgcgaggggcgtcgagaggctgaatgagaaggaacagattaatgtcgttgcgggagagattgagagacttgttcttcggggcagacctccagcgcctgatacaacaactgaaagcagcgcaggtggagagggagaagatagtggtaaaggcggggaacaagggttgatcgaaaaaggcgatattatatcgcttgctgatgccaggaagagtaccggggtacttgagcagctgggacatagtattaagaagttggtatgggcttaggggtaggataggggcaagaaggtagcagggtaaaggacagcaaagggcatggcagcatgacagcatggcatggtacatgagtgatgcgaacatacatacatgagcatacataatgaaattactaatacatatcatttctcgtcgaca

SEQ ID NO: 20908 - DNA, 1515 bp, Muscodor strobelii
  misc_feature: SGI cDNA ID NO. 567068
  misc_feature: Encodes the peptide sequence at SEQ ID NO 20909
atgcaaggtgtttctctacttttctcggcggctacagcgctgttcatttatgttgtctcgaggtggtttcaacagtacaggaaaggtccgcttcctcctggaccgagaggtcttcccatcgtcggcaacgtgctagacctcccgccagaaggcacccttgagtggaaacactggctgcagcacaaggagagatatggcctaatcagctcggtgacagtgctcggccagctcatcatcattcttcacgatagacaaacagtctcggatatcctagagaaaggcgcactcaagagctcctcaagacctcacttgatcttcgctaatgatgtcgttggctatggagatataatgggcatgatgccgtataatcgaagatttaagatgcaccgtaaactcaccgagactcaggttagcaacaaggcggcaatacgatttcagccgcttcaggagttggaggttctgcggtttctaaggaggctagttgcaaatccagacgatctgcaaaaccatctccatcttatatccggctctgtcatgcttcgcgttttgtataactacgaggcagatccagataaagacgacccttttgtaaccaacgccaaccaggttatggaagagttctccaaggctacaagcccaggcgcctggctggtagatttgatcccgtggcttcagtatctcccagagtggatgcctggtaccggattcaaaacaacggcaaagatcttcaggagccacctcttgcgcggtgtcgaggaaccttaccaatatgtcagagagcagatgagcaaaggtaacgacgatgtgtcgtacgtcgctggcttagtcaaggacatacaccgggagatcagccccgaggaagagagcgtcatcagctggtcggcagcttcgatgctcaatgcggggaccgacaccaccagtgccgtgctttactcctttttcaaggccataatcctatttcctgaggttcagaagcgggcgcaagaggagatcgatcgtgaagtgggtagctcccgtctgccatccttttctgacagatccaaactgccgtatgtccaagccatagtgcaggaagcactgcggtggcatgcgcttgctcctatgggattcccccacctaaccacggaggatgatacctatcgcgggtactctataccgaaagatgcgctgatattacctgctgtagcctggctcacgcacgaccccgatgtgtatcatagtccagaagagttccagcccgagagattcctcgagccgcgatgtgaaccttctgcatccgagctcgtgttcggtttcgggcgtagagcctgtcccggaagatggattgcggaccaaattctttttctcgcgatcgcacaaacgctggctgtgttcgacattcaaaaggcagtggatcaacagggacgtgttatcgaagtggaatacgatccgttgcccggtgtcatatctcgcgtcaaatcattcgcacacaaaatcatacttagaagtgaaaagcatagagctcttattagttag

SEQ ID NO: 20909 - protein, 504 aa, Muscodor strobelii
  misc_feature: SGI Peptide ID NO. 567068
  misc_feature (32)..(492): Pfam Id: PF00067 Pfam Desc: Cytochrome P450
  misc_feature (298)..(455): Pfam Id: PF00067 Pfam Desc: Cytochrome P450
  misc_feature (1)..(503): NCBI GI: 46111911 Blast Desc: FG02837.1 [Gibberella zeae PH-1]
  misc_feature (40)..(503): NCBI GI: 115401660 Blast Desc: conserved [Aspergillus terreus NIH2624] gi|114190359|gb|EAU32059.1| conserved [Aspergillus terreus NIH2624]
  misc_feature (1)..(503): NCBI GI: 225562186 Blast Desc: O-methylsterigmatocystin oxidoreductase [Ajellomyces capsulatus G186AR]
  misc_feature (12)..(503): NCBI GI: 212530868 Blast Desc: cytochrome P450 oxidoreductase OrdA-like, [Penicillium marneffei ATCC 18224] gi|210074989|gb|EEA29076.1| cytochrome P450 oxidoreductase OrdA-like, [Penicillium marneffei ATCC 18224]
  misc_feature (1)..(503): NCBI GI: 169762482 Blast Desc: [Aspergillus oryzae RIB40] gi|83770169|dbj|BAE60302.1| protein product [Aspergillus oryzae]
  misc_feature (15)..(503): NCBI GI: 242817323 Blast Desc: cytochrome P450 oxidoreductase OrdA-like, [Talaromyces stipitatus ATCC 10500] gi|218713397|gb|EED12821.1| cytochrome P450 oxidoreductase OrdA-like, [Talaromyces stipitatus ATCC
  misc_feature (43)..(503): NCBI GI: 169765434 Blast Desc: [Aspergillus oryzae RIB40] gi|83765043|dbj|BAE55186.1| protein product [Aspergillus oryzae]
  misc_feature (41)..(503): NCBI GI: 259486936 Blast Desc: TPA: cytochrome P450, (Eurofung) [Aspergillus nidulans FGSC A4]
  misc_feature (13)..(503): NCBI GI: 261189466 Blast Desc: OrdA [Ajellomyces dermatitidis SLH14081] gi|239591721|gb|EEQ74302.1| OrdA [Ajellomyces dermatitidis SLH14081] gi|239608965|gb|EEQ85952.1| OrdA [Ajellomyces ER-3]
  misc_feature (5)..(503): NCBI GI: 169599354 Blast Desc: SNOG_02494 [Phaeosphaeria nodorum SN15] gi|111069586|gb|EAT90706.1| SNOG_02494 [Phaeosphaeria nodorum SN15]
  misc_feature (40)..(495): SWISSPROT Homolog: EC 1.14.99.9 Steroid 17-alpha-monooxygenase
MQGVSLLFSAATALFIYVVSRWFQQYRKGPLPPGPRGLPIVGNVLDLPPEGTLEWKHWLQHKERYGLISSVTVLGQLIIILHDRQTVSDILEKGALKSSSRPHLIFANDVVGYGDIMGMMPYNRRFKMHRKLTETQVSNKAAIRFQPLQELEVLRFLRRLVANPDDLQNHLHLISGSVMLRVLYNYEADPDKDDPFVTNANQVMEEFSKATSPGAWLVDLIPWLQYLPEWMPGTGFKTTAKIFRSHLLRGVEEPYQYVREQMSKGNDDVSYVAGLVKDIHREISPEEESVISWSAASMLNAGTDTTSAVLYSFFKAIILFPEVQKRAQEEIDREVGSSRLPSFSDRSKLPYVQAIVQEALRWHALAPMGFPHLTTEDDTYRGYSIPKDALILPAVAWLTHDPDVYHSPEEFQPERFLEPRCEPSASELVFGFGRRACPGRWIADQILFLAIAQTLAVFDIQKAVDQQGRVIEVEYDPLPGVISRVKSFAHKIILRSEKHRALIS

SEQ ID NO: 20910 - DNA, 1859 bp, Muscodor strobelii
  misc_feature: SGI EST ID NO. CUFF.49058.0
  misc_feature: Variant of the nucleotide sequence at SEQ ID NO 20908
tttcaccagtacatgtcgttgtggtattagtaactcaacatgcaaggtgtttctctacttttctcggcggctacagcgctgttcatttatgttgtctcgaggtggtttcaacagtacaggaaaggtccgcttcctcctggaccgagaggtcttcccatcgtcggcaacgtgctagacctcccgccagaaggcacccttgagtggaaacactggctgcagcacaaggagagatatggcctaatcagctcggtgacagtgctcggccagctcatcatcattcttcacgatagacaaacagtctcggatatcctagagaaaggcgcactcaagagctcctcaagacctcacttgatcttcgctaatgatgtcgttggctatggagatataatgggcatgatgccgtataatcgaagatttaagatgcaccgtaaactcaccgagactcaggttagcaacaaggcggcaatacgatttcagccgcttcaggagttggaggttctgcggtttctaaggaggctagttgcaaatccagacgatctgcaaaaccatctccatcttatatccggctctgtcatgcttcgcgttttgtataactacgaggcagatccagataaagacgacccttttgtaaccaacgccaaccaggttatggaagagttctccaaggctacaagcccaggcgcctggctggtagatttgatcccgtggcttcagtatctcccagagtggatgcctggtaccggattcaaaacaacggcaaagatcttcaggagccacctcttgcgcggtgtcgaggaaccttaccaatatgtcagagagcagatgagcaaaggtaacgacgatgtgtcgtacgtcgctggcttagtcaaggacatacaccgggagatcagccccgaggaagagagcgtcatcagctggtcggcagcttcgatgctcaatgcggggaccgacaccaccagtgccgtgctttactcctttttcaaggccataatcctatttcctgaggttcagaagcgggcgcaagaggagatcgatcgtgaacctggctcacgcacgaccccgatgtgtatcatagtccagaagagttccagcccgagagattcctcgagccgcgatgtgaaccttctgcatccgagctcgtgttcggtttcgggcgtagagcctgtcccggaagatggattgcggaccaaattctttttctcgcgatcgcacaaacgctggctgtgttcgacattcaaaaggcagtggatcaacagggacgtgttatcgaagtggaatacgatccgttgcccggtgtcatatctcgcgtcaaatcattcgcacacaaaatcatacttagaagtgaaaagcatagagctcttattagttagggcttgtacgataggggtacgatgctgcgatatgttccccgggtgggttacttagctaaatggcatcaggacgaacggacagatgctacaccattacattacacaaagctattgtttagaatttaagatgaatgccaggggaccggaagatggagccgaaatcgtgattgaaaaggcagatagataacatctcgtgtcacattcccgtgtcaatcaatgtgttgagatacagttaagaacgaagatctctctttcacattggagacttctaatcagtctcaggccagaatcaatgtgcattggcgagatgatcttagggccgttaacaggagtacatcgactaattgttcggactctcagctaatttcataatgatttgttagttggaaccgacagattcgcgcagcatatgtattgccacgccgcaacggggaagagtcagatgtgccagtagtagtgcctgataagtagaatgaaagcgtgctctag

SEQ ID NO: 20911 - DNA, 957 bp, Muscodor strobelii
  misc_feature: SGI cDNA ID NO. 567069
  misc_feature: Elevated expression when VOC is produced
  misc_feature: Encodes the peptide sequence at SEQ ID NO 20912
atgtataacggtgaagatcgcctggatggtatactcgccctggaagatgatatgtattacagaacaaacctgttcacttcaaaaactaccagatcaccaccacagaatcaagaccgatctatcgctgagcagctaaatgaagttctcccaagcttactcaacaagtattacgccggctgggagaaacggtggaatgattgtttagatgctgttgatcaatgtgtgaagatctcgctcgatgatctctctgattctaggcggcttgaaagatttatgtttgatacgcccaggttcgagcaatccagatcctactttgttgcgcttcaacttcaacggattttctcagatcacattaaagaaacaagacgtgatctagaacgtttgcacgaaagcctgaaaggacgcaacaaaggttccctaaagacaactctcgaacagcttaaactggccgagaaccggcttctagaacgtatagacaagaagagatctgatatcgagagtctcagagatggccttttcaactccacatcagtgcgagagtcaatgagagcgacttacatgaataaatgggtcatcgtcttcacgaccgtgacggtcttatacgtacccccaagctttatatcggcccttttcgccacgccgctgccctacttcgctaaaggcgatcccaatgagttcaaacaagccatagctattgccacgggcgcgacattcgtcatcgctttcatactacttcgtgtagcaacgtccttcgacgacctgatccgtaactggaatttcttcagatcagcgattagaccaacaatgatttgggcccagcatctaagcaacaagatttccgagaaatgcagaccagcatcggttcgcaacaaagtatgcgaagccctaggcgtgatgataggatggattatagtgtgtgtgttctatcgtacggggacagaggaatctaaagtatag

SEQ ID NO: 20912 - protein, 318 aa, Muscodor strobelii
  misc_feature: SGI Peptide ID NO. 567069
  misc_feature (38)..(252): NCBI GI: 171676599 Blast Desc: protein product [Podospora anserina] gi|170936366|emb|CAP61024.1| protein product [Podospora anserina]
  misc_feature (60)..(208): NCBI GI: 119501615 Blast Desc: NFIA_044860 [Neosartorya fischeri NRRL 181] gi|119415730|gb|EAW25667.1| NFIA_044860 [Neosartorya fischeri NRRL 181]
  misc_feature (64)..(207): NCBI GI: 46134027 Blast Desc: FG09153.1 [Gibberella zeae PH-1]
  misc_feature (47)..(252): NCBI GI: 116197541 Blast Desc: [Chaetomium globosum CBS 148.51] gi|88178205|gb|EAQ85673.1| [Chaetomium globosum CBS 148.51]
  misc_feature (63)..(260): NCBI GI: 225684196 Blast Desc: [Paracoccidioides brasiliensis Pb03]
  misc_feature (144)..(209): NCBI GI: 116194133 Blast Desc: [Chaetomium globosum CBS 148.51] gi|88182697|gb|EAQ90165.1| [Chaetomium globosum CBS 148.51]
  misc_feature (63)..(260): NCBI GI: 226285007 Blast Desc: conserved [Paracoccidioides brasiliensis Pb01]
  misc_feature (62)..(263): NCBI GI: 171679519 Blast Desc: protein product [Podospora anserina] gi|170939385|emb|CAP64613.1| protein product [Podospora anserina]
  misc_feature (98)..(215): NCBI GI: 116198769 Blast Desc: [Chaetomium globosum CBS 148.51] gi|88178819|gb|EAQ86287.1| [Chaetomium globosum CBS 148.51]
  misc_feature (63)..(260): NCBI GI: 239606331 Blast Desc: conserved [Ajellomyces dermatitidis ER-3]
  misc_feature: Useful for introducing or modulating the production of volatile compounds
MYNGEDRLDGILALEDDMYYRTNLFTSKTTRSPPQNQDRSIAEQLNEVLPSLLNKYYAGWEKRWNDCLDAVDQCVKISLDDLSDSRRLERFMFDTPRFEQSRSYFVALQLQRIFSDHIKETRRDLERLHESLKGRNKGSLKTTLEQLKLAENRLLERIDKKRSDIESLRDGLFNSTSVRESMRATYMNKWVIVFTTVTVLYVPPSFISALFATPLPYFAKGDPNEFKQAIAIATGATFVIAFILLRVATSFDDLIRNWNFFRSAIRPTMIWAQHLSNKISEKCRPASVRNKVCEALGVMIGWIIVCVFYRTGTEESKV

SEQ ID NO: 20913 - DNA, 2529 bp, Muscodor strobelii
  misc_feature: SGI EST ID NO. CUFF.49109.0
  misc_feature: Variant of the nucleotide sequence at SEQ ID NO 20911
cttttcttaatcttcttgactcacttttcctcacttttgcttgtactagttacttttgatgctgtaatagattatcacatcacggtatctgtcactacaagcgactgaaatcgaatgatcacctaattgcattgactttaatctacatgccataacactagaaacatagcaaccgctggaatagtaaccaggctatcaaactcgaaggtctgtattcaaatcagacttcttcgtcaatacgctgtcaaactcgctcagaacaacaattaatgacagagttagggttcctgttatcaacagtgacctaaacaacagcagctgaagaccaagacttggaacaaaccacttgaccctgctcggttaagcagcttctagttgaaagatgtcgctgcatcgtagtaatgaggtacatcaaccgaagtcgcggaggatgacaagcattgtgggtcgttttttcgaagtaatcgaaggaaccaactcatccgaaagctctgaattcgagaatctgaagtggagggtcccaaaagacaaccataaagttgctatactcgatttcccaagcggccacaggatacgtatcgcaaaccccgaccacagctgtgcgatcgatggtgatactatcgtagatcctcttgtgcttagtggaccagatggcgtgtcacctgtacagccatcatcgattagccccaatcaagactcctgttggaacaaagcggaagagacgtggacgagttcgaacccaagatgcagacccaagatgctgatttaccattcagagaatgatattgaaagcagagctacgtttacggaagatgatatcacggatttggatgattgtgctggtgtgagaatttggtacgtcttagaacctggccttctacaatatgttcttaagaattgacgttaataaggcgatctgttgaacacgccggttatccaatagatcttgaatcggtgtctccgtgttataaaatactagagtgttatgcagggagcagtcatggtacgtcgtacttagacgacgctattatctcgcatttcaaggcttcgcccgcctattattctataggggcctttcggctccctcataaagcaccttatgtgatttcccaccgcataaatggttttcgaatcgtacattctagagtgccgcttgtttatggagacctcctgatatttgccggtagggcgaagggtctcttaccaggtacaagggactctcatttttctatgactgcgatgaacgactggtacattgagagtcgagtttcgattttcgccatgtataacggtgaagatcgcctggatggtatactcgccctggaagatgatatgtattacagaacaaacctgttcacttcaaaaactaccagatcaccaccacagaatcaagaccgatctatcgctgagcagctaaatgaagttctcccaagcttactcaacaagtattacgccggctgggagaaacggtggaatgattgtttagatgctgttgatcaatgtgtgaagatctcgctcgatgatctctctgattctaggcggcttgaaagatttatgtttgatacgcccaggttcgagcaatccagatcctactttgttgcgcttcaacttcaacggattttctcagatcacattaaagaaacaagacgtgatctagaacgtttgcacgaaagcctgaaaggacgcaacaaaggttccctaaagacaactctcgaacagcttaaactggccgagaaccggcttctagaacgtatagacaagaagagatctgatatcgagagtctcagagatggccttttcaactccacatcagtgcgagagtcaatgagagcgacttacatgaataaatgggtcatcgtcttcacgaccgtgacggtcttatacgtacccccaagctttatatcggcccttttcgccacgccgctgccctacttcgctaaaggcgatcccaatgagttcaaacaagccatagctattgccacgggcgcgacattcgtcatcgctttcatactacttcgtgtagcaacgtccttcgacgacctgatccgtaactggaatttcttcagatcagcgattagaccaacaatgatttgggcccagcatctaagcaacaagatttccgagaaatgcagaccagcatcggttcgcaacaaagtatgcgaagccctaggcgtgatgataggatggattatagtgtgtgtgttctatcgtacggggacagaggaatctaaagtataggctatcggatggcgttccgaagaaagtgtcagattatctggttcaattgatcatgccccctgtagaaggatggcacaagttcgcgatcggagacattttgcttctcgagcgacaagctaatttgtagtcgctgctgctacatagctaggtcattcgtttctctcttataggcgtaacaccttaacaagggatgaccttaaggtactgcttgattatcgcggaatatgctaccaaggagctgatagagttagtaatacggacgacggcgcgtttcattgcgcaaagacaagt

SEQ ID NO: 20914 - DNA, 420 bp, Muscodor strobelii
  misc_feature: SGI cDNA ID NO. 567070
  misc_feature: Reduced expression when VOC is produced
  misc_feature: Encodes the peptide sequence at SEQ ID NO 20915
atgtccaacgaccagaacgctgcttggccgctggccgacgccagtctcagccaggaaattctcgacttagtccagcaggctagccactaccgccagctcaagaagggcgccaacgaggcgaccaaagctttgtcccgcggtgtcagcgagatcatcgtcctcgccgccgattgtagccctctcagcattctgctccatctgcctctgctttgcgaagggttagtcccatcttcttacgtcgcttttttttggaaggacaagaacgtaccctacgtatacgtcccctccaaggtagccctcggacgcgcctgcaatgttagccgatccgtcattgctgtttcgatcaccaccaacgaggcttccgagctacagaaccagatccgcgccctcaaggacaaggtcgagcgcctcatgatctaa

SEQ ID NO: 20915 - protein, 139 aa, Muscodor strobelii
  misc_feature: SGI Peptide ID NO. 567070
  misc_feature (18)..(125): Pfam Id: PF01248 Pfam Desc: Ribosomal protein L7Ae/L30e/S12e/Gadd45 family
  misc_feature (1)..(139): NCBI GI: 39968749 Blast Desc: MGG_02467 [Magnaporthe grisea 70-15] gi|145013923|gb|EDJ98564.1| MGG_02467 [Magnaporthe grisea 70-15]
  misc_feature (1)..(139): NCBI GI: 169769468 Blast Desc: [Aspergillus oryzae RIB40] gi|238501938|ref|XP_002382203.1| snRNP and snoRNP protein (Snu13), [Aspergillus flavus NRRL3357] protein product oryzae]
  misc_feature (1)..(139): NCBI GI: 70989749 Blast Desc: snRNP and snoRNP protein (Snu13) [Aspergillus fumigatus Af293] gi|119480375|ref|XP_001260216.1| snRNP and snoRNP protein (Snu13), [Neosartorya fischeri NRRL 181] snRNP and
  misc_feature (3)..(139): NCBI GI: 145234388 Blast Desc: An02g14340 [Aspergillus niger] gi|134057511|emb|CAK48865.1| protein product [Aspergillus niger]
  misc_feature (1)..(139): NCBI GI: 255945719 Blast Desc: Pc20g11410 [Penicillium chrysogenum Wisconsin 54-1255] gi|211588362|emb|CAP86470.1| Pc20g11410 [Penicillium chrysogenum Wisconsin 54-1255]
  misc_feature (1)..(139): NCBI GI: 255955151 Blast Desc: Pc21g13030 [Penicillium chrysogenum Wisconsin 54-1255] gi|211590039|emb|CAP96200.1| Pc21g13030 [Penicillium chrysogenum Wisconsin 54-1255]
  misc_feature (4)..(139): NCBI GI: 85102905 Blast Desc: NHP2/L7aE family protein [Neurospora crassa OR74A] gi|16944335|emb|CAC18221.2| 13 kD U4/U6.U5 snRNP associate protein [Neurospora crassa] gi|28922962|gb|EAA32181.1| NHP2/L7aE
  misc_feature (1)..(139): NCBI GI: 50556848 Blast Desc: YALI0F24497p [Yarrowia lipolytica] gi|74632285|sp|Q6C0I0.1|SNU13_YARLI RecName: Full=13 kDa ribonucleoprotein-associated protein gi|49651702|emb|CAG78643.1|
  misc_feature (1)..(139): NCBI GI: 50309915 Blast Desc: protein product [Kluyveromyces lactis] gi|74636609|sp|Q6CM69.1|SNU13_KLULA RecName: Full=13 kDa ribonucleoprotein-associated protein gi|49644105|emb|CAH00057.1|
  misc_feature (1)..(139): NCBI GI: 45190537 Blast Desc: AEL070Wp [Ashbya gossypii ATCC 10895] gi|74693707|sp|Q757T2.1|SNU13_ASHGO RecName: Full=13 kDa ribonucleoprotein-associated protein gi|44983479|gb|AAS52615.1|
  misc_feature: Useful for introducing or modulating the production of volatile compounds
MSNDQNAAWPLADASLSQEILDLVQQASHYRQLKKGANEATKALSRGVSEIIVLAADCSPLSILLHLPLLCEGLVPSSYVAFFWKDKNVPYVYVPSKVALGRACNVSRSVIAVSITTNEASELQNQIRALKDKVERLMI

SEQ ID NO: 20916 - DNA, 375 bp, Muscodor strobelii
  misc_feature: SGI EST ID NO. CUFF.49071.0
  misc_feature: Variant of the nucleotide sequence at SEQ ID NO 20914
gtcgagtagtactaccaaactcaaatttatttgcagaagagcttccatcttgcaccctcacgaacttacgatcctccgatcctaccaacctttacatcttccacgcacagggcgagccaacgcaaggaaccctgatccaacacgacaccgtcaccatgtccaacgaccagaacgctgcttggccgctggccgacgccagtctcagccaggaaattctcgacttagtccagcaggctagccactaccgccagctcaagaagggcgccaacgaggcgaccaaagctttgtcccgcggtgtcagcgagatcatcgtcctcgccgccgattgtagccctctcagcattctgctccatctgcctctgctttgcgaagggt

SEQ ID NO: 20917 - DNA, 504 bp, Muscodor strobelii
  misc_feature: SGI cDNA ID NO. 567071
  misc_feature: Encodes the peptide sequence at SEQ ID NO 20918
atgtctcaaggactcgacttctccgaagcttgcccggtctacgcgccgttcttcggtgctatgggctgcacggctgccatcgtcttcacctgcctcggtgcctcgtatggtaccgccaagtccggtgttggtatcgctgccatgggtgtcctgagacctgacctcatcgtcaagaacatcgttcccgtcattatggctggtatcatcggtatctacggactcgtcgtctccgtcctcatctccgacggcctcaagcagcagcttcccctctacaccggcttcatccagctcggcgccggtctcgctgtcggtcttgccggtatggccgctggtttcgccatcggtattgttggtgacgctggtgttcgtggaaccgcccagcagccccgtctcttcgtcggcatgattctcatcctcattttcgccgaagtgttgggtctctacggtctcattgtcgcccttctcatgaactccaaggccaccgttgatgtcagctgcacgtaa

SEQ ID NO: 20918 - protein, 167 aa, Muscodor strobelii
  misc_feature: SGI Peptide ID NO. 567071
  misc_feature (94)..(159): Pfam Id: PF00137 Pfam Desc: ATP synthase subunit C
  misc_feature (18)..(83): Pfam Id: PF00137 Pfam Desc: ATP synthase subunit C
  misc_feature (8)..(166): NCBI GI: 261352097 Blast Desc: vacuolar ATP synthase 16 kDa proteolipid subunit [Verticillium albo-atrum VaMs.102]
  misc_feature (8)..(166): NCBI GI: 256732048 Blast Desc: [Nectria haematococca mpVI 77-13-4]
  misc_feature (8)..(166): NCBI GI: 46136973 Blast Desc: VATL_NEUCR Vacuolar ATP synthase 16 kDa proteolipid subunit [Gibberella zeae PH-1]
  misc_feature (8)..(166): NCBI GI: 156044274 Blast Desc: vacuolar ATP synthase 16 kDa proteolipid subunit [Sclerotinia sclerotiorum 1980] gi|154694629|gb|EDN94367.1| vacuolar ATP synthase 16 kDa proteolipid subunit [Sclerotinia
  misc_feature (8)..(166): NCBI GI: 164426306 Blast Desc: vacuolar ATP synthase 16 kDa proteolipid subunit [Neurospora crassa OR74A] gi|401335|sp|P31413.1|VATL_NEUCR RecName: Full=V-type proton ATPase 16 kDa proteolipid subunit; 16
  misc_feature (8)..(166): NCBI GI: 145606200 Blast Desc: vacuolar ATP synthase 16 kDa proteolipid subunit [Magnaporthe grisea 70-15] gi|145013924|gb|EDJ98565.1| vacuolar ATP synthase 16 kDa proteolipid subunit [Magnaporthe grisea
  misc_feature (8)..(166): NCBI GI: 171692233 Blast Desc: protein product [Podospora anserina] gi|170946065|emb|CAP72866.1| protein product [Podospora anserina]
  misc_feature (8)..(166): NCBI GI: 121705942 Blast Desc: vacuolar ATP synthase 16 kDa proteolipid subunit, [Aspergillus clavatus NRRL 1] gi|119399380|gb|EAW09808.1| vacuolar ATP synthase 16 kDa proteolipid subunit, [Aspergillus 1]
  misc_feature (8)..(166): NCBI GI: 259485964 Blast Desc: TPA: similar to vacuolar ATP synthase 16 kDa proteolipid subunit (Broad) [Aspergillus nidulans FGSC A4]
  misc_feature (8)..(166): NCBI GI: 145233125 Blast Desc: An02g08020 [Aspergillus niger] gi|134056860|emb|CAK37765.1| protein product [Aspergillus niger]
MSQGLDFSEACPVYAPFFGAMGCTAAIVFTCLGASYGTAKSGVGIAAMGVLRPDLIVKNIVPVIMAGIIGIYGLVVSVLISDGLKQQLPLYTGFIQLGAGLAVGLAGMAAGFAIGIVGDAGVRGTAQQPRLFVGMILILIFAEVLGLYGLIVALLMNSKATVDVSCT

SEQ ID NO: 20919 - DNA, 1094 bp, Muscodor strobelii
  misc_feature: SGI EST ID NO. CUFF.49073.0
  misc_feature: Variant of the nucleotide sequence at SEQ ID NO 20917
caaacctcgaagccaacctagcaaagcagcatcattctctccttcaccaaccaaaagcttcatctatcccatctcaaccgtcgccgacacccaccgcaacacatactctcccgacttcgtcgccgtcagctttcctttcgacttctttaatcagcacacattccacccaccttcacaatgtctcaaggactcgacttctccgaagcttgcccggtctacgcgccgttcttcggtgctatgggctgcacggctgccatcgtcttcacctgcctcggtgcctcgtatggtaccgccaagtccggtgttggtatcgctgccatgggtgtcctgagacctgacctcatcgtcaagaacatcgttcccgtcattatggctggtatcatcggtatctacggactcgtcgtctccgtcctcatctccgacggcctcaagcagcagcttcccctctacaccggcttcatccagctcggcgccggtctcgctgtcggtcttgccggtatggccgctggtttcgccatcggtattgttggtgacgctggtgttcgtggaaccgcccagcagccccgtctcttcgtcggcatgattctcatcctcattttcgccgaagtgttgggtctctacggtctcattgtcgcccttctcatgaactccaaggccaccgttgatgtcagctgcacgtaaacaacgtactctcacgtaaagcttttcgtatcacatcgaactgcgacggacaagcgaacaaaaggaggtatggcgcgctacaatggcatatgtactcggacagcgtagggcgagtgatcatgctcgcatattcaacagaaaggtgtacgtgggtgttctgaaaatcgtcgtggttacggcattttcaggccccggttatgggaaagttgtttgatagagtggtggaaagaggaaataagtaatgaaaggagcaggagtcgggcatctgtattactggtttcgcaccatgctttacacttattgtcgatttcacatcatagaccaacgggtggggaaatcatgtactctaggttggtaaatcaggttcattgaaagtcattaaaatcagtacccttttggattttagattgcgt

SEQ ID NO: 20920 - DNA, 432 bp, Muscodor strobelii
  misc_feature: SGI cDNA ID NO. 567072
  misc_feature: Encodes the peptide sequence at SEQ ID NO 20921
atggtccgtctatctctttctctgatcgcagctgcgctgttgcagactggcctggctgtgccaatcgttgagaaggctcccttcccaaccggaggacatcatcatcaccatcctcaccctacaggaggctacccccatcacaccggctatccccatcattccgggcccccaggatactcaagcaccttctccgccataccttcgcctacagtagccccgatgaagagagagatccatgaggtccgggctcctattggcgatatgcccaagccgcctccgccaccacctcactctcactctcacccaacgcacacttacagtggccctccaccacctccgtcggggagcccctcgggctggcctccccattactctcacacctcgtttcctgctcctactggtagcccaactggctacccaggatggttttaa

SEQ ID NO: 20921 - protein, 143 aa, Muscodor strobelii
  misc_feature: SGI Peptide ID NO. 567072
MVRLSLSLIAAALLQTGLAVPIVEKAPFPTGGHHHHHPHPTGGYPHHTGYPHHSGPPGYSSTFSAIPSPTVAPMKREIHEVRAPIGDMPKPPPPPPHSHSHPTHTYSGPPPPPSGSPSGWPPHYSHTSFPAPTGSPTGYPGWF

SEQ ID NO: 20922 - DNA, 1687 bp, Muscodor strobelii
  misc_feature: SGI EST ID NO. CUFF.49085.0
  misc_feature: Variant of the nucleotide sequence at SEQ ID NO 20920
gtttacgcactgtttgaattaccttttccaatgattctccaaaactacatagatgacaagtgtcgtcggtagctatttacataccccatccctcgcatccccggattgattacgtgcgactagaatcgcccacacattgcattcgtaatcttaagtgagtatgccgtgacatatgagtgaagtaagctgtcgctcagcacagtactcgggcttattggtggatagacttgtcgatcttcagtggaggtcaaaatatagtgatagtcggcgcgccctcccacttcctccagcggattgcgagatcgcgccggcgttgcacaagcgtaacgtgccacagccttgaaagatcgctgatcatgaccggatcggaccttaaaattaccggagccgtgcaggacaaccgaatgtacgcaatggaccggtagcgctgaggagctaacgaagagagcacccgttgatcatgcaccagaaacgggagcgcttctgccccagcagccaataatggtcatgtttccggtcgtgaaacaatgccagggaccctgcaagagcgacgggaatcccttactctctgtggtgctgcacctacacgactgtcaatagcatattcactaataatgggcccgaggatgggcctctgaatgggtaggtcgtttactgtatagtcgcagggaggatcggtcgaaccgttgatcatgatttacgggctaccatatatatacgacgtcgcccgcaaaaacgcgaatggggagccctcttccgagcaagctggacttatcactcatatatcatatcgcttgttggaaaccggattttcactcattatcaactcggcagacaacggcagttcactctttcacgtctaactgttagcaacattccctgacaatatattcttcaactctgaaaagaacattatactcgacaacgccagaaccacaattatccgctacaatggtccgtctatctctttctctgatcgcagctgcgctgttgcagactggcctggctgtgccaatcgttgagaaggctcccttcccaaccggaggacatcatcatcaccatcctcaccctacaggaggctacccccatcacaccggctatccccatcattccgggcccccaggatactcaagcaccttctccgccataccttcgcctacagtagccccgatgaagagagagatccatgaggtccgggctcctattggcgatatgcccaagccgcctccgccaccacctcactctcactctcacccaacgcacacttacagtggccctccaccacctccgtcggggagcccctcgggctggcctccccattactctcacacctcgtttcctgctcctactggtagcccaactggctacccaggatggttttaaaatgatacagtcaagactataaagagaagtgggaagacacgacatggatggtaccgacatacaatagatgaggagaacagtcattaatgagacgattacattcatctcagatataatgactcgggtatcaagatgagggaataaaagggggcttaaattgagacggagcacatcttattcttgtacataggtcctttatactttagggcggcattacagtatcatgaatcacatactaggccgggacgggatttgtctagaaccatgacattttagctttatgaacaatatttttcatccttca

SEQ ID NO: 20923 - DNA, 471 bp, Muscodor strobelii
  misc_feature: SGI cDNA ID NO. 567073
  misc_feature: Encodes the peptide sequence at SEQ ID NO 20924
atgaccatctcagacactgttcttacaagttcgactatcgagacaagtaccacacaagagggcacacctatcacctccgtggtcactttgactgccggaggaggaaccgcgaccacggtggtcacaactgtggtggcggtctcctatgcacagccaacaacacaggtagtcactgtgaccgtgggcggaggcagttccggtgaccaggtcagcacgttgacaatgaccgtcgtcgagcccaccggaacaccgccggcggatgcagcatcaaccatcaccaagagcgttgtaggcaccaccgttactgagattgttggtggaaccaccatcacagagacagccacctatgtcgccacgagtactatcatatccgtgtctaccgtaactgtgggcgcaaccggcatcttccgtgcgtcttcaaacaaggcatcaccaccaagagcagtcatggcgcttggacatcggttttag

SEQ ID NO: 20924 - protein, 156 aa, Muscodor strobelii
  misc_feature: SGI Peptide ID NO. 567073
MTISDTVLTSSTIETSTTQEGTPITSVVTLTAGGGTATTVVTTVVAVSYAQPTTQVVTVTVGGGSSGDQVSTLTMTVVEPTGTPPADAASTITKSVVGTTVTEIVGGTTITETATYVATSTIISVSTVTVGATGIFRASSNKASPPRAVMALGHRF

SEQ ID NO: 20925 - DNA, 894 bp, Muscodor strobelii
  misc_feature: SGI cDNA ID NO. 567074
  misc_feature: Elevated expression when VOC is produced
  misc_feature: Encodes the peptide sequence at SEQ ID NO 20926
atgttcaagctgaacgatggttcacaaataccagcggtcggcttagggacatggcaaggtggttttggagcggacgacgccaaagccctcgagcaatctatcgtcgggcgtgccatccacgacagcggcgtgccacgctccgagatcaccgttgttactaaattctggggagaatggcattgcaatccagcagaagccttgcgagtttcgctagagacgatgaagttggactacgtggacgttctactgatgcactggccttgggcaacaggccctgcccctgaacgagaaataaagcgcatcgatgagagcccgacatttgtcgaaacctggaaaatgatggaagacttagttgggccacgttgtagagccatcggcgtcagtaacttcacacagaaaacactggatgagttgatacggtcggccaaaatcgttccggctatcaatcaagtcgaactgcacgcacttaatcccaacttcaagcttgtaccgtattgccaatccaagggcgtccacgtgatgagctggagtacgatgggaggagaacgcaaagtgggaggaaatccgatactcaatcatcagctttttaccgacattgccaaggcgcatgacggctctgctggcgttatttcgctcgcgtgggcagtccaacgtggcatcactgtgataccaaagagtagttcgctaaggcgcatcgaaaacaatatcaggctccctgcgttgactcaagaagagatgaaaacaattgattctgcagaggaagtgatcggacgaattcgcttggccgatagtattgagcctcttcaagtgaaagttgacggcgtcatgactttgcaaggttggtcaaaggtcgattttggctgggaggacaatgagggcaactggctcacgtaa

SEQ ID NO: 20926 - protein, 297 aa, Muscodor strobelii
  misc_feature: SGI Peptide ID NO. 567074
  misc_feature (4)..(254): Pfam Id: PF00248 Pfam Desc: Aldo/keto reductase family
  misc_feature (35)..(254): Pfam Id: PF00248 Pfam Desc: Aldo/keto reductase family
  misc_feature (4)..(31): Pfam Id: PF00248 Pfam Desc: Aldo/keto reductase family
  misc_feature (11)..(297): NCBI GI: 261354158 Blast Desc: GCY [Verticillium albo-atrum VaMs.102]
  misc_feature (1)..(297): NCBI GI: 212539468 Blast Desc: aldo-keto reductase, [Penicillium marneffei ATCC 18224] gi|212539470|ref|XP_002149890.1| aldo-keto reductase, [Penicillium marneffei ATCC 18224] gi|210067188|gb|EEA21280.1|
  misc_feature (32)..(296): NCBI GI: 240274453 Blast Desc: aldo/keto reductase [Ajellomyces capsulatus H143]
  misc_feature (32)..(296): NCBI GI: 225561348 Blast Desc: aldo/keto reductase [Ajellomyces capsulatus G186AR]
  misc_feature (32)..(295): NCBI GI: 154282449 Blast Desc: [Ajellomyces capsulatus NAm1] gi|150410200|gb|EDN05588.1| [Ajellomyces capsulatus NAm1]
  misc_feature (1)..(296): NCBI GI: 238492657 Blast Desc: aldo-keto reductase, [Aspergillus flavus NRRL3357] gi|220696059|gb|EED52401.1| aldo-keto reductase, [Aspergillus flavus NRRL3357]
  misc_feature (2)..(296): NCBI GI: 239612645 Blast Desc: aldehyde reductase [Ajellomyces dermatitidis ER-3]
  misc_feature (32)..(265): NCBI GI: 261191548 Blast Desc: alcohol dehydrogenase [Ajellomyces dermatitidis SLH14081] gi|239589948|gb|EEQ72591.1| alcohol dehydrogenase [Ajellomyces dermatitidis SLH14081]
  misc_feature (2)..(263): NCBI GI: 149242401 Blast Desc: GCY protein [Lodderomyces elongisporus NRRL YB-4239] gi|146450584|gb|EDK44840.1| GCY protein [Lodderomyces elongisporus NRRL YB-4239]
  misc_feature (2)..(261): NCBI GI: 50284921 Blast Desc: CAGL0A02816g [Candida glabrata CBS138] gi|49524190|emb|CAG57781.1| protein product [Candida glabrata]
  misc_feature (3)..(251): SWISSPROT Homolog: EC 1.1.1.21 Aldehyde reductase
  misc_feature: Useful for introducing or modulating the production of volatile compounds
MFKLNDGSQIPAVGLGTWQGGFGADDAKALEQSIVGRAIHDSGVPRSEITVVTKFWGEWHCNPAEALRVSLETMKLDYVDVLLMHWPWATGPAPEREIKRIDESPTFVETWKMMEDLVGPRCRAIGVSNFTQKTLDELIRSAKIVPAINQVELHALNPNFKLVPYCQSKGVHVMSWSTMGGERKVGGNPILNHQLFTDIAKAHDGSAGVISLAWAVQRGITVIPKSSSLRRIENNIRLPALTQEEMKTIDSAEEVIGRIRLADSIEPLQVKVDGVMTLQGWSKVDFGWEDNEGNWLT

SEQ ID NO: 20927 - DNA, 912 bp, Muscodor strobelii
  misc_feature: SGI EST ID NO. CUFF.49107.0
  misc_feature: Variant of the nucleotide sequence at SEQ ID NO 20925
cgacagcggcgtgccacgctccgagatcaccgttgttactaaattctggggagaatggcattgcaatccagcagaagccttgcgagtttcgctagagacgatgaagttggactacgtggacgttctactgatgcactggccttgggcaacaggccctgcccctgaacgagaaataaagcgcatcgatgagagcccgacatttgtcgaaacctggaaaatgatggaagacttagttgggccacgttgtagagccatcggcgtcagtaacttcacacagaaaacactggatgagttgatacggtcggccaaaatcgttccggctatcaatcaagtcgaactgcacgcacttaatcccaacttcaagcttgtaccgtattgccaatccaagggcgtccacgtgatgagctggagtacgatgggaggagaacgcaaagtgggaggaaatccgatactcaatcatcagctttttaccgacattgccaaggcgcatgacggctctgctggcgttatttcgctcgcgtgggcagtccaacgtggcatcactgtgataccaaagagtagttcgctaaggcgcatcgaaaacaatatcaggctccctgcgttgactcaagaagagatgaaaacaattgattctgcagaggaagtgatcggacgaattcgcttggccgatagtattgagcctcttcaagtgaaagttgacggcgtcatgactttgcaaggttggtcaaaggtcgattttggctgggaggacaatgagggcaactggctcacgtaaatcttatgggaaatcatatgtgtttgattgttgaataatcagccaaattacatgcatgaattgtcgagttaagacgttgtgatgatcttcgtgtatgagttaaaaaagagcagcgtaagcaaaacattgcattagtg

SEQ ID NO: 20928 - DNA, 960 bp, Muscodor strobelii
  misc_feature: SGI cDNA ID NO. 567075
  misc_feature: Elevated expression when VOC is produced
  misc_feature: Encodes the peptide sequence at SEQ ID NO 20929
atgagtgaaaaaagtcaatccacaacggaggaagcacctccaaactatgaagatgctgtagcttcatctcgctcacttccacctcgtgcatcatactcctcaagtccccaatccctcacccactgcacaattccacttcaaatgaggatttactaccaatggcgcccttccggcttcaaaactttcttcgtctgcgggcctggtggcgagtccgaccgtctgttcaccgtcaaagtgcacactggctacagcgcttcgccacccttaggaatccgacctggcttgcatctctacaatagtgccaatacttctgtcacagaggacgacctattagctgctgtgggtgacgactctgtcttcggatccatgaccctcaataacgatagtttggtttatattccgcctttaacgtcagcatccggcggagccggcagtacaggcgcgttattcgtcaaggaagtgatgcgggcgcgaactacaccaaacagaggtgtggggtggcgttttgccatcgaggttggtgacagggaaaagatgcggcgggaacgattcgagtggcgcagggtaaataaagagaagggaaacgaaccggatagcgcagatggaaatggagactttgaaaatggaggtttcaaactcttccgtgtggcggaaaattcaacagatcaccacgatgacacagatttaggaggaagtagcagccgacttgcttcatgtgacgaaaaggttggtgacttattggccaagttcacatataaaagcttctggaagagcccaaaacaccctttcgatcttgaaatagtaggcgaaggcgcgaagagcggcttaggtgagcgctggtcactcatggtgcttgtcacggcgttacggctctggttcatgcacgtaaatggtaaaaccaagcgggcgccagttgctgcgacagagaaggtcatgggcaagggaaaggaggtggtgtaa

SEQ ID NO: 20929 - protein, 319 aa, Muscodor strobelii
  misc_feature: SGI Peptide ID NO. 567075
  misc_feature (44)..(314): NCBI GI: 119187887 Blast Desc: CIMG_03991 [Coccidioides immitis RS]
  misc_feature (11)..(302): NCBI GI: 255954427 Blast Desc: Pc21g09270 [Penicillium chrysogenum Wisconsin 54-1255] gi|211589677|emb|CAP95824.1| Pc21g09270 [Penicillium chrysogenum Wisconsin 54-1255]
  misc_feature (48)..(314): NCBI GI: 240108043 Blast Desc: CPC735_003860 [Coccidioides posadasii C735 delta SOWgp]
  misc_feature (58)..(314): NCBI GI: 16944656 Blast Desc: [Neurospora crassa]
  misc_feature (58)..(314): NCBI GI: 164423481 Blast Desc: NCU08495 [Neurospora crassa OR74A] gi|157070111|gb|EAA34188.2| [Neurospora crassa OR74A]
  misc_feature (57)..(314): NCBI GI: 171682592 Blast Desc: protein product [Podospora anserina] gi|170941255|emb|CAP66905.1| protein product [Podospora anserina]
  misc_feature (61)..(314): NCBI GI: 85067651 Blast Desc: NCU07049 [Neurospora crassa OR74A] gi|28921605|gb|EAA30895.1| [Neurospora crassa OR74A]
  misc_feature (21)..(300): NCBI GI: 240106667 Blast Desc: CPC735_014500 [Coccidioides posadasii C735 delta SOWgp]
  misc_feature (21)..(300): NCBI GI: 119174032 Blast Desc: CIMG_08998 [Coccidioides immitis RS]
  misc_feature (13)..(300): NCBI GI: 258572500 Blast Desc: [Uncinocarpus reesii 1704] gi|237905282|gb|EEP79683.1| [Uncinocarpus reesii 1704]
  misc_feature: Useful for introducing or modulating the production of volatile compounds
MSEKSQSTTEEAPPNYEDAVASSRSLPPRASYSSSPQSLTHCTIPLQMRIYYQWRPSGFKTFFVCGPGGESDRLFTVKVHTGYSASPPLGIRPGLHLYNSANTSVTEDDLLAAVGDDSVFGSMTLNNDSLVYIPPLTSASGGAGSTGALFVKEVMRARTTPNRGVGWRFAIEVGDREKMRRERFEWRRVNKEKGNEPDSADGNGDFENGGFKLFRVAENSTDHHDDTDLGGSSSRLASCDEKVGDLLAKFTYKSFWKSPKHPFDLEIVGEGAKSGLGERWSLMVLVTALRLWFMHVNGKTKRAPVAATEKVMGKGKEVV

SEQ ID NO: 20930 - DNA, 2613 bp, Muscodor strobelii
  misc_feature: SGI EST ID NO. CUFF.49115.0
  misc_feature: Variant of the nucleotide sequence at SEQ ID NO 20928
cagtaacataatctccccccatggtcgtctggaacgtatatgtgcctgttgacctgacacaaaacctcaattctcgacatccttgtccgtaagctaaattgtgctaatagatagccatagccagtctagaagttgacaactgtctacctatccgcataagtaaggcgcccggcatgagtgaaaaaagtcaatccacaacggaggaagcacctccaaactatgaagatgctgtagcttcatctcgctcacttccacctcgtgcatcatactcctcaagtccccaatccctcacccactgcacaattccacttcaaatgaggatttactaccaatggcgcccttccggcttcaaaactttcttcgtctgcgggcctggtggcgagtccgaccgtctgttcaccgtcaaagtgcacactggctacagcgcttcgccacccttaggaatccgacctggcttgcatctctacaatagtgccaatacttctgtcacagaggacgacctattagctgctgtgggtgacgactctgtcttcggatccatgaccctcaataacgatagtttggtttatattccgcctttaacgtcagcatccggcggagccggcagtacaggcgcgttattcgtcaaggaagtgatgcgggcgcgaactacaccaaacagaggtgtggggtggcgttttgccatcgaggttggtgacagggaaaagatgcggcgggaacgattcgagtggcgcagggtaaataaagagaagggaaacgaaccggatagcgcagatggaaatggagactttgaaaatggaggtttcaaactcttccgtgtggcggaaaattcaacagatcaccacgatgacacagatttaggaggaagtagcagccgacttgcttcatgtgacgaaaaggttggtgacttattggccaagttcacatataaaagcttctggaagagcccaaaacaccctttcgatcttgaaatagtaggcgaaggcgcgaagagcggcttaggtgagcgctggtcactcatggtgcttgtcacggcgttacggctctggttcatgcacgtaaatggtaaaaccaagcgggcgccagttgctgcgacagagaaggtcatgggcaagggaaaggaggtggtgtaacaatgccatgcggctgcagacgcagaatatggcccgatgagatatgtctcggcaaagttcataggaatcctcaacttttcgtattatgtttgcaccctcgcgatagccgtctacgcacttgaaaaactgcgcaatagcaaagattgctttcatctaacaactacacaaagtatccgacttccagctatcacttatatagagaatcagccgactcagttaattttgactagaataaaatacaccggttcatccactcgacttagtatgggtcctatcatatctgcctgcaccatataaacaaacttccggtagaggtcagcccatgtctagagctccaccccgcctttcttttttccctggcccgaacgtaatatgaagactctcttaattaaaattctcgaagcgtgtcgcctcctcctcatttttttgcgcagtagttgatagtccactgccacaaatcatcttgcttcttctcgtcgtaactttggttgctggactgtatcgctttgcgcccctcgaaatactcgccggaaacgtttgccatgtcatcggcagtggccaatcgagcgagcgacgcacctgactcacttggcttatggatattgggagtgaatgcgattctgagtaggggcgtaataagaggaaatatcttgaaccaagcaaagcgcatgaaacctttatactctcgtgctagccccgagcctggcatgagacccggatcaaatgcgttgacgctgatcccgcgctcagttgccctctctttcaagcgtctgttcagcacatatgtccacatgatgttcgccaacttagtgttggtgtaatgtccagtgccaggtctgttggccattgcaggcggaggatgagcaagctcttcggccgtagtatacgtagcgactggtaagccgctcttctgtgcaggatcgtgaacaccgctggccgtaaccaccactcgagcattgggtgcaagatggggacaaagtagatgaaatagcaatgaatgaccaacatggctgattgcgaaggtggcttcaatgccttctggcgtcaacaccatctggtccggaaattgtagggccgcgttgagtagaagggctcgaatgggagggtaggccttggtaatccattctttcgcgaatgttcgaatcttgtttgaatccgataaatcaagcggtaggaaaatcacattgctttgctgcaaggtctcgttgatcgattcggctgcattttcgcggtcagaccgtgagcagattacgacaagccagtcggaacggctacgagcaatctcgagcgcagcataatagcctagattgatagtaccatcagtgatgattgcagaagatgtatagggcattttgggctcaattccggtcgttacgatatatcgtctacgtacgtcttccttggaattgatttggcacgaaatgtagacatggtaatatcagcctgaaaccgtcaatgtttctacgagcctgctatctta

SEQ ID NO: 20931 - DNA, 933 bp, Muscodor strobelii
  misc_feature: SGI cDNA ID NO. 567076
  misc_feature: Encodes the peptide sequence at SEQ ID NO 20932
atgccctatacatcttctgcaatcatcactgatggtactatcaatctaggctattatgctgcgctcgagattgctcgtagccgttccgactggcttgtcgtaatctgctcacggtctgaccgcgaaaatgcagccgaatcgatcaacgagaccttgcagcaaagcaatgtgattttcctaccgcttgatttatcggattcaaacaagattcgaacattcgcgaaagaatggattaccaaggcctaccctcccattcgagcccttctactcaacgcggccctacaatttccggaccagatggtgttgacgccagaaggcattgaagccaccttcgcaatcagccatgttggtcattcattgctatttcatctactttgtccccatcttgcacccaatgctcgagtggtggttacggccagcggtgttcacgatcctgcacagaagagcggcttaccagtcgctacgtatactacggccgaagagcttgctcatcctccgcctgcaatggccaacagacctggcactggacattacaccaacactaagttggcgaacatcatgtggacatatgtgctgaacagacgcttgaaagagagggcaactgagcgcgggatcagcgtcaacgcatttgatccgggtctcatgccaggctcggggctagcacgagagtataaaggtttcatgcgctttgcttggttcaagatatttcctcttattacgcccctactcagaatcgcattcactcccaatatccataagccaagtgagtcaggtgcgtcgctcgctcgattggccactgccgatgacatggcaaacgtttccggcgagtatttcgaggggcgcaaagcgatacagtccagcaaccaaagttacgacgagaagaagcaagatgatttgtggcagtggactatcaactactgcgcaaaaaaatga

SEQ ID NO: 20932 - protein, 310 aa, Muscodor strobelii
  misc_feature: SGI Peptide ID NO. 567076
  misc_feature (5)..(163): Pfam Id: PF00106 Pfam Desc: short chain dehydrogenase
  misc_feature (1)..(308): NCBI GI: 145228893 Blast Desc: An01g03210 [Aspergillus niger] gi|134054847|emb|CAK43687.1| protein product [Aspergillus niger]
  misc_feature (3)..(308): NCBI GI: 39974903 Blast Desc: MGG_00402 [Magnaporthe grisea 70-15] gi|145018707|gb|EDK02986.1| MGG_00402 [Magnaporthe grisea 70-15]
  misc_feature (6)..(309): NCBI GI: 212539179 Blast Desc: short-chain dehydrogenase, [Penicillium marneffei ATCC 18224] gi|210069487|gb|EEA23578.1| short-chain dehydrogenase, [Penicillium marneffei ATCC 18224]
  misc_feature (1)..(297): NCBI GI: 242760774 Blast Desc: short-chain dehydrogenase, [Talaromyces stipitatus ATCC 10500] gi|218723253|gb|EED22670.1| short-chain dehydrogenase, [Talaromyces stipitatus ATCC 10500]
  misc_feature (102)..(309): NCBI GI: 154313450 Blast Desc: BC1G_05422 [Botryotinia fuckeliana B05.10] gi|150849491|gb|EDN24684.1| BC1G_05422 [Botryotinia fuckeliana B05.10]
  misc_feature (4)..(301): NCBI GI: 15607444 Blast Desc: dehydrogenase/reductase [Mycobacterium tuberculosis H37Rv] gi|15839688|ref|NP_334725.1| short chain dehydrogenase/reductase family oxidoreductase [Mycobacterium BCG
  misc_feature (4)..(301): NCBI GI: 218751933 Blast Desc: dehydrogenase/reductase [Mycobacterium tuberculosis GM 1503]
  misc_feature (4)..(301): NCBI GI: 254230672 Blast Desc: TBCG_00299 [Mycobacterium tuberculosis C] gi|124599731|gb|EAY58741.1| TBCG_00299 [Mycobacterium tuberculosis C]
  misc_feature (6)..(304): NCBI GI: 172054974 Blast Desc: glucose/ribitol short chain dehydrogenase/reductase family protein [Cyanothece sp. ATCC 51142] gi|171701255|gb|ACB54235.1| glucose/ribitol short chain family
  misc_feature (6)..(304): NCBI GI: 126658757 Blast Desc: dehydrogenase/reductase [Cyanothece sp. CCY0110] gi|126620019|gb|EAZ90743.1| dehydrogenase/reductase [Cyanothece sp. CCY0110]
  misc_feature (8)..(301): SWISSPROT Homolog: EC 1.3.1.33 Protochlorophyllide reductase
MPYTSSAIITDGTINLGYYAALEIARSRSDWLVVICSRSDRENAAESINETLQQSNVIFLPLDLSDSNKIRTFAKEWITKAYPPIRALLLNAALQFPDQMVLTPEGIEATFAISHVGHSLLFHLLCPHLAPNARVVVTASGVHDPAQKSGLPVATYTTAEELAHPPPAMANRPGTGHYTNTKLANIMWTYVLNRRLKERATERGISVNAFDPGLMPGSGLAREYKGFMRFAWFKIFPLITPLLRIAFTPNIHKPSESGASLARLATADDMANVSGEYFEGRKAIQSSNQSYDEKKQDDLWQWTINYCAKK

SEQ ID NO: 20933 - DNA, 2085 bp, Muscodor strobelii
  misc_feature: SGI cDNA ID NO. 567077
  misc_feature: Encodes the peptide sequence at SEQ ID NO 20934
atgggcttcaatatcgccttatttggagtaaccctctttggagggttggctcttggagattcaactttctctcccgccagacctcctgccatcccgcttgctgtcaaaggtccttatcttaacacctggttggctgctggctccaatggtggcaatggtggctatctagctggagagtggccaacattttggcagggacaagtcacagcatggacggggcttatccgcgttgatgggactccatatcaatggatgggtgctgttgggggaggagctgttacgaatgtagaccaaaccgagttctcctacacgtcaacgcagagcacattcattctgaatgctggcggtcttgttgagctgaacgtcacattcctttcgccagtcacgcctacggatttgaagaggcaatctttgccgttttcatatctcgatgtcggtgtcacctcgttggacggcgcaaaccacgatgttcagctctacacggatatctcgggtgaatggggtgcaggcgacgtttctcaaaccatcgaatgggaatacgacacggctgatggacttgcttatcacaagtaccatttgcagacacagacccaactctcagagaccaaccagcagccaaactggggagatgttctatatgccactgctgatatcgacggacttacctaccaaaacggtgctgataccgacgtgcgaggcactttcatcagcgatggtgttcttcccaatacccaggacaccaattatcgagccgtcaataacgcctggccagtattcgggtttgctcatgacctaggcagcgttggtaccagctcggtcaacacgctcttcgccatcggtcttgctcagacagtcaccaactcactgcttggggagggtactgatattcaaaactatgatgcttactggaccaacttctttgagagtgatattgatgcgttgagcttcttctactccgattacagcacggcagttggccttgcgactgagatggacgataaggttcagtcggactccgtggcagctgcgggacaggactatgccaccattacgactctcagcttgcgacaggcattcggtgcccttcaactctctggaaccgaggacacacccatcttgttcctcaaagaaattagttcaaatggagacatgcaaactgtcgatgtgatcttcccaactatccccgtcttgatctacactaaccccgaactcctctctcttatcctcgagcccttgtttctgaaccaggagaacgggcactaccccaagaccaatgccatccatgacctgggcacttacccgaatgctcctggccacccggatggaaacgacgagccccagccacttgaggagtgtgggaacatgataatcatggcactggcttatgcgcagcgcactggcaacaacgattatttgagcaagcattacaagatcctcgaccaatgggcaggttatctcgtcgacgaggcgctgattccagctgatcagatctcgaccgatgatttcgctggctctctggcaaaccagaccgatttggctatcaagggaatcataggtttgcgcgcgatggctgacattgccgacatcactggcaacagtgataacgccacctactacctgaacgtctcggagtcatacctctcccaatggcaagacctcggaatcaacaaagcagccagcccaccgcatacaacactaaactacaataacggcagctcttgggggcttctctacaacttgtacgcagacacacttcttgggtatgccggagatgactatgcattcgtgcctaaggagatctacgatatgcagagtgatttttattccaccgtcgccctcgaatactgcgtaccgctagatactcggcacacttactccaagactgactggtcgatgtgggccgcttccatcgctggcgaagacacacagactattatgattgagaaactggccacttggatcagcgcaacgcatagtaacagacctttcagtgattggattgactgcatctcgggcgaggatcaaggattccgggcacgacctgtagttggcggacacttcgccttcctagccttgaagtcttaa

SEQ ID NO: 20934 - protein, 694 aa, Muscodor strobelii
  misc_feature: SGI Peptide ID NO. 567077
  misc_feature (518)..(692): Pfam Id: PF08760 Pfam Desc: Domain of function (DUF1793)
  misc_feature (21)..(692): NCBI GI: 121704918 Blast Desc: glutaminase GtaA [Aspergillus clavatus NRRL 1] gi|119398868|gb|EAW09296.1| glutaminase GtaA [Aspergillus clavatus NRRL 1]
  misc_feature (10)..(693): NCBI GI: 71000415 Blast Desc: glutaminase GtaA [Aspergillus fumigatus Af293] gi|66852539|gb|EAL92864.1| glutaminase GtaA [Aspergillus fumigatus Af293] gi|159127916|gb|EDP53031.1| glutaminase GtaA
  misc_feature (10)..(693): NCBI GI: 119492985 Blast Desc: glutaminase GtaA [Neosartorya fischeri NRRL 181] gi|119411908|gb|EAW21851.1| glutaminase GtaA [Neosartorya fischeri NRRL 181]
  misc_feature (1)..(692): NCBI GI: 238505548 Blast Desc: glutaminase GtaA [Aspergillus flavus NRRL3357] gi|6456478|dbj|BAA86934.1| glutaminase A [Aspergillus oryzae] gi|220690109|gb|EED46459.1| glutaminase GtaA [Aspergillus flavus
  misc_feature (1)..(692): NCBI GI: 169780334 Blast Desc: [Aspergillus oryzae RIB40] gi|83773371|dbj|BAE63498.1| protein product [Aspergillus oryzae]
  misc_feature (21)..(693): NCBI GI: 255944101 Blast Desc: Pc20g02640 [Penicillium chrysogenum Wisconsin 54-1255] gi|211587553|emb|CAP85593.1| Pc20g02640 [Penicillium chrysogenum Wisconsin 54-1255]
  misc_feature (1)..(692): NCBI GI: 9954449 Blast Desc: glutaminase [Aspergillus oryzae]
  misc_feature (21)..(692): NCBI GI: 6456480 Blast Desc: glutaminase A [Emericella nidulans] gi|259482343|tpe|CBF76735.1| TPA: Glutaminase A [Source:UniProtKB/TrEMBL;Acc:Q9UVX8] [Aspergillus nidulans FGSC
  misc_feature (21)..(692): NCBI GI: 67537278 Blast Desc: AN4809.2 [Aspergillus nidulans FGSC A4] gi|40741189|gb|EAA60379.1| AN4809.2 [Aspergillus nidulans FGSC A4]
  misc_feature (3)..(693): NCBI GI: 145234270 Blast Desc: An02g13750 [Aspergillus niger] gi|134057451|emb|CAK37959.1| protein product [Aspergillus niger]
MGFNIALFGVTLFGGLALGDSTFSPARPPAIPLAVKGPYLNTWLAAGSNGGNGGYLAGEWPTFWQGQVTAWTGLIRVDGTPYQWMGAVGGGAVTNVDQTEFSYTSTQSTFILNAGGLVELNVTFLSPVTPTDLKRQSLPFSYLDVGVTSLDGANHDVQLYTDISGEWGAGDVSQTIEWEYDTADGLAYHKYHLQTQTQLSETNQQPNWGDVLYATADIDGLTYQNGADTDVRGTFISDGVLPNTQDTNYRAVNNAWPVFGFAHDLGSVGTSSVNTLFAIGLAQTVTNSLLGEGTDIQNYDAYWTNFFESDIDALSFFYSDYSTAVGLATEMDDKVQSDSVAAAGQDYATITTLSLRQAFGALQLSGTEDTPILFLKEISSNGDMQTVDVIFPTIPVLIYTNPELLSLILEPLFLNQENGHYPKTNAIHDLGTYPNAPGHPDGNDEPQPLEECGNMIIMALAYAQRTGNNDYLSKHYKILDQWAGYLVDEALIPADQISTDDFAGSLANQTDLAIKGIIGLRAMADIADITGNSDNATYYLNVSESYLSQWQDLGINKAASPPHTTLNYNNGSSWGLLYNLYADTLLGYAGDDYAFVPKEIYDMQSDFYSTVALEYCVPLDTRHTYSKTDWSMWAASIAGEDTQTIMIEKLATWISATHSNRPFSDWIDCISGEDQGFRARPVVGGHFAFLALKS

SEQ ID NO: 20935 - DNA, 1033 bp, Muscodor strobelii
  misc_feature: SGI EST ID NO. CUFF.49136.0
  misc_feature: Variant of the nucleotide sequence at SEQ ID NO 20933
ccaacattttggcagggacaagtcacagcatggacggggcttatccgcgttgatgggactccatatcaatggatgggtgctgttgggggaggagctgttacgaatgtagaccaaaccgagttctcctacacgtcaacgcagagcacattcattctgaatgctggcggtcttgttgagctgaacgtcacattcctttcgccagtcacgcctacggatttgaagaggcaatctttgccgttttcatatctcgatgtcggtgtcacctcgttggacggcgcaaaccacgatgttcagctctacacggatatctcgggtgaatggggtgcaggcgacgtttctcaaaccatcgaatgggaatacgacacggctgatggacttgcttatcacaagtaccatttgcagacacagacccaactctcagagaccaaccagcagccaaactggggagatgttctatatgccactgctgatatcgacggacttacctaccaaaacggtgctgataccgacgtgcgaggcactttcatcagcgatggtgttcttcccaatacccaggacaccaattatcgagccgtcaataacgcctggccagtattcgggtttgctcatgacctaggcagcgttggtaccagctcggtcaacacgctcttcgccatcggtcttgctcagacagtcaccaactcactgcttggggagggtactgatattcaaaactatgatgcttactggaccaacttctttgagagtgatattgatgcgttgagcttcttctactccgattacagcacggcagttggccttgcgactgagatggacgataaggttcagtcggactccgtggcagctgcgggacaggactatgccaccattacgactctcagcttgcgacaggcattcggtgcccttcaactctctggaaccgaggacacacccatcttgttcctcaaagaaattagttcaaatggagacatgcaaactgtcgatgtgatcttcccaactatccccgtcttgatctacactaaccccgaactcc

SEQ ID NO: 20936 - DNA, 606 bp, Muscodor strobelii
  misc_feature: SGI cDNA ID NO. 567078
  misc_feature: Encodes the peptide sequence at SEQ ID NO 20937
atgtttcaactgcggaatggccgcgcctgggcagttgccattttggctttcacacaaatcgcatgtgcagaacctgtgcaataccaaggcagagatgtacgccctgccatcaaccttcctcagcgccgaggagcatctaaatgccactcgtctgccgcaccctctcataccccaacacctacaggtcaccccatcccttcgggtcctgatccggatgaggactgctacagaccgacctatcaagacgaccaagccggcaacgtcgacatcgacagactctgccaatgctcatactacgacccgtcatcgcctgatatcggcggcgttcaatgctggataacatgcgaggcctacagacccgagcaagttctagaaacacagtacacagacagtctgagctcatgcattaacgcttgctacggatcgttcgagaaacgatctctcgacaccggctccgacttgagtgctcgtcaggatggatggttttgccacggcgtgaacttcaagcaaaatgagacttgtcagtggtttggcgatattggaggatacaaatacactccttatgagaccagttgctggactgtcccgggtattggaacgggctaa

SEQ ID NO: 20937 - protein, 201 aa, Muscodor strobelii
  misc_feature: SGI Peptide ID NO. 567078
MFQLRNGRAWAVAILAFTQIACAEPVQYQGRDVRPAINLPQRRGASKCHSSAAPSHTPTPTGHPIPSGPDPDEDCYRPTYQDDQAGNVDIDRLCQCSYYDPSSPDIGGVQCWITCEAYRPEQVLETQYTDSLSSCINACYGSFEKRSLDTGSDLSARQDGWFCHGVNFKQNETCQWFGDIGGYKYTPYETSCWTVPGIGTG

SEQ ID NO: 20938 - DNA, 164 bp, Muscodor strobelii
  misc_feature: SGI EST ID NO. CUFF.49154.0
  misc_feature: Variant of the nucleotide sequence at SEQ ID NO 20936
tttcacacaaatcgcatgtgcagaacctgtgcaataccaaggcagagatgtacgccctgccatcaaccttcctcagcgccgaggagcatctaaatgccactcgtctgccgcaccctctcataccccaacacctacaggtcaccccatcccttcgggtcctgatc

SEQ ID NO: 20939 - DNA, 2412 bp, Muscodor strobelii
  misc_feature: SGI cDNA ID NO. 567079
  misc_feature: Encodes the peptide sequence at SEQ ID NO 20940
atgaatgacaccgaagcaaagattcccgaactgtcaggaaaagatgaggctggttcctcactcttgcaatcaccgcccccagagccgtctcatcccgaagtcagagatggcagatcgaatagaatgtccccgcccgctttgaagtgggtgctgatagttgcgggtctcctggctctcgtagctatactctactctcccttcgtcacgaaaaaggaaatatactgggtgggcaatgagtcaatacccgcttgggatgtctcagctatgggcgacgaatatctgatcggtgtagggaaggcggatattactggacctgttgtagaaatcaatttgatgggttatgccgaccccaatcaggtcggcaccggcctacggcaacgactttactctcgcgcattcattgtagctaatccctcccaacctgaagacagattcatataccttgttcttgacactcagtcaggggatactgccgtgcgttatggcatcttgaacgggcttcaagagcttggacctgagtatgccgattatggtcatcataatcttgccgtaaccgggactcactcgcattcgggccccggcgcgtggttaaactacttactgccgcagatcaccagcaaaggctttagccgccagagctacggagctatcgtgaatggcgctgtgtcatcgatcaagcaggctcacgaaagcctggcaccaggacgtcttagcatcggtacgaccaaagtttttggtgcaaatatcaatcgaagtctttttgcatacctcgcaaaccctgactatgaacgaaggaaatatgaagctagcatttatgatgacggatcagtagagaaggatttgactatgctcagattccgacgatcgtccgatgggagaaatatcggtgttcttacatggttccctgttcacggtacatccgtgctcggcaacaataccttgatatctggggacaataagggcgtggcggcttatcttttcgagaagagtgttgtcggtgatgacagtgccgcagagggatttgttgctggattctcacaagccagtgtcggcgatacaagtccgaacgttctaggtgcttggtgtgaagacgggacaggaaaaatgtgcagctttgagaatagcacgtgtagtgatggtagatctcagatgtgccatgctcggggaccatggttcagtgttgatgatgagggaacctcgtcttgtttcgagatcggaaaacgccagttcgaacccgcgaagaagttgtatgatcagatgaatatgacaccaatcccgttgcgggggaaatgggtcaagtcgttccacacttttcataatatgtcgaactaccagttcaaacttccgaatgggacagaggtcacaacctgtcctgcggcattgggctactctttcgctgctggcacatctgatggaccgggggcattcgatttcactcagcacaacaacgactcagaaacaacatcaccagtatggcgagtcgtgtccggcttgatcaaggcgccaacggaggagcaagtcaggtgtcatactccgaagcccatccttcttgacgtgggtgagatgttcacaccgtaccaatggacgcctaatgttgtcgatgttcaagtcttccgtgtcggacagctcgtcatcattgtcagtccaggtgaggctaccaccatggcgggtcgccggtggaagaacgcggtcgccgaagaggtccacgctcagttcgagagtgagacagatacggctcctgttgtagtacttggcgggccagcaaattcttacacgcactacatcactacagaggaggaatacggcattcagcgatacgaaggggcgagcacgctgtatggtccgcatacattagctgcatatatcaatgtgactctatcctggataccagccctaggttcatcagctgcaatccgaccaccacgtgggcctgagcctccagacaatagcaaccgcagtctcagcttcataccgtcagtgatacgcgacgcaccaccattcttcaaaaagtttggcgatgtcgtgaaggacgtcgaggcttcttaccgcatcggcgatatgatcacagctgagtttgtcggtgcaaatccgcggaacaacctccagctcgggaaatcatacgctgtggttgagcaatttgtagagaatgtcaactacgatgctaagaatacgacatctgaggctatgcagtggcgacctgtaagagacgacagtgattggtatcttgtcttccgatggcgtcgcatcagcgagttgatggcgactagccaggcttcgatttcgtgggagacgaaagatccttgggctgtgccggggttttatcgtttgaaatattatggccgttcgaagagtattgggggcgcgatcacggcatttgagggtgttagttcgacttttaacttattggagtga

SEQ ID NO: 20940 - protein, 803 aa, Muscodor strobelii
  misc_feature: SGI Peptide ID NO. 567079
  misc_feature (92)..(802): Pfam Id: PF04734 Pfam Desc: Neutral/alkaline non-lysosomal ceramidase
  misc_feature (32)..(802): NCBI GI: 116180116 Blast Desc: CHGG_00686 [Chaetomium globosum CBS 148.51] gi|88184983|gb|EAQ92451.1| CHGG_00686 [Chaetomium globosum CBS 148.51]
  misc_feature (50)..(802): NCBI GI: 18376249 Blast Desc: conserved [Neurospora crassa]
  misc_feature (36)..(802): NCBI GI: 154300908 Blast Desc: BC1G_10592 [Botryotinia fuckeliana B05.10] gi|150856340|gb|EDN31532.1| BC1G_10592 [Botryotinia fuckeliana B05.10]
  misc_feature (22)..(802): NCBI GI: 39971471 Blast Desc: MGG_07051 [Magnaporthe grisea 70-15] gi|145019511|gb|EDK03739.1| MGG_07051 [Magnaporthe grisea 70-15]
  misc_feature (46)..(803): NCBI GI: 156043071 Blast Desc: SS1G_10538 [Sclerotinia sclerotiorum 1980] gi|154694926|gb|EDN94664.1| SS1G_10538 [Sclerotinia sclerotiorum 1980]
  misc_feature (112)..(802): NCBI GI: 164426141 Blast Desc: NCU10359 [Neurospora crassa OR74A] gi|157071213|gb|EDO65216.1| NCU10359 [Neurospora crassa OR74A]
  misc_feature (16)..(801): NCBI GI: 171692025 Blast Desc: protein product [Podospora anserina] gi|170945961|emb|CAP72762.1| protein product [Podospora anserina]
  misc_feature (85)..(801): NCBI GI: 154323684 Blast Desc: BC1G_00241 [Botryotinia fuckeliana B05.10] gi|150842470|gb|EDN17663.1| BC1G_00241 [Botryotinia fuckeliana B05.10]
  misc_feature (88)..(801): NCBI GI: 171682402 Blast Desc: protein product [Podospora anserina] gi|170941160|emb|CAP66810.1| protein product [Podospora anserina]
  misc_feature (93)..(801): NCBI GI: 189193177 Blast Desc: neutral ceramidase precursor [Pyrenophora tritici-repentis Pt-1C-BFP] gi|187978491|gb|EDU45117.1| neutral ceramidase precursor [Pyrenophora tritici-repentis Pt-1C-BFP]
  misc_feature (93)..(785): SWISSPROT Homolog: EC 3.5.1.23 Ceramidase
MNDTEAKIPELSGKDEAGSSLLQSPPPEPSHPEVRDGRSNRMSPPALKWVLIVAGLLALVAILYSPFVTKKEIYWVGNESIPAWDVSAMGDEYLIGVGKADITGPVVEINLMGYADPNQVGTGLRQRLYSRAFIVANPSQPEDRFIYLVLDTQSGDTAVRYGILNGLQELGPEYADYGHHNLAVTGTHSHSGPGAWLNYLLPQITSKGFSRQSYGAIVNGAVSSIKQAHESLAPGRLSIGTTKVFGANINRSLFAYLANPDYERRKYEASIYDDGSVEKDLTMLRFRRSSDGRNIGVLTWFPVHGTSVLGNNTLISGDNKGVAAYLFEKSVVGDDSAAEGFVAGFSQASVGDTSPNVLGAWCEDGTGKMCSFENSTCSDGRSQMCHARGPWFSVDDEGTSSCFEIGKRQFEPAKKLYDQMNMTPIPLRGKWVKSFHTFHNMSNYQFKLPNGTEVTTCPAALGYSFAAGTSDGPGAFDFTQHNNDSETTSPVWRVVSGLIKAPTEEQVRCHTPKPILLDVGEMFTPYQWTPNVVDVQVFRVGQLVIIVSPGEATTMAGRRWKNAVAEEVHAQFESETDTAPVVVLGGPANSYTHYITTEEEYGIQRYEGASTLYGPHTLAAYINVTLSWIPALGSSAAIRPPRGPEPPDNSNRSLSFIPSVIRDAPPFFKKFGDVVKDVEASYRIGDMITAEFVGANPRNNLQLGKSYAVVEQFVENVNYDAKNTTSEAMQWRPVRDDSDWYLVFRWRRISELMATSQASISWETKDPWAVPGFYRLKYYGRSKSIGGAITAFEGVSSTFNLLE

SEQ ID NO: 20941 - DNA, 2942 bp, Muscodor strobelii
  misc_feature: SGI EST ID NO. CUFF.49203.1
  misc_feature: Variant of the nucleotide sequence at SEQ ID NO 20939
cgcaaaatcaatgccataactcttgataggtatagtaatgcccaattacagtactcagtcatgatgatttagacactccaatcgagtcttatgtaataaatattcttcaattctacattccagcgagctggctggctccatgcgtgttaattccgcatgatctatcacacccgaacatccggatactcgaggttctttcttcatgatcgtcacttctcgagctgtttgattctctgatgtgtacgacccctattcacaagatgaatgacaccgaagcaaagattcccgaactgtcaggaaaagatgaggctggttcctcactcttgcaatcaccgcccccagagccgtctcatcccgaagtcagagatggcagatcgaatagaatgtccccgcccgctttgaagtgggtgctgatagttgcgggtctcctggctctcgtagctatactctactctcccttcgtcacgaaaaaggaaatatactgggtgggcaatgagtcaatacccgcttgggatgtctcagctatgggcgacgaatatctgatcggtgtagggaaggcggatattactggacctgttgtagaaatcaatttgatgggttatgccgaccccaatcaggtcggcaccggcctacggcaacgactttactctcgcgcattcattgtagctaatccctcccaacctgaagacagattcatataccttgttcttgacactcagtcaggggatactgccgtgcgttatggcatcttgaacgggcttcaagagcttggacctgagtatgccgattatggtcatcataatcttgccgtaaccgggactcactcgcattcgggccccggcgcgtggttaaactacttactgccgcagatcaccagcaaaggctttagccgccagagctacggagctatcgtgaatggcgctgtgtcatcgatcaagcaggctcacgaaagcctggcaccaggacgtcttagcatcggtacgaccaaagtttttggtgcaaatatcaatcgaagtctttttgcatacctcgcaaaccctgactatgaacgaaggaaatatgaagctagcatttatgatgacggatcagtagagaaggatttgactatgctcagattccgacgatcgtccgatgggagaaatatcggtgttcttacatggttccctgttcacggtacatccgtgctcggcaacaataccttgatatctggggacaataagggcgtggcggcttatcttttcgagaagagtgttgtcggtgatgacagtgccgcagagggatttgttgctggattctcacaagccagtgtcggcgatacaagtccgaacgttctaggtgcttggtgtgaagacgggacaggaaaaatgtgcagctttgagaatagcacgtgtagtgatggtagatctcagatgtgccatgctcggggaccatggttcagtgttgatgatgagggaacctcgtcttgtttcgagatcggaaaacgccagttcgaacccgcgaagaagttgtatgatcagatgaatatgacaccaatcccgttgcgggggaaatgggtcaagtcgttccacacttttcataatatgtcgaactaccagttcaaacttccgaatgggacagaggtcacaacctgtcctgcggcattgggctactctttcgctgctggcacatctgatggaccgggggcattcgatttcactcagcacaacaacgactcagaaacaacatcaccagtatggcgagtcgtgtccggcttgatcaaggcgccaacggaggagcaagtcaggtgtcatactccgaagcccatccttcttgacgtgggtgagatgttcacaccgtaccaatggacgcctaatgttgtcgatgttcaagtcttccgtgtcggacagctcgtcatcattgtcagtccaggtgaggctaccaccatggcgggtcgccggtggaagaacgcggtcgccgaagaggtccacgctcagttcgagagtgagacagatacggctcctgttgtagtacttggcgggccagcaaattcttacacgcactacatcactacagaggaggaatacggcattcagcgatacgaaggggcgagcacgctgtatggtccgcatacattagctgcatatatcaatgtgactctatcctggataccagccctaggttcatcagctgcaatccgaccaccacgtgggcctgagcctccagacaatagcaaccgcagtctcagcttcataccgtcagtgatacgcgacgcaccaccattcttcaaaaagtttggcgatgtcgtgaaggacgtcgaggcttcttaccgcatcggcgatatgatcacagctgagtttgtcggtgcaaatccgcggaacaacctccagctcgggaaatcatacgctgtggttgagcaatttgtagagaatgtcaactacgatgctaagaatacgacatctgaggctatgcagtggcgacctgtaagagacgacagtgattggtatcttgtcttccgatggcgtcgcatcagcgagttgatggcgactagccaggcttcgatttcgtgggagacgaaagatccttgggctgtgccggggttttatcgtttgaaatattatggccgttcgaagagtattgggggcgcgatcacggcatttgagggtgttagttcgacttttaacttattggagtgagattgcaatgaggtacaatgtagctggtttttcggcgttttggtcggcaggattgggaaaatgtgtttgaagaatgctgagttggattatggacaataaggcgataccctttggcataaaacttgtgttcctcaagctatgattcgaacaaatgtcgtacagtacttccggaagacttatagactaaatctaggggctgccggtaagaccacacttcaaagagatcgctactcactcgaattatgtaatagagctgttgaacttcatgag

SEQ ID NO: 20942 - DNA, 1614 bp, Muscodor strobelii
  misc_feature: SGI cDNA ID NO. 567080
  misc_feature: Reduced expression when VOC is produced
  misc_feature: Encodes the peptide sequence at SEQ ID NO 20943
atggacttcaacagcttgaaggaccaggtgtccaacctgaccctgtacgatctcaaggcaggagttcgcaaggtccaaaatgctgtcatgaactttaccgagatggaagccaaagttcgagaagcaacgaacaacgagccgtggggtgcgtcctcgactctgatgcaagagatcgcgaacggcaccttcaactatcaaaccctcaacgagatcatgcctttgatctaccgccgcttcaccgagaaagccgctgaagaatggcgccagatctacaagtctctccaattactagagttcctcatcaagcacggctcagaacgcgtgatagatgatgcgcggggccatattgccctgctaaaaatgctacgccaatttcattacatcgaccaaaacggcaaagaccagggtatcaacgttcgaaatcgtgcaaaggaacttgcggatcttttgggcgacgttgatcgcatccgcgccgagcgcaaaaaggcgagatccaacaaagccaaatacactggcgtagaaggaggatcaggttcaatgggtggcttctcctcaactggtagcagcagtagatatggagggtttggaagcgagtcggcaggctatggaggttcctccgctgggtacggtggctactctggcggcgtatatggagacggtggcggctttggtggacaaaccgatgaatggcgggaacctggcggtcgtgccgacaaattcgaggagtacgatgagtacgatgaagggacagagtcatccggcgcaacacgtaccaaacaacctgaaagacccgacacaacagaaagaatgggcgtgaagaagacgacgccatctcagcccccaaagaagaaagaaccggaagtagacctgttttccttcgatgatcctgctccatcggccactgcttcatcgacggcgtcgatcccagcaccgtcaaacagttctggtctagccgctttctcaactttcaataacgatgacgatgacttcgatgactttcaatccgcggcgcctgggccctcggcgcctgcatcttccaacacattctctgtacaatctccgatgatgacatctacaacccagtcgactacccagtttgctgccccgaaacctgtatctgcaccgcagcaagcaagtttgacagatatgatgtcttccctttcgcctcccgcgagctctagcgccactcctgttgcaaattactcatcattcagtgtgccagcaccggctagttcaactgctcttccgaaacagactggatatcaaccatcgggtccgaactactaccaatcggtacaagtctctcaaaccactacgccatccgctacaggctttggttcatccacggcagcacccacgacatcgggtatgtcggcctacaataaacctgccgctccggcaacaactaaggcgagctcagggtccgacccattcgcaaacctttgggccggctccggctctaagaagaacacaccggcagctgggccaaagatgggacagcttgccaaagagaaaacgagtgccaatctttggggtgcccctgcccaatcatccagcagtggccaagccactgggaaaacaggcggtagtgggttggatgacttgcttgggtag

SEQ ID NO: 20943 - protein, 537 aa, Muscodor strobelii
  misc_feature: SGI Peptide ID NO. 567080
  misc_feature (32)..(156): Pfam Id: PF01417 Pfam Desc: ENTH domain
  misc_feature (1)..(537): NCBI GI: 116181346 Blast Desc: CHGG_01301 [Chaetomium globosum CBS 148.51] gi|88185598|gb|EAQ93066.1| CHGG_01301 [Chaetomium globosum CBS 148.51]
  misc_feature (1)..(537): NCBI GI: 145604036 Blast Desc: MGG_10448 [Magnaporthe grisea 70-15] gi|145012134|gb|EDJ96790.1| MGG_10448 [Magnaporthe grisea 70-15]
  misc_feature (1)..(537): NCBI GI: 156054870 Blast Desc: SS1G_06283 [Sclerotinia sclerotiorum 1980] gi|154704063|gb|EDO03802.1| SS1G_06283 [Sclerotinia sclerotiorum 1980]
  misc_feature (1)..(537): NCBI GI: 240111441 Blast Desc: ENTH domain containing protein [Coccidioides posadasii C735 delta SOWgp]
  misc_feature (1)..(522): NCBI GI: 154320532 Blast Desc: BC1G_01738 [Botryotinia fuckeliana B05.10] gi|150853427|gb|EDN28619.1| BC1G_01738 [Botryotinia fuckeliana B05.10]
  misc_feature (1)..(537): NCBI GI: 169594648 Blast Desc: SNOG_00051 [Phaeosphaeria nodorum SN15] gi|111070426|gb|EAT91546.1| SNOG_00051 [Phaeosphaeria nodorum SN15]
  misc_feature (1)..(537): NCBI GI: 225562686 Blast Desc: epsin N-terminal homology-containing protein [Ajellomyces capsulatus G186AR]
  misc_feature (8)..(537): NCBI GI: 119188893 Blast Desc: CIMG_04494 [Coccidioides immitis RS]
  misc_feature (1)..(537): NCBI GI: 238843185 Blast Desc: ENTH domain-containing protein c [Microsporum canis CBS 113480]
  misc_feature (1)..(515): NCBI GI: 239609721 Blast Desc: golgi to endosome transporter [Ajellomyces dermatitidis ER-3]
  misc_feature: Useful for introducing or modulating the production of volatile compounds
MDFNSLKDQVSNLTLYDLKAGVRKVQNAVMNFTEMEAKVREATNNEPWGASSTLMQEIANGTFNYQTLNEIMPLIYRRFTEKAAEEWRQIYKSLQLLEFLIKHGSERVIDDARGHIALLKMLRQFHYIDQNGKDQGINVRNRAKELADLLGDVDRIRAERKKARSNKAKYTGVEGGSGSMGGFSSTGSSSRYGGFGSESAGYGGSSAGYGGYSGGVYGDGGGFGGQTDEWREPGGRADKFEEYDEYDEGTESSGATRTKQPERPDTTERMGVKKTTPSQPPKKKEPEVDLFSFDDPAPSATASSTASIPAPSNSSGLAAFSTFNNDDDDFDDFQSAAPGPSAPASSNTFSVQSPMMTSTTQSTTQFAAPKPVSAPQQASLTDMMSSLSPPASSSATPVANYSSFSVPAPASSTALPKQTGYQPSGPNYYQSVQVSQTTTPSATGFGSSTAAPTTSGMSAYNKPAAPATTKASSGSDPFANLWAGSGSKKNTPAAGPKMGQLAKEKTSANLWGAPAQSSSSGQATGKTGGSGLDDLLG

SEQ ID NO: 20944 - DNA, 2377 bp, Muscodor strobelii
  misc_feature: SGI EST ID NO. CUFF.49170.0
  misc_feature: Variant of the nucleotide sequence at SEQ ID NO 20942
cggggaccgaatctcgaattgacgtgccgacaaggggacggagcccgtctcgatcttacaggccaacatatatctccaattgtgctctctcagttttgcttccgcccaacaccgccgttcgcaattgcagacccatctccgccggcgcgatggacttcaacagcttgaaggaccaggtgtccaacctgaccctgtacgatctcaaggcaggagttcgcaaggtccaaaatgctgtcatgaactttaccgagatggaagccaaagttcgagaagcaacgaacaacgagccgtggggtgcgtcctcgactctgatgcaagagatcgcgaacggcaccttcaactatcaaaccctcaacgagatcatgcctttgatctaccgccgcttcaccgagaaagccgctgaagaatggcgccagatctacaagtctctccaattactagagttcctcatcaagcacggctcagaacgcgtgatagatgatgcgcggggccatattgccctgctaaaaatgctacgccaatttcattacatcgaccaaaacggcaaagaccagggtatcaacgttcgaaatcgtgcaaaggaacttgcggatcttttgggcgacgttgatcgcatccgcgccgagcgcaaaaaggcgagatccaacaaagccaaatacactggcgtagaaggaggatcaggttcaatgggtggcttctcctcaactggtagcagcagtagatatggagggtttggaagcgagtcggcaggctatggaggttcctccgctgggtacggtggctactctggcggcgtatatggagacggtggcggctttggtggacaaaccgatgaatggcgggaacctggcggtcgtgccgacaaattcgaggagtacgatgagtacgatgaagggacagagtcatccggcgcaacacgtaccaaacaacctgaaagacccgacacaacagaaagaatgggcgtgaagaagacgacgccatctcagcccccaaagaagaaagaaccggaagtagacctgttttccttcgatgatcctgctccatcggccactgcttcatcgacggcgtcgatcccagcaccgtcaaacagttctggtctagccgctttctcaactttcaataacgatgacgatgacttcgatgactttcaatccgcggcgcctgggccctcggcgcctgcatcttccaacacattctctgtacaatctccgatgatgacatctacaacccagtcgactacccagtttgctgccccgaaacctgtatctgcaccgcagcaagcaagtttgacagatatgatgtcttccctttcgcctcccgcgagctctagcgccactcctgttgcaaattactcatcattcagtgtgccagcaccggctagttcaactgctcttccgaaacagactggatatcaaccatcgggtccgaactactaccaatcggtacaagtctctcaaaccactacgccatccgctacaggctttggttcatccacggcagcacccacgacatcgggtatgtcggcctacaataaacctgccgctccggcaacaactaaggcgagctcagggtccgacccattcgcaaacctttgggccggctccggctctaagaagaacacaccggcagctgggccaaagatgggacagcttgccaaagagaaaacgagtgccaatctttggggtgcccctgcccaatcatccagcagtggccaagccactgggaaaacaggcggtagtgggttggatgacttgcttgggtagaagagatcagtgacactcataatcgaactactctctctgcttcattgcagtcttaaaggcattaagattaggatatacgcattgcaccagtgtatctgacaatgcacgtagcgtgggctctatggagcgtttatctgctcctgaggctttctcatcagctctttggtctctagatcatctaggcgttaaagcagggaaatccgaattcccctttcgtggcgatttcacatttgcattctcccatgtcgttcgtggggggtatagttgcacatcaggtaatgaatgtatggctgttgaaagtgtctatgccatatagcctattcgaagagatgagtgtacgaaaacttcaaaatctatagaatgatttagctgtagacatagctttaagtcactatggatcctgagatccacataagcttgattggcttgaatccttagtatttcttcaagtatcctggaaaacgttgctgttagcgcatcagatcaacctcgatcgtttcttgaactgattgccattagtgagaaagcatgaagagaagggtattacaaccaagcatgagtactaatattggagtcatgctctcaacggccctgaaacaaggcttgttcccgcg

SEQ ID NO: 20945 - DNA, 714 bp, Muscodor strobelii
  misc_feature: SGI cDNA ID NO. 567081
  misc_feature: Elevated expression when VOC is produced
  misc_feature: Encodes the peptide sequence at SEQ ID NO 20946
atgagcagatccctcttcttcaaagttctgccccgcggtagccttccttctcccctctcttccgccaaaacaccaattgttcgaccttttgtcaacatctccaaaccgaccatctcaacacctcgctacttcgcctcatctcccgccatcatgagtcaaaacggttccactcgcgtcttcttcaaggtcacctggaccggccctggtctgaacggcggcgctgtcggaaaacacacggagaagctcaacttccttctctacgacaaggttgtccccaagactgctgagaacttccgcgccctctgcactggcgagaagggcttcggctacgctggctcttccttccaccgcatcatccccgagttcatgcttcagggcggtgacttcacccgtggcaatggcactggtggcaagtccatctatggtgagaagttcgccgacgagaacttctccctgaagcacactactcctggtctcctgtctatggccaatgctggtcccaacaccaatggttctcagttcttcatcaccaccgtcaagaccccttggctcgacggccgccacgttgtcttcggcgaagttgtcgacggcgctgaccaggccaagggcactgggatggccatcgtcaaggctctggagggtaccggctctcagagcggcgccatcaagtatgatacgcgtcccacgatcgaggaggctggtattgtccagtag

SEQ ID NO: 20946 - protein, 237 aa, Muscodor strobelii
  misc_feature: SGI Peptide ID NO. 567081
  misc_feature (58)..(236): Pfam Id: PF00160 Pfam Desc: Cyclophilin type peptidyl-prolyl cis-trans isomerase/CLD
  misc_feature (1)..(234): NCBI GI: 46107788 Blast Desc: FG00777.1 [Gibberella zeae PH-1]
  misc_feature (1)..(234): NCBI GI: 2118328 Blast Desc: FG00777.1 [Gibberella zeae PH-1]
  misc_feature (10)..(234): NCBI GI: 33357681 Blast Desc: mitochondrial cyclophilin 1 [Botryotinia fuckeliana]
  misc_feature (37)..(236): NCBI GI: 164428556 Blast Desc: peptidyl-prolyl cis-trans isomerase, mitochondrial precursor [Neurospora crassa OR74A] gi|118106|sp|P10255.1|CYPH_NEUCR RecName: Full=Peptidyl-prolyl
  misc_feature (57)..(234): NCBI GI: 642360 Blast Desc: cyclophilin, cytosolic form [Tolypocladium inflatum]
  misc_feature (57)..(234): NCBI GI: 1097098 Blast Desc: cyclophilin, cytosolic form [Tolypocladium inflatum]
  misc_feature (56)..(234): NCBI GI: 154320536 Blast Desc: peptidyl-prolyl cis-trans isomerase [Botryotinia fuckeliana B05.10] gi|33357682|gb|AAQ16573.1| cytosolic cyclophilin 1 [Botryotinia fuckeliana] peptidyl-prolyl cis-trans
  misc_feature (58)..(234): NCBI GI: 261361429 Blast Desc: peptidyl-prolyl cis-trans isomerase [Verticillium albo-atrum VaMs.102]
  misc_feature (57)..(236): NCBI GI: 295927 Blast Desc: cyclophilin (cytosolic form) [Neurospora crassa]
  misc_feature (14)..(234): NCBI GI: 119188877 Blast Desc: CIMG_04486 [Coccidioides immitis RS]
  misc_feature (37)..(236): SWISSPROT Homolog: EC 5.2.1.8 Peptidylprolyl isomerase
  misc_feature: Useful for introducing or modulating the production of volatile compounds
MSRSLFFKVLPRGSLPSPLSSAKTPIVRPFVNISKPTISTPRYFASSPAIMSQNGSTRVFFKVTWTGPGLNGGAVGKHTEKLNFLLYDKVVPKTAENFRALCTGEKGFGYAGSSFHRIIPEFMLQGGDFTRGNGTGGKSIYGEKFADENFSLKHTTPGLLSMANAGPNTNGSQFFITTVKTPWLDGRHVVFGEVVDGADQAKGTGMAIVKALEGTGSQSGAIKYDTRPTIEEAGIVQ

SEQ ID NO: 20947 - DNA, 1113 bp, Muscodor strobelii
  misc_feature: SGI EST ID NO. CUFF.49401.0
  misc_feature: Variant of the nucleotide sequence at SEQ ID NO 20945
gtccttccaacatagctccatcgcttcaaaacttctgtacattactgtttcaattgcatcagttgtctccttttacgttcgtctatatttgtcttataatacttgtatcatcaagatgagcagatccctcttcttcaaagttctgccccgcggtagccttccttctcccctctcttccgccaaaacaccaattgttcgaccttttgtcaacatctccaaaccgaccatctcaacacctcgctacttcgcctcatctcccgccatcatgagtcaaaacggttccactcgcgtcttcttcaaggtcacctggaccggccctggtctgaacggcggcgctgtcggaaaacacacggagaagctcaacttccttctctacgacaaggttgtccccaagactgctgagaacttccgcgccctctgcactggcgagaagggcttcggctacgctggctcttccttccaccgcatcatccccgagttcatgcttcagggcggtgacttcacccgtggcaatggcactggtggcaagtccatctatggtgagaagttcgccgacgagaacttctccctgaagcacactactcctggtctcctgtctatggccaatgctggtcccaacaccaatggttctcagttcttcatcaccaccgtcaagaccccttggctcgacggccgccacgttgtcttcggcgaagttgtcgacggcgctgaccaggccaagggcactgggatggccatcgtcaaggctctggagggtaccggctctcagagcggcgccatcaagtatgatacgcgtcccacgatcgaggaggctggtattgtccagtagagcgcaaggtctacctattatttgtacaacctcaagcttgcacattgtgatgcaaagctctagatcgtgattcacaaatccacgatctcaaaattgcgaggggggaattgtccgtagcaggcgtatttctagatgaatgcaattaacgactgctagccaccaaatcacctgggccttgtcgataaccgcaaagtgaagatctatgaatgcaaagttctgtatgctagtgtgtcttttgccctgcttcttgctagaagtgacaaacaatacaattgttgcaggct

SEQ ID NO: 20948 - DNA, 1113 bp, Muscodor strobelii
  misc_feature: SGI cDNA ID NO. 567082
  misc_feature: Encodes the peptide sequence at SEQ ID NO 20949
atggatgaccaacaggccatcctgctcaagacgcagctctacgaagcttgcaaggctgccgccagcagccaggagatgaagctctttactcaggatgatctcgctaatctcgatgtcgtcccgcccaacgacctcaaaacgctcaccacactgattcaaacgctcacgcgagaacgatacttcgctcccttggccgcacagggtggcctggcatggcgtctccgcaacgaagatgaggttgccaaattcaagcagatctcatcacccgaccagatgttggtctacgagatgattgacgctgttcaccgtgatggtatctggcagcaggaaattaagcggaagctcaacattcaggacaatgccctcagaaaggctatcaaggagctcgagaccaagcgtctcatctctccgatgacacacgtcgacagctcagccaagaagatgtggatccgctacgatctcaagccatctgaacgtgctaccggcggaccctggtttacagacacactgttcgacgaggcccttgtcatctctctgcaaggcgccatcatcaacatctgcaagaaccgcggcagctacctctccaaaggcgatcgcggtgctcgtagtatgagcccggttctccccaagaaaggtgtcatcaacggctcctcgtccgcggctgcgttgaagagcaagaagcgtcccgcagacgccatatcgacagacgacggcgcagtaactagagttagaaaacaggtccgtctaccattgccggctggatacatggagtatcccacatgcggggacatcacccaaatgattctccgagcaggaattactaaaggccaacccctcaacgaagacaacgtccagcacttacttaacattctgatgtgggacaatcgtatcgaagagattcgcatgggcaatcgagtcggctatcgtgcatcgcgcatcaccaagcacaatcctctactcgacgtcatctaccacgatgatgatttttgggaggcacgaggcaacggcctgaccactgtgccttgtgggaagtgccctgtcttcgatctctgcgatgagggaggccccgtatgggcaggaggctgtgaatattacgacaaatggctcgcatag

SEQ ID NO: 20949 - protein, 370 aa, Muscodor strobelii
  misc_feature: SGI Peptide ID NO. 567082
  misc_feature (11)..(370): Pfam Id: PF05158 Pfam Desc: RNA polymerase Rpc34 subunit
  misc_feature (28)..(168): Pfam Id: PF05158 Pfam Desc: RNA polymerase Rpc34 subunit
  misc_feature (336)..(370): Pfam Id: PF05158 Pfam Desc: RNA polymerase Rpc34 subunit
  misc_feature (8)..(370): NCBI GI: 261361428 Blast Desc: DNA-directed RNA polymerase III subunit RPC6 [Verticillium albo-atrum VaMs.102]
  misc_feature (10)..(370): NCBI GI: 46107790 Blast Desc: FG00778.1 [Gibberella zeae PH-1]
  misc_feature (1)..(370): NCBI GI: 39969673 Blast Desc: MGG_10446 [Magnaporthe grisea 70-15] gi|145012136|gb|EDJ96792.1| MGG_10446 [Magnaporthe grisea 70-15]
  misc_feature (1)..(369): NCBI GI: 85112653 Blast Desc: NCU00727 [Neurospora crassa OR74A] gi|28926160|gb|EAA35144.1| conserved [Neurospora crassa OR74A]
  misc_feature (2)..(370): NCBI GI: 171695538 Blast Desc: protein product [Podospora anserina] gi|170948011|emb|CAP60175.1| protein product [Podospora anserina]
  misc_feature (10)..(317): NCBI GI: 256735498 Blast Desc: NECHADRAFT_75405 [Nectria haematococca mpVI 77-13-4]
  misc_feature (8)..(369): NCBI GI: 116181350 Blast Desc: CHGG_01303 [Chaetomium globosum CBS 148.51] gi|88185600|gb|EAQ93068.1| CHGG_01303 [Chaetomium globosum CBS 148.51]
  misc_feature (3)..(369): NCBI GI: 156054874 Blast Desc: SS1G_06285 [Sclerotinia sclerotiorum 1980] gi|154704065|gb|EDO03804.1| SS1G_06285 [Sclerotinia sclerotiorum 1980]
  misc_feature (3)..(369): NCBI GI: 154320538 Blast Desc: BC1G_01741 [Botryotinia fuckeliana B05.10] gi|150853430|gb|EDN28622.1| BC1G_01741 [Botryotinia fuckeliana B05.10]
  misc_feature (5)..(369): NCBI GI: 255955101 Blast Desc: Pc21g12760 [Penicillium chrysogenum Wisconsin 54-1255] gi|211590014|emb|CAP96173.1| Pc21g12760 [Penicillium chrysogenum Wisconsin 54-1255]
MDDQQAILLKTQLYEACKAAASSQEMKLFTQDDLANLDVVPPNDLKTLTTLIQTLTRERYFAPLAAQGGLAWRLRNEDEVAKFKQISSPDQMLVYEMIDAVHRDGIWQQEIKRKLNIQDNALRKAIKELETKRLISPMTHVDSSAKKMWIRYDLKPSERATGGPWFTDTLFDEALVISLQGAIINICKNRGSYLSKGDRGARSMSPVLPKKGVINGSSSAAALKSKKRPADAISTDDGAVTRVRKQVRLPLPAGYMEYPTCGDITQMILRAGITKGQPLNEDNVQHLLNILMWDNRIEEIRMGNRVGYRASRITKHNPLLDVIYHDDDFWEARGNGLTTVPCGKCPVFDLCDEGGPVWAGGCEYYDKWLA

SEQ ID NO: 20950 - DNA, 2001 bp, Muscodor strobelii
  misc_feature: SGI EST ID NO. CUFF.49176.0
  misc_feature: Variant of the nucleotide sequence at SEQ ID NO 20948
tttctaccattggaacctgactgcgtgtaccgcggggcactacagacagaccctggacaaattactcgttgctgtaccacatgtgaaagctggcaggtaactgcaatgatgatctgaggttgtgttcacttcacccatattggtgaacaaaagaatattttatactcgccttactgacattcactcagccgcgaaggtgtattcaagaggaggcttatttacacccatgagctccatgctcatctcgtctttttttcatgaccaaacgatacatagcagatgctagccactgagctgggcattctggcgagatcctaccgtctgccaaccttcgacataacgctcttacatctcatcacgcgcattctgcgccagcaccaagtcgctcgctacacatctccagaggcgcccctgctcaaccgccaagatggatgaccaacaggccatcctgctcaagacgcagctctacgaagcttgcaaggctgccgccagcagccaggagatgaagctctttactcaggatgatctcgctaatctcgatgtcgtcccgcccaacgacctcaaaacgctcaccacactgattcaaacgctcacgcgagaacgatacttcgctcccttggccgcacagggtggcctggcatggcgtctccgcaacgaagatgaggttgccaaattcaagcagatctcatcacccgaccagatgttggtctacgagatgattgacgctgttcaccgtgatggtatctggcagcaggaaattaagcggaagctcaacattcaggacaatgccctcagaaaggctatcaaggagctcgagaccaagcgtctcatctctccgatgacacacgtcgacagctcagccaagaagatgtggatccgctacgatctcaagccatctgaacgtgctaccggcggaccctggtttacagacacactgttcgacgaggcccttgtcatctctctgcaaggcgccatcatcaacatctgcaagaaccgcggcagctacctctccaaaggcgatcgcggtgctcgtagtatgagcccggttctccccaagaaaggtgtcatcaacggctcctcgtccgcggctgcgttgaagagcaagaagcgtcccgcagacgccatatcgacagacgacggcgcagtaactagagttagaaaacaggtccgtctaccattgccggctggatacatggagtatcccacatgcggggacatcacccaaatgattctccgagcaggaattactaaaggccaacccctcaacgaagacaacgtccagcacttacttaacattctgatgtgggacaatcgtatcgaagagattcgcatgggcaatcgagtcggctatcgtgcatcgcgcatcaccaagcacaatcctctactcgacgtcatctaccacgatgatgatttttgggaggcacgaggcaacggcctgaccactgtgccttgtgggaagtgccctgtcttcgatctctgcgatgagggaggccccgtatgggcaggaggctgtgaatattacgacaaatggctcgcatagtagatcggtggagttgcttttactttcctaatgtcgcatgggctcaggcgttcagaggattcgagcatcttctcaagaagaacggggcactggcgctacaggaatccattgttttcgacgtctgagaggcgctcctacgatgccgccgaggaagatatggcaaagcaggactggaatgcaactcggccttcaaaacaggagaaagcttccacagaggctattgaacagctcaataatgccttcacagaggttattacgaactggatcaaagacactcatgttgtttaggcgaatatgaccgaattgcagctcatgctccctgctatccatatcaggaacaaatgatgtactttactagaccaaatcctgtatatagaatctatggattgtgtccacgatgagctgatactacctagttattgagtaagggcacccagtgaagaatatgtaactaagaagcg

SEQ ID NO: 20951 - DNA, 1767 bp, Muscodor strobelii
  misc_feature: SGI cDNA ID NO. 567083
  misc_feature: Reduced expression when VOC is produced
  misc_feature: Encodes the peptide sequence at SEQ ID NO 20952
atggcgtccgccgacgagctcaagaccttgggcaacaaggccatggccgacaagaacttcgacgaagccatagacgccttcacgaaagccatcgagctcacccccaccaaccacgtcttgttcagcaaccgatctgctgcttacgcctccaagaaggactggaccaatgctctcaaggatgccgagaagaccaccgagatcaagcctgactggcctcgaggctggggtcgcaagggtgccgccctccacggttctggcgacctgctcggcgccaacgacgcctacgaggagggcctcaagctcgaccctggcaacgccggcctgaagagctcgcttgcctcggtgcagagggcaatggagcaggaatctggtggccctgccggcgggttcaatgatcccatgggaggtctcggcaacatgttcaaggaccccaatctcctccagaaactcatgaacaaccccaagaccagcggctacttcgccgacccttccttcatcgccaaggttcaggccctccagcagaaccctaccaatacccaagacctgttcagcgatcccagaatgatccaggtcctcggtgtggccatgggtgtcgatatggacatgaagatgcccgaggacatgcctggagctggtgcaacctcctctggcgctaaggaagccgaggaggacgttgagatgccagacctaacgtcagacagcaagaagcccgccccagcccctgagcccgaacccgagcccgaggtcgatgaagaggctttagaaaagaagaaagccaaggaggcggccgacaaggaaaaggctctgggtacggagaattacaaaaagcgcaattttgacgaggctattgcgcattacaccaaggcctgggacctgttcaaggacattacttacttgaacaatcttggagcggcgcagtttgagaagggtgactaccaagcctgtattgacgcctgcacaaaagccgtggaggaaggccgcatgatctacgctgacttcaagatgatcgccaagtcctacgctcgcattggctctgcatatgagaaaatgggcgatctgaccctggccgtcgagaactacaagaagtctctgaccgaacatcgcaccccagataccgtcaacaagctccgtgccgctgagcgcaaagagctcgatgacgccaagaaggcttacgtcgacccggccaaggcagaagaggcacgtgaggagggtaacaagaagttcaaggagcaagatttcccgggtgctgtggaagcctactcagagatggtcaagcgcgctcccgaagatcctcgcggctacagcaatcgcgctgccgccttcgtcaagctcttcgagttccctagcgcgctcgacgattgtaatcttgccatcaagaaggaccctaagttcattcgtgcctatattcgaaaggctcaaatcttcttcggcatgcgcgagtactccaaatgcattgacgcctgcaacgaggccacagaagtggacaacgctcaccatagcggcgcaaacgcgcgcgagatcggacagcagcaagacaaagccctccaagccatgtactcggctcgtgagaacgagaccgaagagcagacgagagagcgtctccaaaaggacccagaaattatgagtatcatgcaagaccccgttatgcagtctattctgcagcaggctcaatcaaaccctgcagctctgcaggagcacatgcgaaaccctgccgtagcaagcaatatccgcaagttgatagctgcaggtgtgattcgcgtcggctga

SEQ ID NO: 20952 - protein, 588 aa, Muscodor strobelii
  misc_feature: SGI Peptide ID NO. 567083
  misc_feature (4)..(37): Pfam Id: PF00515 Pfam Desc: Tetratricopeptide repeat
  misc_feature (431)..(464): Pfam Id: PF00515 Pfam Desc: Tetratricopeptide repeat
  misc_feature (337)..(370): Pfam Id: PF00515 Pfam Desc: Tetratricopeptide repeat
  misc_feature (465)..(498): Pfam Id: PF00515 Pfam Desc: Tetratricopeptide repeat
  misc_feature (4)..(37): Pfam Id: PF07719 Pfam Desc: Tetratricopeptide repeat
  misc_feature (72)..(105): Pfam Id: PF07719 Pfam Desc: Tetratricopeptide repeat
  misc_feature (296)..(324): Pfam Id: PF00515 Pfam Desc: Tetratricopeptide repeat
  misc_feature (72)..(105): Pfam Id: PF00515 Pfam Desc: Tetratricopeptide repeat
  misc_feature (1)..(588): NCBI GI: 171695522 Blast Desc: protein product [Podospora anserina] gi|170948003|emb|CAP60167.1| protein product [Podospora anserina]
  misc_feature (1)..(588): NCBI GI: 116181362 Blast Desc: conserved [Chaetomium globosum CBS 148.51] gi|88185606|gb|EAQ93074.1| conserved [Chaetomium globosum CBS 148.51]
  misc_feature (1)..(588): NCBI GI: 261361410 Blast Desc: heat shock protein STI1 [Verticillium albo-atrum VaMs.102]
  misc_feature (1)..(588): NCBI GI: 85113581 Blast Desc: NCU00714 [Neurospora crassa OR74A] gi|28926334|gb|EAA35312.1| NCU00714 [Neurospora crassa OR74A]
  misc_feature (4)..(588): NCBI GI: 156054330 Blast Desc: conserved [Sclerotinia sclerotiorum 1980] gi|154703793|gb|EDO03532.1| conserved [Sclerotinia sclerotiorum 1980]
  misc_feature (4)..(588): NCBI GI: 154321297 Blast Desc: conserved [Botryotinia fuckeliana B05.10] gi|150852061|gb|EDN27253.1| conserved [Botryotinia fuckeliana B05.10]
  misc_feature (2)..(588): NCBI GI: 119188851 Blast Desc: conserved [Coccidioides immitis RS]
  misc_feature (4)..(588): NCBI GI: 226280827 Blast Desc: heat shock protein STI1 [Paracoccidioides brasiliensis Pb01]
  misc_feature (2)..(588): NCBI GI: 240111458 Blast Desc: TPR Domain containing protein [Coccidioides posadasii C735 delta SOWgp]
  misc_feature (4)..(588): NCBI GI: 225680489 Blast Desc: heat shock protein STI1 [Paracoccidioides brasiliensis Pb03]
  misc_feature: Useful for introducing or modulating the production of volatile compounds
MASADELKTLGNKAMADKNFDEAIDAFTKAIELTPTNHVLFSNRSAAYASKKDWTNALKDAEKTTEIKPDWPRGWGRKGAALHGSGDLLGANDAYEEGLKLDPGNAGLKSSLASVQRAMEQESGGPAGGFNDPMGGLGNMFKDPNLLQKLMNNPKTSGYFADPSFIAKVQALQQNPTNTQDLFSDPRMIQVLGVAMGVDMDMKMPEDMPGAGATSSGAKEAEEDVEMPDLTSDSKKPAPAPEPEPEPEVDEEALEKKKAKEAADKEKALGTENYKKRNFDEAIAHYTKAWDLFKDITYLNNLGAAQFEKGDYQACIDACTKAVEEGRMIYADFKMIAKSYARIGSAYEKMGDLTLAVENYKKSLTEHRTPDTVNKLRAAERKELDDAKKAYVDPAKAEEAREEGNKKFKEQDFPGAVEAYSEMVKRAPEDPRGYSNRAAAFVKLFEFPSALDDCNLAIKKDPKFIRAYIRKAQIFFGMREYSKCIDACNEATEVDNAHHSGANAREIGQQQDKALQAMYSARENETEEQTRERLQKDPEIMSIMQDPVMQSILQQAQSNPAALQEHMRNPAVASNIRKLIAAGVIRVG

SEQ ID NO: 20953 - DNA, 2585 bp, Muscodor strobelii
  misc_feature: SGI EST ID NO. CUFF.49212.0
  misc_feature: Variant of the nucleotide sequence at SEQ ID NO 20951
tggctacctacctagctggacgggctgggcaggcgtggaaagctctcgaatttctgtattctgccacacctggtccgctcctcactcgtcttgcctcgtcttgccttgcgtcgctcctgtcccgtttgtacaaatagatactccctaccacctctcgacgtgcgccagttgagccattccctatcaccattctcacctacaaatttgtccctgccaacccccgccaacgcccttccatctcgcaaacgcatcgtagtctagtcgccctgctgcagccccgcgcccaccacagacaccatggcgtccgccgacgagctcaagaccttgggcaacaaggccatggccgacaagaacttcgacgaagccatagacgccttcacgaaagccatcgagctcacccccaccaaccacgtcttgttcagcaaccgatctgctgcttacgcctccaagaaggactggaccaatgctctcaaggatgccgagaagaccaccgagatcaagcctgactggcctcgaggctggggtcgcaagggtgccgccctccacggttctggcgacctgctcggcgccaacgacgcctacgaggagggcctcaagctcgaccctggcaacgccggcctgaagagctcgcttgcctcggtgcagagggcaatggagcaggaatctggtggccctgccggcgggttcaatgatcccatgggaggtctcggcaacatgttcaaggaccccaatctcctccagaaactcatgaacaaccccaagaccagcggctacttcgccgacccttccttcatcgccaaggttcaggccctccagcagaaccctaccaatacccaagacctgttcagcgatcccagaatgatccaggtcctcggtgtggccatgggtgtcgatatggacatgaagatgcccgaggacatgcctggagctggtgcaacctcctctggcgctaaggaagccgaggaggacgttgagatgccagacctaacgtcagacagcaagaagcccgccccagcccctgagcccgaacccgagcccgaggtcgatgaagaggctttagaaaagaagaaagccaaggaggcggccgacaaggaaaaggctctgggtacggagaattacaaaaagcgcaattttgacgaggctattgcgcattacaccaaggcctgggacctgttcaaggacattacttacttgaacaatcttggagcggcgcagtttgagaagggtgactaccaagcctgtattgacgcctgcacaaaagccgtggaggaaggccgcatgatctacgctgacttcaagatgatcgccaagtcctacgctcgcattggctctgcatatgagaaaatgggcgatctgaccctggccgtcgagaactacaagaagtctctgaccgaacatcgcaccccagataccgtcaacaagctccgtgccgctgagcgcaaagagctcgatgacgccaagaaggcttacgtcgacccggccaaggcagaagaggcacgtgaggagggtaacaagaagttcaaggagcaagatttcccgggtgctgtggaagcctactcagagatggtcaagcgcgctcccgaagatcctcgcggctacagcaatcgcgctgccgccttcgtcaagctcttcgagttccctagcgcgctcgacgattgtaatcttgccatcaagaaggaccctaagttcattcgtgcctatattcgaaaggctcaaatcttcttcggcatgcgcgagtactccaaatgcattgacgcctgcaacgaggccacagaagtggacaacgctcaccatagcggcgcaaacgcgcgcgagatcggacagcagcaagacaaagccctccaagccatgtactcggctcgtgagaacgagaccgaagagcagacgagagagcgtctccaaaaggacccagaaattatgagtatcatgcaagaccccgttatgcagtctattctgcagcaggctcaatcaaaccctgcagctctgcaggagcacatgcgaaaccctgccgtagcaagcaatatccgcaagttgatagctgcaggtgtgattcgcgtcggctgatgataagctacactaagctgcagtgagaattgaaacgaggcgtttactggaaatttggttggtttgcctggcgacctgattttagcatgaggaaaagtcgagaatcgtgacaactgcttaattgcaaagacgaagaaggacattgtatcgccgggtccgctctgagaagttcgcgccagcaacgttgtaaagaatgattgagaggagaatgatatctatgctaccccatgctctgaattgagttcttaattcatatggacagccactcagatgcagccaatgtcccattgaccgaatacctcttatttcagctgagtcaatgcttttcgtaccgaggtgtcgttcatttagacaacgcacatagcctaatcatagctcgatataaccagtgctacattgcatttgatgattgctatgtgctctaacgttaaggaatggagtgaggctatcaaaagtatcatagtctttcattttccatgtttcctaccctgtatgatatctcatgaatagagatggacaat

SEQ ID NO: 20954 - DNA, 1107 bp, Muscodor strobelii
  misc_feature: SGI cDNA ID NO. 567084
  misc_feature: Encodes the peptide sequence at SEQ ID NO 20955
atgagtcaaaccgagaccatcgtccagccgacaaaggccaacatcggcattttcactaatcccaagcacgacctctggatcagtgaaacggaaccatcagtggaaagtgtgcagaatggcgatgctctcaagcctggcgaggtgacaatcgctatcaagagtaccggaatttgcggatcagacgtccatttctggcatgctggctgtatcgggcctatgattgtagagggcgatcatatcctagggcacgaatcggcaggccagatcatcgctgtgcatccatccgtaacacatctcaaggtcggcgatcgcgtagcggttgaaccaaacgtcatctgcaacgcatgcgagccttgcttgacgggccgatataatggttgtgaaaaggtcgaattcctgtccacacctccggtgcctggtctgttgaggagatatgtcaatcatccggctatctggtgtcacaagattggcaacatgtcgtacgagaacggagcaatgttagagcctctgagtgtggccctagcaggcatgcaaagatctggcatcaaactcggtgacccagttcttgtctgcggcgctggccctatcggccttattacactgctctgctgccaagcagctggagcatgtccgctcgtcattaccgacatcgacgagggccgactcaagtttgccaaggagctctgcccgtctgtcatcacgcacaaggtagagcggatgaccgctgaggaagccggcaaggccatcgtgtcatcatttggcgggatcgaaccggcggtgactatggagtgcacaggcgtagaaagcagcatagcagcagccatctgggcatccaagttcggtggcaaggtgtttgtcatcggcgtgggaaagaacgacatgaattacccgttcatgcgatgcagcacgcgggagatcgatctacagttccagtaccggtacagcaacacgtggccgcgagctattcggctcctcgagaacggcgtgatcgacttgacgaagctcgttacgcatcgtttcaagctcgaggattcgctccaggctttcaacacggcggcagatcccaagactggggccataaaagtactgatccaaagcgaggactga

SEQ ID NO: 20955 - protein, 368 aa, Muscodor strobelii
  misc_feature: SGI Peptide ID NO. 567084
  misc_feature (45)..(156): Pfam Id: PF08240 Pfam Desc: Alcohol dehydrogenase GroES-like domain
  misc_feature (184)..(327): Pfam Id: PF00107 Pfam Desc: Zinc-binding dehydrogenase
  misc_feature (9)..(366): NCBI GI: 261358837 Blast Desc: sorbitol dehydrogenase [Verticillium albo-atrum VaMs.102]
  misc_feature (11)..(366): NCBI GI: 85074831 Blast Desc: NCU00643 [Neurospora crassa OR74A] gi|28927596|gb|EAA36547.1| NCU00643 [Neurospora crassa OR74A]
  misc_feature (12)..(368): NCBI GI: 15811375 Blast Desc: AF355628_1 L-arabinitol 4-dehydrogenase [Hypocrea jecorina] gi|37681496|gb|AAP57209.1| L-arabinitol 4-dehydrogenase [Hypocrea jecorina]
  misc_feature (12)..(366): NCBI GI: 256734739 Blast Desc: [Nectria haematococca mpVI 77-13-4]
  misc_feature (12)..(366): NCBI GI: 46107544 Blast Desc: FG00655.1 [Gibberella zeae PH-1]
  misc_feature (4)..(368): NCBI GI: 116182132 Blast Desc: conserved [Chaetomium globosum CBS 148.51] gi|88185991|gb|EAQ93459.1| conserved [Chaetomium globosum CBS 148.51]
  misc_feature (10)..(366): NCBI GI: 39950617 Blast Desc: conserved [Magnaporthe grisea 70-15] gi|145020963|gb|EDK05092.1| conserved [Magnaporthe grisea 70-15]
  misc_feature (8)..(368): NCBI GI: 171695040 Blast Desc: protein product [Podospora anserina] gi|170947762|emb|CAP59925.1| protein product [Podospora anserina]
  misc_feature (6)..(368): NCBI GI: 154291438 Blast Desc: L-arabinitol 4-dehydrogenase [Botryotinia fuckeliana B05.10] gi|150846793|gb|EDN21986.1| L-arabinitol 4-dehydrogenase [Botryotinia fuckeliana B05.10]
  misc_feature (7)..(368): NCBI GI: 156054222 Blast Desc: SS1G_05959 [Sclerotinia sclerotiorum 1980] gi|154703739|gb|EDO03478.1| SS1G_05959 [Sclerotinia sclerotiorum 1980]
  misc_feature (45)..(367): SWISSPROT Homolog: EC 1.1.1.14 L-iditol 2-dehydrogenase
MSQTETIVQPTKANIGIFTNPKHDLWISETEPSVESVQNGDALKPGEVTIAIKSTGICGSDVHFWHAGCIGPMIVEGDHILGHESAGQIIAVHPSVTHLKVGDRVAVEPNVICNACEPCLTGRYNGCEKVEFLSTPPVPGLLRRYVNHPAIWCHKIGNMSYENGAMLEPLSVALAGMQRSGIKLGDPVLVCGAGPIGLITLLCCQAAGACPLVITDIDEGRLKFAKELCPSVITHKVERMTAEEAGKAIVSSFGGIEPAVTMECTGVESSIAAAIWASKFGGKVFVIGVGKNDMNYPFMRCSTREIDLQFQYRYSNTWPRAIRLLENGVIDLTKLVTHRFKLEDSLQAFNTAADPKTGAIKVLIQSED

SEQ ID NO: 20956 - DNA, 1558 bp, Muscodor strobelii
  misc_feature: SGI EST ID NO. CUFF.49196.1
  misc_feature: Variant of the nucleotide sequence at SEQ ID NO 20954
gagacattggacatcgtgaccagttcatgcagatataatgggtaatgcccctcttttaaatattttgttatagtcgcgttgcaagcctcagactgtttccttgtttcattctcctttcatttttctcggcacacgggatctgctacgcgattgcgaaaatgagtcaaaccgagaccatcgtccagccgacaaaggccaacatcggcattttcactaatcccaagcacgacctctggatcagtgaaacggaaccatcagtggaaagtgtgcagaatggcgatgctctcaagcctggcgaggtgacaatcgctatcaagagtaccggaatttgcggatcagacgtccatttctggcatgctggctgtatcgggcctatgattgtagagggcgatcatatcctagggcacgaatcggcaggccagatcatcgctgtgcatccatccgtaacacatctcaaggtcggcgatcgcgtagcggttgaaccaaacgtcatctgcaacgcatgcgagccttgcttgacgggccgatataatggttgtgaaaaggtcgaattcctgtccacacctccggtgcctggtctgttgaggagatatgtcaatcatccggctatctggtgtcacaagattggcaacatgtcgtacgagaacggagcaatgttagagcctctgagtgtggccctagcaggcatgcaaagatctggcatcaaactcggtgacccagttcttgtctgcggcgctggccctatcggccttattacactgctctgctgccaagcagctggagcatgtccgctcgtcattaccgacatcgacgagggccgactcaagtttgccaaggagctctgcccgtctgtcatcacgcacaaggtagagcggatgaccgctgaggaagccggcaaggccatcgtgtcatcatttggcgggatcgaaccggcggtgactatggagtgcacaggcgtagaaagcagcatagcagcagccatctgggcatccaagttcggtggcaaggtgtttgtcatcggcgtgggaaagaacgacatgaattacccgttcatgcgatgcagcacgcgggagatcgatctacagttccagtaccggtacagcaacacgtggccgcgagctattcggctcctcgagaacggcgtgatcgacttgacgaagctcgttacgcatcgtttcaagctcgaggattcgctccaggctttcaacacggcggcagatcccaagactggggccataaaagtactgatccaaagcgaggactgagtacggcgtggagaagaaacaatgtacgaaacgcacacaccaggtaccatgacatgaaatcgcacaaagtagaggctggataccgcccatttgtattgcgaagaggtgcatggagttaggactatgggagctcacggtttgagttcactctcaatgatgtaaggtagggagggtgcttgaatggatggataccttacctatttacctacatcagtttcatagaacagccaaggatctcacatagaataaggaattgcaacgatgagcggcccttagcgaaacgcgaattttcg

SEQ ID NO: 20957 - DNA, 633 bp, Muscodor strobelii
  misc_feature: SGI cDNA ID NO. 567085
  misc_feature: Reduced expression when VOC is produced
  misc_feature: Encodes the peptide sequence at SEQ ID NO 20958
atgtcgtcctctctcgcgcgccccgtgcttcggcaatcccgagcctggagtcgcatggctgctcgccgcttcgagtccaccgcaacgggcaaggctgccgacgcaacgaaggaggctgcgtccaaggccacgtctaccgcttccgagtacgcctccaaggcccaggaggggctctccaaggtctcttcctcggccggcccggccatcgcaggcgccgcccagggtgtcgccaacaccctcaccaagttcggcggccgcaccgccaggctggttgcctttgttgagaagcaaaccccgaccgtcatctactactccaaggtcggcgccgaggtcgtcaagatcgtcttccgtggccagaagatgtccccaccgtctatgcaaaccttccaaagctacttccagaacgcctacaagaatcctagctctcttctccagagcgcctcacagactgcctctaaaaccgcacagcagcccgcttctgtcctatcccggatccagaatatcagccgcgcacagctcgttgctggcggtgttgtcgccgctgagtgcattggtttcttcacagtcggcgagatgatcggccgcttcaagcttgtcggttaccacggcgagactgctgctgctcaccattaa

SEQ ID NO: 20958 - protein, 210 aa, Muscodor strobelii
  misc_feature: SGI Peptide ID NO. 567085
  misc_feature (83)..(203): Pfam Id: PF04718 Pfam Desc: Mitochondrial ATP synthase g subunit
  misc_feature (177)..(203): Pfam Id: PF04718 Pfam Desc: Mitochondrial ATP synthase g subunit
  misc_feature (1)..(210): NCBI GI: 261358836 Blast Desc: ATP synthase subunit g [Verticillium albo-atrum VaMs.102]
  misc_feature (1)..(209): NCBI GI: 156054224 Blast Desc: SS1G_05960 [Sclerotinia sclerotiorum 1980] gi|154703740|gb|EDO03479.1| SS1G_05960 [Sclerotinia sclerotiorum 1980]
  misc_feature (1)..(209): NCBI GI: 154291440 Blast Desc: ATP synthase subunit g [Botryotinia fuckeliana B05.10] gi|150846794|gb|EDN21987.1| ATP synthase subunit g [Botryotinia fuckeliana B05.10]
  misc_feature (1)..(210): NCBI GI: 67517341 Blast Desc: AN0943.2 [Aspergillus nidulans FGSC A4] gi|40746816|gb|EAA65972.1| AN0943.2 [Aspergillus nidulans FGSC A4] gi|259488769|tpe|CBF88479.1| TPA: mitochondrial F1F0-ATP g
  misc_feature (3)..(209): NCBI GI: 46107546 Blast Desc: FG00656.1 [Gibberella zeae PH-1]
  misc_feature (19)..(209): NCBI GI: 39950629 Blast Desc: MGG_01232 [Magnaporthe grisea 70-15] gi|145020962|gb|EDK05091.1| MGG_01232 [Magnaporthe grisea 70-15]
  misc_feature (23)..(210): NCBI GI: 116182126 Blast Desc: CHGG_01691 [Chaetomium globosum CBS 148.51] gi|88185988|gb|EAQ93456.1| CHGG_01691 [Chaetomium globosum CBS 148.51]
  misc_feature (23)..(210): NCBI GI: 171695038 Blast Desc: protein product [Podospora anserina] gi|170947761|emb|CAP59924.1| protein product [Podospora anserina]
  misc_feature (1)..(210): NCBI GI: 70996478 Blast Desc: mitochondrial F1F0-ATP synthase g subunit [Aspergillus fumigatus Af293] gi|66850629|gb|EAL90956.1| mitochondrial F1F0-ATP synthase g subunit, [Aspergillus fumigatus Af293] g
  misc_feature (1)..(210): NCBI GI: 145230393 Blast Desc: An01g10880 [Aspergillus niger] gi|134055622|emb|CAK37268.1| protein product [Aspergillus niger]
  misc_feature: Useful for introducing or modulating the production of volatile compounds
MSSSLARPVLRQSRAWSRMAARRFESTATGKAADATKEAASKATSTASEYASKAQEGLSKVSSSAGPAIAGAAQGVANTLTKFGGRTARLVAFVEKQTPTVIYYSKVGAEVVKIVFRGQKMSPPSMQTFQSYFQNAYKNPSSLLQSASQTASKTAQQPASVLSRIQNISRAQLVAGGVVAAECIGFFTVGEMIGRFKLVGYHGETAAAHH

SEQ ID NO: 20959 - DNA, 1984 bp, Muscodor strobelii
  misc_feature: SGI EST ID NO. CUFF.49249.0
  misc_feature: Variant of the nucleotide sequence at SEQ ID NO 20957
ctcaggtgtcggatcgggtttttccgcttaggaggccgtgtgggagtggctccttccagtgagtgcccttttgagtgtttttttctgagtgagagacggcagacagacagctaatcagcagcccgacgacgacgctcacacggacaccaacatcgacgacctcacctcttcccctccttctccctcgccgccgtccatctaatcgcacacccgccaactccccgcccgtcacgccatgtcgtcctctctcgcgcgccccgtgcttcggcaatcccgagcctggagtcgcatggctgctcgccgcttcgagtccaccgcaacgggcaaggctgccgacgcaacgaaggaggctgcgtccaaggccacgtctaccgcttccgagtacgcctccaaggcccaggaggggctctccaaggtctcttcctcggccggcccggccatcgcaggcgccgcccagggtgtcgccaacaccctcaccaagttcggcggccgcaccgccaggctggttgcctttgttgagagtacgtccactccatctacgtctatctacgtctatgcacggtgctgtgggttggacactgcgcacgggacatccagtgtctctgtgggatatagctagatataatggaatatgatacgcgaaaggtcgaggcataggctgactgggaatatgacaatagagcaaaccccgaccgtcatctactactccaaggtcggcgccgaggtcgtcaagatcgtcttccgtggccagaagatgtccccaccgtctatgcaaaccttccaaagctacttccagaacgcctacaagaatcctagctctcttctccagagcgcctcacagactgcctctaaaaccgcacagcagcccgcttctgtcctatcccggatccagaatatcagccgcgcacagctcgttgctggcggtgttgtcgccgctgagtgcattggtttcttcacagtcggcgagatgatcggccgcttcaagcttgtcggttaccacggcgagactgctgctgctcaccattaaagttgtaacccggatatgacggaatggcagacaataggcgccttgtggagatgcgccggggcgcgcaacttatagacaaaactgaggcgatagcccttttgatgggaaactaatagatcacgccacgaagcaacgcaggaacttatagacgcgggccctgatgaggcaacgcgaacagggcaaaacgcaactgtacgcggggctttgcatgccggcgtctcggccgtccactcgtcagaggggaggatatagtggcaaggtgtttctgggtttggaaaacgacaatctttccgcccttgtacagttactcgcctaccgagcgcctcttctgatagaccgcgttgtttgttctcttttcttttgttagaatactgtacacttacctacacatcatcatcgtcgtcatccattgcacatgcggggcggtacatttgttcacggaataaagtgaatacttagattttgacacattgatgatcccgtgataggtagtacatgtactgtagtcagtggccacatggccgccaattctggtttcgtcttctttctggatcgggcatcgtccgtgtggcctgatgcaaccctgcatgcacatggcaactatcccgtcaaccaacatacatgaatatccgaatccaggattgtccttctacctttcaccaacttcctcgagcactacatggtttctgcgaccaaaagctgcggaattccactgaccgtgggggccaaaatgtccatttgtttataggttcgactcatgccgccaccgctaccacgcacattactgctctgaacgttctgcttggacacgcaatgctgcacgtcgaaagtgcaaattcaaagtgcataacacctgtacaatacgaaggcgacgccaactcgcctgtggcgtctgtccgctaacaacagcacaaaaggtccattcttaagtcctcatccgatctgaccaggtcgtga

SEQ ID NO: 20960 - DNA, 1053 bp, Muscodor strobelii
  misc_feature: SGI cDNA ID NO. 567086
  misc_feature: Encodes the peptide sequence at SEQ ID NO 20961
atggatcaccatcataccaacgggtacgccactggcggcggcccgtctccccactatagccctgcagtaaatcttcagccacgagaagacatgcagcgggaattccagagacgggaagacatccatcgtgagcaaatgcgtttccgaccacaaggtctcgaagagtatgagaaagctctagtcgatgagaatggaaggaagtatagtactgcgtttgggaagagatacatgctcccgtgtgaccttcaagagaacgatagattagacatctttcacaaatatttcctggtcacacgacaagccgagcctacgcctactgctgggctgtatctcggcccagttcctgagcatccaaggatcctggatttgggctgtggtactggaatctgggctatcgacgtggccgaacgcttgggcttggacggaaattaccacattgagggatgggatttaaatcttatccaacctgaaaagattccactaggtatctacttcagcaggcgtgatatggaagaaccctggacgggtgtgccgacaaattttttcgacctcgttcatctgcgcatgctcaacggtagtgtcatgaattgggaaaggctctatcgcgaaatttatcttcacttgaaaccgggcgttggaatagtagagcaagtagagatcgattggcgtcctaaatgcgacccagagggcgaggaaggcgagcttcgcacctcaaagcttgctcaatggtcggcacaactgcaccaggcatttcaacttgccaggatgccccttgaaggagacccggacgtcagggaacggttaagaaacctcggttacgttgacattcaacacaaggagacgcgaataccttacaatccttggccgaatcaggaacacgagaaggatatggcgaggtggttcaatctcggattgactcagggcatagatgcattgactctgcgtgctcttaccgaattcctccatattccagaaccagctgttcgtgagctcatcgagcgcgtcaaggtagatatttgcaaacgagaatggcgagcttattgtaccatgtga

SEQ ID NO: 20961 - protein, 350 aa, Muscodor strobelii
  misc_feature: SGI Peptide ID NO. 567086
  misc_feature (63)..(347): NCBI GI: 189196999 Blast Desc: methyltransferase LaeA [Pyrenophora tritici-repentis Pt-1C-BFP] gi|187980785|gb|EDU47411.1| methyltransferase LaeA [Pyrenophora tritici-repentis Pt-1C-BFP]
  misc_feature (55)..(350): NCBI GI: 171695002 Blast Desc: protein product [Podospora anserina] gi|170947743|emb|CAP59906.1| protein product [Podospora anserina]
  misc_feature (57)..(350): NCBI GI: 62130748 Blast Desc: methyltransferase LaeA [Aspergillus parasiticus] gi|62130750|gb|AAX68415.1| methyltransferase LaeA [Aspergillus parasiticus]
  misc_feature (57)..(350): NCBI GI: 62130744 Blast Desc: methyltransferase LaeA [Aspergillus flavus] gi|62130746|gb|AAX68413.1| methyltransferase LaeA [Aspergillus sojae] gi|154127115|dbj|BAF74528.1| methyltransferase LAEA
  misc_feature (57)..(350): NCBI GI: 169770391 Blast Desc: [Aspergillus oryzae RIB40] gi|83767524|dbj|BAE57663.1| protein product [Aspergillus oryzae]
  misc_feature (50)..(350): NCBI GI: 145230820 Blast Desc: An01g12690 [Aspergillus niger] gi|134055797|emb|CAK37319.1| protein product [Aspergillus niger]
  misc_feature (63)..(347): NCBI GI: 242778258 Blast Desc: regulator of secondary metabolism LaeA [Talaromyces stipitatus ATCC 10500] gi|218722821|gb|EED22239.1| regulator of secondary metabolism LaeA [Talaromyces stipitatus ATCC 10500]
  misc_feature (54)..(350): NCBI GI: 212533505 Blast Desc: regulator of secondary metabolism LaeA [Penicillium marneffei ATCC 18224] gi|210072273|gb|EEA26362.1| regulator of secondary metabolism LaeA [Penicillium marneffei ATCC 18224]
  misc_feature (76)..(350): NCBI GI: 238487202 Blast Desc: regulator of secondary metabolism LaeA [Aspergillus flavus NRRL3357] gi|220699718|gb|EED56057.1| regulator of secondary metabolism LaeA [Aspergillus flavus NRRL3357]
  misc_feature (56)..(347): NCBI GI: 37703327 Blast Desc: LaeA [Aspergillus fumigatus]
MDHHHTNGYATGGGPSPHYSPAVNLQPREDMQREFQRREDIHREQMRFRPQGLEEYEKALVDENGRKYSTAFGKRYMLPCDLQENDRLDIFHKYFLVTRQAEPTPTAGLYLGPVPEHPRILDLGCGTGIWAIDVAERLGLDGNYHIEGWDLNLIQPEKIPLGIYFSRRDMEEPWTGVPTNFFDLVHLRMLNGSVMNWERLYREIYLHLKPGVGIVEQVEIDWRPKCDPEGEEGELRTSKLAQWSAQLHQAFQLARMPLEGDPDVRERLRNLGYVDIQHKETRIPYNPWPNQEHEKDMARWFNLGLTQGIDALTLRALTEFLHIPEPAVRELIERVKVDICKREWRAYCTM

SEQ ID NO: 20962 - DNA, 4796 bp, Muscodor strobelii
  misc_feature: SGI EST ID NO. CUFF.49246.1
  misc_feature: Variant of the nucleotide sequence at SEQ ID NO 20960
ttcgatcccgtcgctcgtgccgttcctcgcagcgtcctgacggccggtgctctggattccttgcaagccaggctcgcggctaagccccgttggtgctgccatgtacatcgcggttctggtacctgctgcaccccaaggatcaccaatgcccaccgctgtcgttacaatcctctcccccaccaccccaagactcgaacccaatttccgatcgccctccaacgattcctggactttttttttgttgctctaattcgcaacaaagaaagcttcaactggtccgccaaccctggcaccaacacgcacatgcgcgcaccaactgttagtactatatcagatcgcctgctcacacgccacctcgctccacctagcagctcgcaatagcatcatctaccctggccggacacaagctgtctttttgctggtgaactttataatgcgcccatcgcccccctctgtcgattggcgcacgctgcttctacattgctaatagcttactatctcccactgcttgctcctcgactcgactcgctcacgctttcctctaacttgctccaaactgcccgtaccctcgacctttgctcgcattggaggcattgctccctcattttgggtcgctggaacgccttgcttcgtcctcccggctgctgcgttgccctttctggcttaccggtgcggcttcggcatcttgatctgctgtcctaccagcgtgctagctccgtgttgccctgctggtggatgaaatactatactatatatcagccctctctttagctcatatgtcggatctatgtcgtccgtaatagccatggatcaccatcataccaacgggtacgccactggcggcggcccgtctccccactatagccctgcagtaaatcttcagccacgagaagacatgcagcgggaattccagagacgggaagacatccatcgtgagcaaatgcgtttccgaccacaaggtctcgaagagtatgagaaagctctagtcgatgagaatggaaggaagtatagtactgcgtttgggaagagatacatgctcccgtgtgaccttcaagagaacgatagattagacatctttcacaaatatttcctggtcacacgacaagccgagcctacgcctactgctgggctgtatctcggcccagttcctgagcatccaaggatcctggatttgggctgtggtactggaatctgggctatcgacgtggccgaacgcttgggcttggacggaaattaccacattgagggatgggatttaaatcttatccaacctgaaaagattccactaggtatctacttcagcaggcgtgatatggaagaaccctggacgggtgtgccgacaaattttttcgacctcgttcatctgcgcatgctcaacggtagtgtcatgaattgggaaaggctctatcgcgaaatttatcttcacttgaaaccgggcgttggaatagtagagcaagtagagatcgattggcgtcctaaatgcgacccagagggcgaggaaggcgagcttcgcacctcaaagcttgctcaatggtcggcacaactgcaccaggcatttcaacttgccaggatgccccttgaaggagacccggacgtcagggaacggttaagaaacctcggttacgttgacattcaacacaaggagacgcgaataccttacaatccttggccgaatcaggaacacgagaaggatatggcgaggtggttcaatctcggattgactcagggcatagatgcattgactctgcgtgctcttaccgaattcctccatattccagaaccagctgttcgtgagctcatcgagcgcgtcaaggtagatatttgcaaacgagaatggcgagcttattgtaccatgcatatttggacggctcgaaggccgccactccgaggggcttgaaggctcgtgggtaccccgaatttgcactttactgtaataggtgctccgaacagccattggtcacttaagtgtcttgacgaatctgtatttccctcgaatggatcatctgcgggtctaccgccattccaatcaaactctcctccgcagtcagcattgattaatacctgtgttacacacatgggccactaattacgagatgctgtctgacaacagtcactgcttgacgccctaccaaagattcccatggggttgttctactcctcctcttggatatgccaactgaagttatttggaagcaaaatacagtctagcaaaggtctattccaactacactttttgtttcccttggcgcttttgccacaccgtctcgccgctagaaaggactggaagctgccccaaggacccgtcctctccagctatacttccgagctattaacctgcaaagcaatcaagcagcacccagaactactctaattcatctagatccgttctgatcgtcacctatactagatccactatagcctgtgctctgccaccctactgcttaacgtctgcaacacacccgttcgtccactgaggtggtaacgctatcgccagtagactgagccgccagctttggtctgatccctacgcctgacttacgaacaccttagaaggatatcattacgattgattctccatacacagcctatcgttaaaacgttggtcaagtacgttgtcaaaatgctggcagtactatcatggcttcacctcgacctactttggtgacttcatgagctcgataaaatcgcttcattcttaaaagaccctgggcgaattcaccaaaaagacgtaatgtcattcacgagtacacgtcgtgagctatgcgtggttgaggatcctagctgtccagctactcgggtgcttgtgggggacaatagtattcaggcgatcgaaccggataacaaatgctggcatagctgagccaccttgttcacaaaataacaaacaaagctagggtctgtagcatggtctcgctagtctcaaaagatcctaataatccctttccatttacgtagcaagtatgttgtgccacgctatagtcctgcaggtgtgtgaggattgatcatgttgggacaacgctccttcatcgctccggttttgatcaaccacacttctcatatcactacctcaatgctgtgtaccattcaatcatcgacatttcgctggatacatagtaattacaacaatccaggttccttcctgattcggttcatataccgaactatcaattttcaagcggccgggagaccagctcattttgctcatgcagtattttctgtcattgatcgtctcatatcagctttagaggcctatgtcaccacacgttcggcggccatagggtacgtctgacagatgctactattgctctcgctgacaatatcgctctagcctcaaatccgtgtctacattttctttggggtcacctatcacccgattccactggtcaatccgtaggagtggtcatgtcgcgggagtagctatccggaaatatgcatcacgtcccccgtctagtattggctctttggccggacagtggatttccatatttatttgttctcctattctgcaatctccagcaccgcgcaaagctccacgcggagtcctgtagtggccatgatgaccaggaccagcggcatgacaacttgcatcgtaatggtaaagcagatcatgtggttgtgcatgaagccagccatgtggtttggcatttacaatcacattcctacatgacaatccctcccatagctccggcgaaacgatgcgttgtcatgataatctatcagtccttttcatgcagttggtgtgtctagtcgcattataataggctatgtgcctttcatcttacctagctcgaattccttttcttcaattcatgcagttggtagaactttccaattgttttctcaatcggccaagcgttttccaatcaagactcttcatccgaaaggacatactatacacctcatttactcggcacataagacgaccaatatcataccttgcactccacaattataccactctctcgatcttgttcgatcctacgcttgctagtgttgccagactcagtcacgctatgggagaagcttggaatggctacgcagatggaagcaagagaagcgtcagggaacatcgagataaattcttggcgggttggcttgcttgtagattggctgaacgaccacgactcttgctcctaacatatagtaccccaacatgtcggatgcgacattacgaatgaaggttcggcccgtccaatccttttaccatggtccgactcgcagggcgatatttaccccacgaaccgaactcttgccggactcccccgatgaggacacatgggagaatgtgtttatctacagttctggaaatgatacctaggtgctattggatgggcgccgatttgcttttcgaagaaggatgaagttaggggacttacaacaagcagatgaatagcctgctcaatgaatgagcacaactacctcctactcggctcgcctaacagaaggctgcttacgtacattagaaaataagctgaaatttccaggcgtcagtagcttgtgaattctggaccagagaaacgtaatcttaggacagccgaggcctgtgtttattgatcgatagcttacgatgcgatcttttgaattgtatcatgcatgcacgatgcaggggtccgataaccatgtgtattatgtcgatgagcgaaacagaggacgagatgagtcaacgagggaatacggctcgtcattcatcgtaacacacaaacataaacatacaaacatacaaaactgtttacctgagaatggccaacaaagctatgagttgtcagtcaggctaaagttgaaaaatagaagaggcg

SEQ ID NO: 20963 - DNA, 1173 bp, Muscodor strobelii
  misc_feature: SGI cDNA ID NO. 567087
  misc_feature: Encodes the peptide sequence at SEQ ID NO 20964
atgtcgaataatcaagtcggctcggtctatcagcagatcattaacgatgtgatcacggcctcgcgagttgatttcgaggagggcggtgttgacgacattgttctggaggaacttaagaagggctggcagaagaagttgtcacaacagcagttggcagtgtttccttgggatcccaagcctgagccgattccgactccagcgcctccccctcctgctgcacagcagcccgcctctaactcatctgttcctctcaccgtggcgaacggtaatggatacatgcagccgcagcctgctatggctcaacagcccgtgcagatgcctatggccgtggctcaacatgacctgaagcccgagccacccattaagactgaacctggtcaggatggctcacagatacctcaaggcatcaactctgctcacgcaaattctgctcacgccaatcaggcgcacgctagagccattgcaaatatgcgagcccagtttggtgaacgagcagctgcctccatcggcaagattcaagagcagccgcagaaccagcagcagaggacgcagactgcaatcatgccccagggccattcccagtatcagaaccaccctcagcagtaccaacagaatcctgctggacagcaacaacagcaacgtcctcccatggccaatgctcatcgacctcccaactctcagatggacggcattgaagataatgatacacatgtcggtattgtcatgcgccaagcctcgaatggcgaaagcgtcgagatgggccgtgttcagatcgacaacctacttcatgcccagattgctgcgaatgcaaaagctatggaaggcggcggcttgatgctgcctcttaaacgtgccagcaaaggcaagggcgtccaactcaacatgtcgacagcttcgtccgccccgggtcagttcgatggacctggcgatgacatcaaagatgaagatgactctgacgtagacgaggacgccatcaactcggatctggatgatcctgatgatgtcatcgagaatgatgatgacgacgacgaggccggccagatcatgctctgcatgtatgacaaagtgcagcgtgtcaagaataagtggaagtgtgtacttaaggacggcgttctcaacgtcaacggaaaggattacgtcttccacaaggcaactggtgaatacgaatggtaa

SEQ ID NO: 20964 - protein, 390 aa, Muscodor strobelii
  misc_feature: SGI Peptide ID NO. 567087
  misc_feature (8)..(390): Pfam Id: PF03153 Pfam Desc: Transcription factor IIA, alpha/beta subunit
  misc_feature (304)..(390): Pfam Id: PF03153 Pfam Desc: Transcription factor IIA, alpha/beta subunit
  misc_feature (8)..(128): Pfam Id: PF03153 Pfam Desc: Transcription factor IIA, alpha/beta subunit
  misc_feature (1)..(390): NCBI GI: 116182054 Blast Desc: CHGG_01655 [Chaetomium globosum CBS 148.51] gi|88185952|gb|EAQ93420.1| CHGG_01655 [Chaetomium globosum CBS 148.51]
  misc_feature (1)..(390): NCBI GI: 212533489 Blast Desc: transcription factor TFIIA complex subunit Toa1, [Penicillium marneffei ATCC 18224] gi|210072265|gb|EEA26354.1| transcription factor TFIIA complex subunit Toa1, [Penicillium
  misc_feature (1)..(390): NCBI GI: 67517071 Blast Desc: AN0816.2 [Aspergillus nidulans FGSC A4] gi|40746490|gb|EAA65646.1| AN0816.2 [Aspergillus nidulans FGSC A4] gi|259488901|tpe|CBF88727.1| TPA: transcription factor TFIIA
  misc_feature (1)..(390): NCBI GI: 121701035 Blast Desc: transcription factor TFIIA complex subunit Toa1, [Aspergillus clavatus NRRL 1] gi|119396925|gb|EAW07356.1| transcription factor TFIIA complex subunit Toa1, [Aspergillus 1]
  misc_feature (1)..(390): NCBI GI: 119494970 Blast Desc: transcription factor TFIIA complex subunit Toa1, [Neosartorya fischeri NRRL 181] gi|119412444|gb|EAW22385.1| transcription factor TFIIA complex subunit Toa1, [Neosartorya
  misc_feature (1)..(390): NCBI GI: 242778223 Blast Desc: transcription factor TFIIA complex subunit Toa1, [Talaromyces stipitatus ATCC 10500] gi|218722814|gb|EED22232.1| transcription factor TFIIA complex subunit Toa1, [Talaromyces
  misc_feature (1)..(390): NCBI GI: 240108574 Blast Desc: Transcription factor IIA, alpha/beta subunit family protein [Coccidioides posadasii C735 delta SOWgp]
  misc_feature (1)..(390): NCBI GI: 119186417 Blast Desc: CIMG_03256 [Coccidioides immitis RS]
  misc_feature (225)..(390): NCBI GI: 156053762 Blast Desc: SS1G_05728 [Sclerotinia sclerotiorum 1980] gi|154703509|gb|EDO03248.1| SS1G_05728 [Sclerotinia sclerotiorum 1980]
  misc_feature (1)..(378): NCBI GI: 70996176 Blast Desc: transcription factor TFIIA complex subunit Toa1 [Aspergillus fumigatus Af293] gi|66850478|gb|EAL90805.1| transcription factor TFIIA complex subunit Toa1, [Aspergillus
MSNNQVGSVYQQIINDVITASRVDFEEGGVDDIVLEELKKGWQKKLSQQQLAVFPWDPKPEPIPTPAPPPPAAQQPASNSSVPLTVANGNGYMQPQPAMAQQPVQMPMAVAQHDLKPEPPIKTEPGQDGSQIPQGINSAHANSAHANQAHARAIANMRAQFGERAAASIGKIQEQPQNQQQRTQTAIMPQGHSQYQNHPQQYQQNPAGQQQQQRPPMANAHRPPNSQMDGIEDNDTHVGIVMRQASNGESVEMGRVQIDNLLHAQIAANAKAMEGGGLMLPLKRASKGKGVQLNMSTASSAPGQFDGPGDDIKDEDDSDVDEDAINSDLDDPDDVIENDDDDDEAGQIMLCMYDKVQRVKNKWKCVLKDGVLNVNGKDYVFHKATGEYEW

SEQ ID NO: 20965 - DNA, 2274 bp, Muscodor strobelii
  misc_feature: SGI EST ID NO. CUFF.49253.0
  misc_feature: Variant of the nucleotide sequence at SEQ ID NO 20963
cactctcacagtagcactacaacgcctcagccagagacccccgaaaacacaacgccctggcgaggtcaagaacacatagatttgcaacaactaccagcttgatcataatccgaaggattaatagtggtcgcttcccgcagtttacagaaggcgcgaggagtgggcatttgtttggggtgaattgccgcctggggtggtctacaacttataacctccacagccagcgtgggccatcctcacatcaccgcaccagcaactctacatttgacctacctttctcgccgcctataactactccgttgcaacacagaagttcctggatttaggcgcggaccaacacggaagccgcgctcgtcgcgatagacatacgtagactgctcatcatcccttactagatagttcaccggagcctcgcagacgaccaacacttacccgtcgctttgctcattaactatctgcacgtcggtcatccacggtcgtcttcgccgagatgtcgaataatcaagtcggctcggtctatcagcagatcattaacgatgtgatcacggcctcgcgagttgatttcgaggagggcggtgttgacgacattgttctggaggaacttaagaagggctggcagaagaagttgtcacaacagcagttggcagtgtttccttgggatcccaagcctgagccgattccgactccagcgcctccccctcctgctgcacagcagcccgcctctaactcatctgttcctctcaccgtggcgaacggtaatggatacatgcagccgcagcctgctatggctcaacagcccgtgcagatgcctatggccgtggctcaacatgacctgaagcccgagccacccattaagactgaacctggtcaggatggctcacagatacctcaaggcatcaactctgctcacgcaaattctgctcacgccaatcaggcgcacgctagagccattgcaaatatgcgagcccagtttggtgaacgagcagctgcctccatcggcaagattcaagagcagccgcagaaccagcagcagaggacgcagactgcaatcatgccccagggccattcccagtatcagaaccaccctcagcagtaccaacagaatcctgctggacagcaacaacagcaacgtcctcccatggccaatgctcatcgacctcccaactctcagatggacggcattgaagataatgatacacatgtcggtattgtcatgcgccaagcctcgaatggcgaaagcgtcgagatgggccgtgttcagatcgacaacctacttcatgcccagattgctgcgaatgcaaaagctatggaaggcggcggcttgatgctgcctcttaaacgtgccagcaaaggcaagggcgtccaactcaacatgtcgacagcttcgtccgccccgggtcagttcgatggacctggcgatgacatcaaagatgaagatgactctgacgtagacgaggacgccatcaactcggatctggatgatcctgatgatgtcatcgagaatgatgatgacgacgacgaggccggccagatcatgctctgcatgtatgacaaagtgcagcgtgtcaagaataagtggaagtgtgtacttaaggacggcgttctcaacgtcaacggaaaggattacgtcttccacaaggcaactggtgaatacgaatggtaaatggccgttatgccccggatctgtcacattatgttggttccagtgatgactccgaaagcaacacaacagacccgagcagggcgctcttcgttgcaattgagtgtccactgaattaattacattcaaaacaatccgcgttattgcaagtacgatagacttatgaaacattgagagcatatcaaagctttcactggactttccacgtttcatgaatttcctcgatgcgtttccgcagcaaaggagatagcaacaaattcaaaagagaaaaaaaaccaatgattatacacttccagtcaggaagtagttccggaaccgtctcggtcgcctcattttccctcgttaggagtcagcagatggagttcgagcgcgatgatttagttaagggaaacagactacatcgcacagactgcatcagactgcattgcaccaatttgagggaagatcaagaacagaaatagctggctaaattaggttagtaagctagcatagagaaacgattttacgaaatgagactctttgtgtctttgatgtctgcttgtgatctgagttcgccttggcaataccgtatagtaggtatctagttctgcaagcatgtagatgcctacttggac

SEQ ID NO: 20966 - DNA, 1812 bp, Muscodor strobelii
  misc_feature: SGI cDNA ID NO. 567088
  misc_feature: Encodes the peptide sequence at SEQ ID NO 20967
atggcatcagttgcagtatccacacccctcaagtcccacaagggtctcttctcctcccgtaccgctggcggacgcatgcccctgaccccgtcgcccaggcagcgcaacaacaataccgccgccgtccccgtcaactcttccccctttaccccggagaggctcgccggtacccgtgatgcgtcccgtcctgccaagtccgtctacggggccggaaacctgtcttcccactttgccaagtccacgaacagagcttctcaccgtgattctcccaagtctaacattgctcgtggtgtcgctacgccccgcaaggctctcgagctaggtgtctccgatttcgccctcgtcggcactggcaacaccaagacaccctccagtgtcaagaccaaaaaggctcctctgaggacaaaggtcaccaagaccacattgacttacgctgccgatcgctttattcccaaccgtagcaacagctccgccattgctaatgtcggttccggcaagctggatgtccaggacaagcagcgacctaagactagcactagcgatgcctcgtctgttctttcctcggccacagatgccgccattgcttcgttagagggcctgaccatcaacgacgacgaggccacgacataccaacgcccctcgccaaacaccgttgcctaccaggactctttggccaatgcctgcggcgtgaatctcaacacacgtattcttcagttcaagcctgcgcctcctgagtcgtccaagcccattgaccttcgtcagcaatacaacaggcctctgaagcaggccaacaccagctcggcacagttcagacgtcgcatcgctactgcccctgagcgcgttctggacgcacccggtttgatcgatgactactacctcaacctcctcgactggagctctggtaaccaggtcgctatcggccttgagcgcaacgtctacgtctggtctgcggatgagggctccgtcagctgccttctcgagaccaaccctgatacctatgtcagcagcgttaagtggtctgatgacggtgcgtacgtcggtgtcggtctcggcacgggcgaagtccagatctgggatgtcgccgagggcgccaagatccgcagcatgttcggccatgatactcgcgttggtgtcatgggctggaacaaacatctgctctccactggtgcccgcagtggcctcgtctacaaccacgacgtccgcatcgccgagcacaaggtcgccgagctcgtctctcacacatctgaggtctgtggactggagtggcgatccgacggcgcgcagctcgccactggtggcaacgacaacttggtctctatctgggatgctcgatccctcgctgtgcccaagttcaccaagacaaatcacaaggctgccgtcaaggctctcgcatggtgcccctggaacatgaatctgctcgccacgggtggcggctcgtacgatcgtcacatccacttctggaacaccacctcgggtgctcgtgtcaacagcatcgataccggctctcaggtcaccagccttcgctggagcactagctacaaggagatcgtcagctccagtggcttccccgacaactcgcttagcatctggagctaccctacgctcgtccgcaatgtcgagatccctgcccatgagagccgtgtcttgcacagctgccttagtcccgacggacagatgctggccactgctgctgccgatgagagtttgaagttctggaagatctttgagaagaaagctggctccactgctggtgtcggcgccggtgcctcgtccggcaaggccgagatggccaagcaaatgaccatccgctaa

SEQ ID NO: 20967 - protein, 603 aa, Muscodor strobelii
  misc_feature: SGI Peptide ID NO. 567088
  misc_feature (404)..(442): Pfam Id: PF00400 Pfam Desc: WD domain, G-beta repeat
  misc_feature (535)..(573): Pfam Id: PF00400 Pfam Desc: WD domain, G-beta repeat
  misc_feature (1)..(603): NCBI GI: 261358844 Blast Desc: WD repeat-containing protein slp1 [Verticillium albo-atrum VaMs.102]
  misc_feature (1)..(603): NCBI GI: 116182056 Blast Desc: CHGG_01656 [Chaetomium globosum CBS 148.51] gi|88185953|gb|EAQ93421.1| CHGG_01656 [Chaetomium globosum CBS 148.51]
  misc_feature (1)..(603): NCBI GI: 46107554 Blast Desc: FG00660.1 [Gibberella zeae PH-1]
  misc_feature (1)..(603): NCBI GI: 171695474 Blast Desc: protein product [Podospora anserina] gi|170947979|emb|CAP60143.1| protein product [Podospora anserina]
  misc_feature (3)..(603): NCBI GI: 154303303 Blast Desc: BC1G_09400 [Botryotinia fuckeliana B05.10] gi|150854963|gb|EDN30155.1| BC1G_09400 [Botryotinia fuckeliana B05.10]
  misc_feature (1)..(603): NCBI GI: 85116227 Blast Desc: WD-repeat containing protein slp1 [Neurospora crassa OR74A] gi|28926819|gb|EAA35783.1| WD-repeat containing protein slp1 [Neurospora crassa OR74A]
  misc_feature (3)..(603): NCBI GI: 156053760 Blast Desc: SS1G_05727 [Sclerotinia sclerotiorum 1980] gi|154703508|gb|EDO03247.1| SS1G_05727 [Sclerotinia sclerotiorum 1980]
  misc_feature (1)..(603): NCBI GI: 39950672 Blast Desc: MGG_01236 [Magnaporthe grisea 70-15] gi|145020959|gb|EDK05088.1| MGG_01236 [Magnaporthe grisea 70-15]
  misc_feature (1)..(603): NCBI GI: 261189959 Blast Desc: cell division cycle protein Cdc20 [Ajellomyces dermatitidis SLH14081] gi|239591626|gb|EEQ74207.1| cell division cycle protein Cdc20 [Ajellomyces dermatitidis SLH14081]
  misc_feature (1)..(603): NCBI GI: 225561536 Blast Desc: WD domain-containing protein [Ajellomyces capsulatus G186AR]
MASVAVSTPLKSHKGLFSSRTAGGRMPLTPSPRQRNNNTAAVPVNSSPFTPERLAGTRDASRPAKSVYGAGNLSSHFAKSTNRASHRDSPKSNIARGVATPRKALELGVSDFALVGTGNTKTPSSVKTKKAPLRTKVTKTTLTYAADRFIPNRSNSSAIANVGSGKLDVQDKQRPKTSTSDASSVLSSATDAAIASLEGLTINDDEATTYQRPSPNTVAYQDSLANACGVNLNTRILQFKPAPPESSKPIDLRQQYNRPLKQANTSSAQFRRRIATAPERVLDAPGLIDDYYLNLLDWSSGNQVAIGLERNVYVWSADEGSVSCLLETNPDTYVSSVKWSDDGAYVGVGLGTGEVQIWDVAEGAKIRSMFGHDTRVGVMGWNKHLLSTGARSGLVYNHDVRIAEHKVAELVSHTSEVCGLEWRSDGAQLATGGNDNLVSIWDARSLAVPKFTKTNHKAAVKALAWCPWNMNLLATGGGSYDRHIHFWNTTSGARVNSIDTGSQVTSLRWSTSYKEIVSSSGFPDNSLSIWSYPTLVRNVEIPAHESRVLHSCLSPDGQMLATAAADESLKFWKIFEKKAGSTAGVGAGASSGKAEMAKQMTIR

SEQ ID NO: 20968 - DNA, 2870 bp, Muscodor strobelii
  misc_feature: SGI EST ID NO. CUFF.49398.0
  misc_feature: Variant of the nucleotide sequence at SEQ ID NO 20966
ccacaaccgcaatctctcacgcctcctgctctcgtcatacactccccctctttgctacttgtagctctgagccatcatctcattttccaagcaaacaagccttttgcaagcattccatccaagtctactagatctcatcgctaccgctgccatttgatcgccccgccgacttacggatctcagtcttatgacaaggcactcttcgatttatcgagcacaacaccacacatactaacccagtaacaattccaggaaccattaacttgagtctcttggagctcgttcgatcactcgaagacctcccaacaaaactcacgcttaacccctccatgatactactacgctagagccaagtagacactatggcatcagttgcagtatccacacccctcaagtcccacaagggtctcttctcctcccgtaccgctggcggacgcatgcccctgaccccgtcgcccaggcagcgcaacaacaataccgccgccgtccccgtcaactcttccccctttaccccggagaggctcgccggtacccgtgatgcgtcccgtcctgccaagtccgtctacggggccggaaacctgtcttcccactttgccaagtccacgaacagagcttctcaccgtgattctcccaagtctaacattgctcgtggtgtcgctacgccccgcaaggctctcgagctaggtgtctccgatttcgccctcgtcggcactggcaacaccaagacaccctccagtgtcaagaccaaaaaggctcctctgaggacaaaggtcaccaagaccacattgacttacgctgccgatcgctttattcccaaccgtagcaacagctccgccattgctaatgtcggttccggcaagctggatgtccaggacaagcagcgacctaagactagcactagcgatgcctcgtctgttctttcctcggccacagatgccgccattgcttcgttagagggcctgaccatcaacgacgacgaggccacgacataccaacgcccctcgccaaacaccgttgcctaccaggactctttggccaatgcctgcggcgtgaatctcaacacacgtattcttcagttcaagcctgcgcctcctgagtcgtccaagcccattgaccttcgtcagcaatacaacaggcctctgaagcaggccaacaccagctcggcacagttcagacgtcgcatcgctactgcccctgagcgcgttctggacgcacccggtttgatcgatgactactacctcaacctcctcgactggagctctggtaaccaggtcgctatcggccttgagcgcaacgtctacgtctggtctgcggatgagggctccgtcagctgccttctcgagaccaaccctgatacctatgtcagcagcgttaagtggtctgatgacggtgcgtacgtcggtgtcggtctcggcacgggcgaagtccagatctgggatgtcgccgagggcgccaagatccgcagcatgttcggccatgatactcgcgttggtgtcatgggctggaacaaacatctgctctccactggtgcccgcagtggcctcgtctacaaccacgacgtccgcatcgccgagcacaaggtcgccgagctcgtctctcacacatctgaggtctgtggactggagtggcgatccgacggcgcgcagctcgccactggtggcaacgacaacttggtctctatctgggatgctcgatccctcgctgtgcccaagttcaccaagacaaatcacaaggctgccgtcaaggctctcgcatggtgcccctggaacatgaatctgctcgccacgggtggcggctcgtacgatcgtcacatccacttctggaacaccacctcgggtgctcgtgtcaacagcatcgataccggctctcaggtcaccagccttcgctggagcactagctacaaggagatcgtcagctccagtggcttccccgacaactcgcttagcatctggagctaccctacgctcgtccgcaatgtcgagatccctgcccatgagagccgtgtcttgcacagctgccttagtcccgacggacagatgctggccactgctgctgccgatgagagtttgaagttctggaagatctttgagaagaaagctggctccactgctggtgtcggcgccggtgcctcgtccggcaaggccgagatggccaagcaaatgaccatccgctaagtcactcaccgcctcgaaagtccctcgagggtttaaccatgcacagtaggtatcacattttcattgtagcatgtcttggtaccggcggcttgagttgactttagcgttggtgttggggtttttatgatgtgtacatgatgaataagatcccacacttattgatttggtcatgactgaacgacaatactacgccggcaggagcgcagcaaagcaaatgcttgattgattgggaccattcttgggaatcggtgtcagtgagaggttgtattattatacccgggaatggaggactgtttgtccttcccataattgtctgatttaaggaacggagtttttggtagtcgtcgctggctcaggagctgtgcggcatttagatagtcaacatgtcaacatgatgtgctgaacttcaacacttctacttctttctgtctccattgtgaacaatgaaacgatctcaatttacgactcggactacggtgtatagaacgacaggaagacaggagtcattcgccctaccaggaagaatgatagtctgaggtagtacctcagcatcttccaaggcatattaaccacagggagagtccctaaccagcagctgccattgctgtttttgcacaaccttcgtcatcccaccacattaaacactcagcattcagtgattcatcttctattactcagaaaggaataggaatcccg

SEQ ID NO: 20969 - DNA, 2268 bp, Muscodor strobelii
  misc_feature: SGI cDNA ID NO. 567089
  misc_feature: Reduced expression when VOC is produced
  misc_feature: Encodes the peptide sequence at SEQ ID NO 20970
atggcccagccgtcaactcccgctgccgcctcgcaatccctcttcgggggcccatccgctgctccgcccagtctcccgcattccgcctcgaacctctcggccgccgctgccttcacgcctgcaacctctagcgccccgacgcctgtctcggcagcgtcgtcgggcaacacgttcgtcatgcccaactcgcccatgaagaaccggaccatggtcgacggctaccggcccaaggtcacccgcaccctcggccagcggccggcctgtctcgtcaacgcctcggtcacctactgcggcaacaaccagatctacgccttcggcggcttcgaccagtacaccgacgaggtctacaaccacgtcctcaagctcgacctcgtcagccaccagtggagcctcgtcgacaactacggcgacatccccggcgtccgcatgggccacaccgccaccctgtaccagggcgacaagctgctggtcttcggcggcgagaacgagcaccgcacctacctgtccgacctcatcgtcttcgacctgaagacggcccactggacccagccccaggtcaacggcccagtccccaagggccgggcgcgccactccgccgtcctgcacgaggacaagctgttcatcgtcggcggcatcaccggccacgacaactatgttctcgacgacatctgcttcctcgacttgaagacctacacatggtccaaagcctggcgcttcgtgggcaggtttgatcattcggcctatatctgggctgatcgcgtctgggtctttggcgggctcagcgaagacatggacaaagtgagcgagctctggtggctcgatcttaagggcagtcctgctttcgattcgccacctaacgtcggctcgacatctgaccgacacgctgtcatgagccgagcccacgactccggccgcaccccttacgctatcggctcatctgccgtcgtcggtgcttctgggtacgctgctaactcgcggacggcccaagtcaaccccccttcgttccagatcaaaacatatgcccccatggcacccggcgcagtatcgtctctcaagtttgtgtctggtcccaatgtgccgtcgcaggtccccggcacacacttccacatctattcctcgggcacattgctcgattttgacacgccagccgccacaatcactcccaaagactgctctctgtccgcgctggatctggcagctctgcgatggcagaaattggccgaggggcgggagatcttcaaggccggctaccgctggcactactgtactatgaatgaagacggcacaaaggcctggttgctggggtgcgaaacgagcgacttgggaggttcgaccggcttggaggagtatttgagtgacattatggaggtcgacctgcgccgttatggtttcttggggaataatttcgcctcggaacctcgatcagagcttcatcctccaagctcgcacacgcgagcacaagagcagccatccaagggcctgggcctcgacctggcgcgcctcttcaaccagccacctgaatcaggaagtggaactgactttgtcatcacggctctcgccggcgactacgacgatgacgatataatgtgctccggactcatccggggaggcgagtcgccccaggaccagaattggctctcgcctgacgctcccacgtcatcgcctattcacgtgcacaaactcatcttgcaagcccgttggccacactttgcacgtctgtacaatgctcagatggccgagttccacaccaaaaagatgcacattcccgaaccatacaccgttgtcaaggcattcctctactatctctacactgacagcattcatgctagtgatgggttgacggacctggcggatgttgctgggttattggttatgtctaacatatataacatcccgcacttgcgcttgctgtgcgtaaaccgactctcgaaagaactcgacgttcctcatgcatgcataatctggtactgcgctggtctggccaatgaagaatggttgcgcaagagggcagcgacgttctgcatgacacattggggccgtgttgtccgcacacaaggctttctgcgactgccacgtacagccctagtggaactatcacaagagatcgacatggaaggcagggtcattggcggagaggaactggactatgtggacagctaccgcagtcgcgacgacaattggagcagccgaaaggacagtatcagcagtgagcgtacgcaggcactgccctccgacgtggatgaatccgatggcatggatatcgtttaa

SEQ ID NO: 20970 - protein, 755 aa, Muscodor strobelii
  misc_feature: SGI Peptide ID NO. 567089
  misc_feature (193)..(236): Pfam Id: PF07646 Pfam Desc: Kelch motif
  misc_feature (141)..(188): Pfam Id: PF07646 Pfam Desc: Kelch motif
  misc_feature (502)..(646): Pfam Id: PF00651 Pfam Desc: BTB/POZ domain
  misc_feature (556)..(646): Pfam Id: PF00651 Pfam Desc: BTB/POZ domain
  misc_feature (193)..(235): Pfam Id: PF01344 Pfam Desc: Kelch motif
  misc_feature (142)..(183): Pfam Id: PF01344 Pfam Desc: Kelch motif
  misc_feature (99)..(132): Pfam Id: PF01344 Pfam Desc: Kelch motif
  misc_feature (193)..(235): Pfam Id: PF07646 Pfam Desc: Kelch motif
  misc_feature (1)..(742): NCBI GI: 46107556 Blast Desc: FG00661.1 [Gibberella zeae PH-1]
  misc_feature (3)..(751): NCBI GI: 171695476 Blast Desc: protein product [Podospora anserina] gi|170947980|emb|CAP60144.1| protein product [Podospora anserina]
  misc_feature (48)..(754): NCBI GI: 85116232 Blast Desc: NCU02617 [Neurospora crassa OR74A] gi|28926820|gb|EAA35784.1| NCU02617 [Neurospora crassa OR74A] gi|38567153|emb|CAE76447.1| conserved [Neurospora crassa]
  misc_feature (1)..(745): NCBI GI: 116182058 Blast Desc: conserved [Chaetomium globosum CBS 148.51] gi|88185954|gb|EAQ93422.1| conserved [Chaetomium globosum CBS 148.51]
  misc_feature (2)..(750): NCBI GI: 261358845 Blast Desc: kelch repeat protein [Verticillium albo-atrum VaMs.102]
  misc_feature (1)..(754): NCBI GI: 156053758 Blast Desc: SS1G_05726 [Sclerotinia sclerotiorum 1980] gi|154703507|gb|EDO03246.1| SS1G_05726 [Sclerotinia sclerotiorum 1980]
  misc_feature (1)..(754): NCBI GI: 145613958 Blast Desc: MGG_01237 [Magnaporthe grisea 70-15] gi|145020958|gb|EDK05087.1| MGG_01237 [Magnaporthe grisea 70-15]
  misc_feature (42)..(730): NCBI GI: 226278822 Blast Desc: kelch repeat protein [Paracoccidioides brasiliensis Pb01]
  misc_feature (32)..(717): NCBI GI: 242778234 Blast Desc: Kelch motif domain protein [Talaromyces stipitatus ATCC 10500] gi|218722816|gb|EED22234.1| Kelch motif domain protein [Talaromyces stipitatus ATCC 10500]
  misc_feature (42)..(730): NCBI GI: 226295288 Blast Desc: kelch repeat protein [Paracoccidioides brasiliensis Pb18]
  misc_feature: Useful for introducing or modulating the production of volatile compounds
MAQPSTPAAASQSLFGGPSAAPPSLPHSASNLSAAAAFTPATSSAPTPVSAASSGNTFVMPNSPMKNRTMVDGYRPKVTRTLGQRPACLVNASVTYCGNNQIYAFGGFDQYTDEVYNHVLKLDLVSHQWSLVDNYGDIPGVRMGHTATLYQGDKLLVFGGENEHRTYLSDLIVFDLKTAHWTQPQVNGPVPKGRARHSAVLHEDKLFIVGGITGHDNYVLDDICFLDLKTYTWSKAWRFVGRFDHSAYIWADRVWVFGGLSEDMDKVSELWWLDLKGSPAFDSPPNVGSTSDRHAVMSRAHDSGRTPYAIGSSAVVGASGYAANSRTAQVNPPSFQIKTYAPMAPGAVSSLKFVSGPNVPSQVPGTHFHIYSSGTLLDFDTPAATITPKDCSLSALDLAALRWQKLAEGREIFKAGYRWHYCTMNEDGTKAWLLGCETSDLGGSTGLEEYLSDIMEVDLRRYGFLGNNFASEPRSELHPPSSHTRAQEQPSKGLGLDLARLFNQPPESGSGTDFVITALAGDYDDDDIMCSGLIRGGESPQDQNWLSPDAPTSSPIHVHKLILQARWPHFARLYNAQMAEFHTKKMHIPEPYTVVKAFLYYLYTDSIHASDGLTDLADVAGLLVMSNIYNIPHLRLLCVNRLSKELDVPHACIIWYCAGLANEEWLRKRAATFCMTHWGRVVRTQGFLRLPRTALVELSQEIDMEGRVIGGEELDYVDSYRSRDDNWSSRKDSISSERTQALPSDVDESDGMDIV

SEQ ID NO: 20971 - DNA, 3981 bp, Muscodor strobelii
  misc_feature: SGI EST ID NO. CUFF.49432.0
  misc_feature: Variant of the nucleotide sequence at SEQ ID NO 20969
gcaagctgccttgcaccaccagcccgttgccccatcatccagccgcaagtgcccccattttattacataaagtgggcctacctattctacctacatatgtactttccaacttgtcgagcctgttgctgagcccaccctgtgtgacctgtctcgttacttcccacctaaatgtgtgacatgtctgttgcctgcctgtaacacagctagctaattatcgcaacttagtggcaatctctccctgcacactgcaaagtacagtacaggcttcagcccgccgcgcgacccacataccctacatgtgctgatctcttatcccgactaatgccccccggggaacattgcaaaaagttgcaacatgcttgtatcgtctctgacaggccaattcaatacaccaatccatccgacaatcgtgtgacactctctgccttcagtcctatcaatccttcctgtcgttcgaacaattgagcgctgatccaatctgcctacttgattgatcccgcctgattgcccacggcgccaagcagcgtggagcgtggagcgtgcgagcgtgcggatgctgctggtgatcagtgatcctgctgcttatcgcgatacctctgacggtgctagttccagtccattcatcgccaacccaatccgaatcccgacttcactccctgccagtcgccgttctcgctcctcgagcgcacaacatatcgcatacacctccagtgcacccatcgctgcgacctggtgcccgcccccctctcgcacttgccatgctggcctagtgcccgtcaccgtcaccgtcagcgcgagtttccatcatctgccgtcgttgccatcgtcgtcgtagtcgccgttgtcaaacgcaacgccatggcccagccgtcaactcccgctgccgcctcgcaatccctcttcgggggcccatccgctgctccgcccagtctcccgcattccgcctcgaacctctcggccgccgctgccttcacgcctgcaacctctagcgccccgacgcctgtctcggcagcgtcgtcgggcaacacgttcgtcatgcccaactcgcccatgaagaaccggaccatggtcgacggctaccggcccaaggtcacccgcaccctcggccagcggccggcctgtctcgtcaacgcctcggtcacctactgcggcaacaaccagatctacgccttcggcggcttcgaccagtacaccgacgaggtctacaaccacgtcctcaagctcgacctcgtcagccaccagtggagcctcgtcgacaactacggcgacatccccggcgtccgcatgggccacaccgccaccctgtaccagggcgacaagctgctggtcttcggcggcgagaacgagcaccgcacctacctgtccgacctcatcgtcttcgacctgaagacggcccactggacccagccccaggtcaacggcccagtccccaagggccgggcgcgccactccgccgtcctgcacgaggacaagctgttcatcgtcggcggcatcaccggccacgacaactatgttctcgacgacatctgcttcctcgacttgaagacctacacatggtccaaagcctggcgcttcgtgggcaggtttgatcattcggcctatatctgggctgatcgcgtctgggtctttggcgggctcagcgaagacatggacaaagtgagcgagctctggtggctcgatcttaagggcagtcctgctttcgattcgccacctaacgtcggctcgacatctgaccgacacgctgtcatgagccgagcccacgactccggccgcaccccttacgctatcggctcatctgccgtcgtcggtgcttctgggtacgctgctaactcgcggacggcccaagtcaaccccccttcgttccagatcaaaacatatgcccccatggcacccggcgcagtatcgtctctcaagtttgtgtctggtcccaatgtgccgtcgcaggtccccggcacacacttccacatctattcctcgggcacattgctcgattttgacacgccagccgccacaatcactcccaaagactgctctctgtccgcgctggatctggcagctctgcgatggcagaaattggccgaggggcgggagatcttcaaggccggctaccgctggcactactgtactatgaatgaagacggcacaaaggcctggttgctggggtgcgaaacgagcgacttgggaggttcgaccggcttggaggagtatttgagtgacattatggaggtcgacctgcgccgttatggtttcttggggaataatttcgcctcggaacctcgatcagagcttcatcctccaagctcgcacacgcgagcacaagagcagccatccaagggcctgggcctcgacctggcgcgcctcttcaaccagccacctgaatcaggaagtggaactgactttgtcatcacggctctcgccggcgactacgacgatgacgatataatgtgctccggactcatccggggaggcgagtcgccccaggaccagaattggctctcgcctgacgctcccacgtcatcgcctattcacgtgcacaaactcatcttgcaagcccgttggccacactttgcacgtctgtacaatgctcagatggccgagttccacaccaaaaagatgcacattcccgaaccatacaccgttgtcaaggcattcctctactatctctacactgacagcattcatgctagtgatgggttgacggacctggcggatgttgctgggttattggttatgtctaacatatataacatcccgcacttgcgcttgctgtgcgtaaaccgactctcgaaagaactcgacgttcctcatgcatgcataatctggtactgcgctggtctggccaatgaagaatggttgcgcaagagggcagcgacgttctgcatgacacattggggccgtgttgtccgcacacaaggctttctgcgactgccacgtacagccctagtggaactatcacaagagatcgacatggaaggcagggtcattggcggagaggaactggactatgtggacagctaccgcagtcgcgacgacaattggagcagccgaaaggacagtatcagcagtgagcgtacgcaggcactgccctccgacgtggatgaatccgatggcatggatatcgtttaagcctacgtatcacgcgtggtaccatctccgatggaccaagtgccatgatgtaaagcactcagattggcgttgtactacgcataccttttacgacttgacggttcggtgactacagtctggtcccatggtttcgccgcatgctttgtctgtttttctatcacgaaaggaattacgaatgaatacagggtagataccacgcacgtctaatgattatggtggtacataaagggggggcatcggattgacttctcgctcggtatctggtttttagcacgcatctggtgtttggcgttgagagtaagggacctgagttgcacataaaactagcttcaagtctgaacaagacgtgtagagagtctggttatgatacgaccagaaataaggcggttgccatgatagatattagtattattgaatgaatacgatttgcaaatcagtaatgactaaactaactaaaatgggcagtgattttgttccaaggtatcgtgatcttgcaaggtccgccaaaacgcagtcgcaagtataaggttatgcggaggacgaatgtctttctggagctggaggattattggtacctctcataccaattgatggttcaagaccacaatcttctaacgcacatctccttcaagctaataacatacagcacatacgagagataactccaacgtgccataagctcccctaccctcgctttcgtaatgtgagctcgtcctatattattcaaatccggacgaacctagatccccgtctcagctaatctacctactccaatgcctgtctctatctaccaaccatctcagcgtctcaatctactgtcattagtatgtcacctcgaaatcagtcggatagcat

SEQ ID NO: 20972 - DNA, 2550 bp, Muscodor strobelii
  misc_feature: SGI cDNA ID NO. 567090
  misc_feature: Reduced expression when VOC is produced
  misc_feature: Encodes the peptide sequence at SEQ ID NO 20973
atgaccgctcacgccttgactggctcgactggcaccaacggccctggctgctccagtcgtggcactagcgctcagcagtgtgcccggcccacgcccacgcccacgcccatgcctagtgacagtgcccagcatgccttgtgcgcgtcctcaagtaccagcgctgctgctgcccttgctgctgcttttgcgggcactgctaaaagtggcagtgactgcaccgctgctcaggccggccatccgctcatgcgacccggttccagcacctattccagcaccacgaccggccttacgctcagcacgtcgggtgccaccactgcttcccagtcgaccaaggccagcaaagcgtgcggcgtcaccaagcccaagcccaggcccaggcccaagtccaagtgcccgtccaagaaaagggacactcacccccaaaataagaagcaccaccatcgcggcctgcctctgcctccccatattaattcctctgaagtcaccctctcgctccccagcgccgctatcgctgctgctcctcccacacccgccctatcttcaccctccctcaagtccccttccctctccccgtcgccacagccggtgactcctgtcgatccgaccagtctgaccgaccagctcggccatttgggcatcagcggcgcattcgcactcgacaagcaccgtcgcaccgtcggccacgatctctacatcgaccacgagccctacatccccgacgccctcgacgccatcctcgacaaccacgacaaagaagcgctcgacgacgaccacgcaccagcccagccagctctgttccactcacgagagctcctggatctcctcgactaccacggactcgagcccgctgaacgcgacgctcccggaatcgacgacactcccgagtttgtccagcggcctcgaccaaaagcaaacagccccaagcacacagcgatgaccaccggtcccgccatggactcggccgccggccgcagtcgtcaagactcgttcgtcagtgccggccccaaacccatctcgatgatcaatcccaaccgcgagccgaaccgtggacggcgcgaaagccttgccggcagcctgatgaacgggatgagctggggtggcctttctgtgggaagcttcatccgagacgatcttgccatggccggcacctcaccgttcactggcgccgcccagtccccgtccttccattctaactcgtacatccccaaactcgaggccgagtacttgcggaacttcgtctgctgcgatctcaagctggacacgatgcacgatctgctccgccactacgagactgtccacaccggggccaacgcccagccgaaccggaacggcaacggctttcagtcgcagccctacagactctccaggccttccatctccatgggttccgctcggcccagctcgcagggataccagagccagatgggatttggacagtcgacaggaatgtcggtcggtaatggcgctgctggtatgggcttcggaggcatgcaaggcggtcgctcgtctctctccatggactcgagcaagcagcagatgcaatccaatgacgacatggatgccgtgggcgacatggagatggatgacgctgtcggcatgatggagatggacgacaacagccacaggactatacagcagacgcgtcaaatgttcggtggccagcagaggccgcagctgcagctgaacagctcaggattgccccaggctcttcggatgaactcgcaaccacccacgccaggtgcatccggctttggatttcagaacaaccccacggtatcgtcggtcaacacccccacgctcaccactcatcagtccggtatgagccagctggatgatggcattgatacgcctatcgacaactcgtccctggacttcatggacctgaacagcgcggtcgggaatctcaccaatctcaacacctctgctctgtccgaattcttcatccaggatcctgccaagcggctgtacagccccggcgggggctcggctaaccagcagcgggttttgcagcagcagatgcaacagttcgggctggatcagagtcagtttcccaacatcacagatcccacccacctggccgctctccagagggcgattgcaaacccggatacatttacgatgccgccggaagaagacaagcccttcaagtgtccggtaattgggtgtgaaaaagcctacaagaaccaaaatggactcaagtaccacaaacaacacggtcatacaaaccagcagttgcatgagaatggagatggcactttctccattgtcaacccggaaacctctaccccgtatcctggtgaaacgggtatggagaaagagaaaccacacaagtgtgaatattgccacaagcgctacaagaacttgaacggcctcaaatatcacaaacaacactcatcggcttgtgaaatccaagcccaggcagccagcatcagagcaaatctatcaaatcctcaagccaacttcaacatgggcggtctcaactcgcaagggatgcctggctctcaggggcttcctgggattggggaggagatgcaagagatgcagatgtag

SEQ ID NO: 20973 - protein, 849 aa, Muscodor strobelii
  misc_feature: SGI Peptide ID NO. 567090
  misc_feature (715)..(740): Pfam Id: PF00096 Pfam Desc: Zinc finger, C2H2 type
  misc_feature (312)..(843): NCBI GI: 116182060 Blast Desc: CHGG_01658 [Chaetomium globosum CBS 148.51] gi|88185955|gb|EAQ93423.1| CHGG_01658 [Chaetomium globosum CBS 148.51]
  misc_feature (310)..(847): NCBI GI: 261358846 Blast Desc: conserved [Verticillium albo-atrum VaMs.102]
  misc_feature (312)..(844): NCBI GI: 85116248 Blast Desc: NCU02621 [Neurospora crassa OR74A] gi|28926824|gb|EAA35788.1| conserved [Neurospora crassa OR74A] gi|38567149|emb|CAE76443.1| related to zinc finger protein SFP1
  misc_feature (312)..(812): NCBI GI: 256735448 Blast Desc: NECHADRAFT_75301 [Nectria haematococca mpVI 77-13-4]
  misc_feature (360)..(843): NCBI GI: 171695448 Blast Desc: protein product [Podospora anserina] gi|170947966|emb|CAP60130.1| protein product [Podospora anserina]
  misc_feature (312)..(843): NCBI GI: 154321521 Blast Desc: BC1G_01635 [Botryotinia fuckeliana B05.10] gi|150852173|gb|EDN27365.1| BC1G_01635 [Botryotinia fuckeliana B05.10]
  misc_feature (263)..(848): NCBI GI: 46107558 Blast Desc: FG00662.1 [Gibberella zeae PH-1]
  misc_feature (312)..(843): NCBI GI: 156053994 Blast Desc: SS1G_05845 [Sclerotinia sclerotiorum 1980] gi|154703625|gb|EDO03364.1| SS1G_05845 [Sclerotinia sclerotiorum 1980]
  misc_feature (272)..(802): NCBI GI: 39950374 Blast Desc: MGG_01209 [Magnaporthe grisea 70-15] gi|145020992|gb|EDK05121.1| MGG_01209 [Magnaporthe grisea 70-15]
  misc_feature (326)..(843): NCBI GI: 70996178 Blast Desc: C2H2 transcription factor (Sfp1) [Aspergillus fumigatus Af293] gi|66850479|gb|EAL90806.1| C2H2 transcription factor (Sfp1), [Aspergillus fumigatus Af293] C2H2 transcription
  misc_feature: Useful for introducing or modulating the production of volatile compounds
MTAHALTGSTGTNGPGCSSRGTSAQQCARPTPTPTPMPSDSAQHALCASSSTSAAAALAAAFAGTAKSGSDCTAAQAGHPLMRPGSSTYSSTTTGLTLSTSGATTASQSTKASKACGVTKPKPRPRPKSKCPSKKRDTHPQNKKHHHRGLPLPPHINSSEVTLSLPSAAIAAAPPTPALSSPSLKSPSLSPSPQPVTPVDPTSLTDQLGHLGISGAFALDKHRRTVGHDLYIDHEPYIPDALDAILDNHDKEALDDDHAPAQPALFHSRELLDLLDYHGLEPAERDAPGIDDTPEFVQRPRPKANSPKHTAMTTGPAMDSAAGRSRQDSFVSAGPKPISMINPNREPNRGRRESLAGSLMNGMSWGGLSVGSFIRDDLAMAGTSPFTGAAQSPSFHSNSYIPKLEAEYLRNFVCCDLKLDTMHDLLRHYETVHTGANAQPNRNGNGFQSQPYRLSRPSISMGSARPSSQGYQSQMGFGQSTGMSVGNGAAGMGFGGMQGGRSSLSMDSSKQQMQSNDDMDAVGDMEMDDAVGMMEMDDNSHRTIQQTRQMFGGQQRPQLQLNSSGLPQALRMNSQPPTPGASGFGFQNNPTVSSVNTPTLTTHQSGMSQLDDGIDTPIDNSSLDFMDLNSAVGNLTNLNTSALSEFFIQDPAKRLYSPGGGSANQQRVLQQQMQQFGLDQSQFPNITDPTHLAALQRAIANPDTFTMPPEEDKPFKCPVIGCEKAYKNQNGLKYHKQHGHTNQQLHENGDGTFSIVNPETSTPYPGETGMEKEKPHKCEYCHKRYKNLNGLKYHKQHSSACEIQAQAASIRANLSNPQANFNMGGLNSQGMPGSQGLPGIGEEMQEMQM

SEQ ID NO: 20974 - DNA, 3107 bp, Muscodor strobelii
  misc_feature: SGI EST ID NO. CUFF.49436.0
  misc_feature: Variant of the nucleotide sequence at SEQ ID NO 20972
cgctcatgcgacccggttccagcacctattccagcaccacgaccggccttacgctcagcacgtcgggtgccaccactgcttcccagtcgaccaaggccagcaaagcgtgcggcgtcaccaagcccaagcccaggcccaggcccaagtccaagtgcccgtccaagaaaagggacactcacccccaaaataagaagcaccaccatcgcggcctgcctctgcctccccatattaattcctctgaagtcaccctctcgctccccagcgccgctatcgctgctgctcctcccacacccgccctatcttcaccctccctcaagtccccttccctctccccgtcgccacagccggtgactcctgtcgatccgaccagtctgaccgaccagctcggccatttgggcatcagcggcgcattcgcactcgacaagcaccgtcgcaccgtcggccacgatctctacatcgaccacgagccctacatccccgacgccctcgacgccatcctcgacaaccacgacaaagaagcgctcgacgacgaccacgcaccagcccagccagctctgttccactcacgagagctcctggatctcctcgactaccacggactcgagcccgctgaacgcgacgctcccggaatcgacgacactcccgagtttgtccagcggcctcgaccaaaagcaaacagccccaagcacacagcgatgaccaccggtcccgccatggactcggccgccggccgcagtcgtcaagactcgttcgtcagtgccggccccaaacccatctcgatgatcaatcccaaccgcgagccgaaccgtggacggcgcgaaagccttgccggcagcctgatgaacgggatgagctggggtggcctttctgtgggaagcttcatccgagacgatcttgccatggccggcacctcaccgttcactggcgccgcccagtccccgtccttccattctaactcgtacatccccaaactcgaggccgagtacttgcggaacttcgtctgctgcgatctcaagctggacacgatgcacgatctgctccgccactacgagactgtccacaccggggccaacgcccagccgaaccggaacggcaacggctttcagtcgcagccctacagactctccaggccttccatctccatgggttccgctcggcccagctcgcagggataccagagccagatgggatttggacagtcgacaggaatgtcggtcggtaatggcgctgctggtatgggcttcggaggcatgcaaggcggtcgctcgtctctctccatggactcgagcaagcagcagatgcaatccaatgacgacatggatgccgtgggcgacatggagatggatgacgctgtcggcatgatggagatggacgacaacagccacaggactatacagcagacgcgtcaaatgttcggtggccagcagaggccgcagctgcagctgaacagctcaggattgccccaggctcttcggatgaactcgcaaccacccacgccaggtgcatccggctttggatttcagaacaaccccacggtatcgtcggtcaacacccccacgctcaccactcatcagtccggtatgagccagctggatgatggcattgatacgcctatcgacaactcgtccctggacttcatggacctgaacagcgcggtcgggaatctcaccaatctcaacacctctgctctgtccgaattcttcatccaggatcctgccaagcggctgtacagccccggcgggggctcggctaaccagcagcgggttttgcagcagcagatgcaacagttcgggctggatcagagtcagtttcccaacatcacagatcccacccacctggccgctctccagagggcgattgcaaacccggatacatttacgatgccgccggaagaagacaagcccttcaagtgtccggtaattgggtgtgaaaaagcctacaagaaccaaaatggactcaagtaccacaaacaacacggtcatacaaaccagcagttgcatgagaatggagatggcactttctccattgtcaacccggaaacctctaccccgtatcctggtgaaacgggtatggagaaagagaaaccacacaagtgtgaatattgccacaagcgctacaagaacttgaacggcctcaaatatcacaaacaacactcatcggcttgtgaaatccaagcccaggcagccagcatcagagcaaatctatcaaatcctcaagccaacttcaacatgggcggtctcaactcgcaagggatgcctggctctcaggggcttcctgggattggggaggagatgcaagagatgcagatgtagcgcagcggttgacgtctctttctcacccggggctccttaacaacgcccgagcggacatcgcagacgttatcctcatctccgcccatcaccgtcccgttgtcagacccgatagaagcgccttttcggccaaaacttgatgagttctttgccacgattgtacagcaatagacatttcgcatagactggataccctctcacatttccttttctcagtcctcctcaagctctgttttctcggtacggaaaaaggttgcattgccttgcagtggcgtctggcggcgttcttcctttgttggcctcgtaaccgacacgcgaatgatttctcgctcttaacccactgcatctacgctacctaaagctatgattatgatttcggagattccaggctctgaaatggcccatgataccgactggagcggatcatcggtatcacccttttggaaaagaatgaaagacaaaaagatgttgaaaagtttccagggactgttgatataaggatgaacaaaaaatggaacagggggccatagaaaaatcaagcagccggacatgccatggttagatgtgatgcgtcaagctttttattctagccattgcgctctggttactgttatgatagataaacggaacagtggttccatagcctcgcggcttcttcgacttggtgaaaaggggtatatcaaagtaacatagctcaataagaaaagtttcgtcgttcccatacccgattatacgtttatgacaagatagcttcacatctccatacttattcgaacgcaactgatccaacatgcttta

SEQ ID NO: 20975 - DNA, 756 bp, Muscodor strobelii
  misc_feature: SGI cDNA ID NO. 567091
  misc_feature: Reduced expression when VOC is produced
  misc_feature: Encodes the peptide sequence at SEQ ID NO 20976
atgaaagtaatcagcccagaggaagaaaaggcacactacaatgccgtgctcaagggcggctttatcggtggctctctcggcgtcggcctaggtctcctgggcgtcatcggcgcctcgcgtcgctatcccgccttccgctccctcacactgcccttccgcgcatttctcgtgacgtcaacgggcacattcggcgccatcgtcaacgccgagcgctactccaatgccttccacctagccaacaacccgatgaacttctacaaggaccaggcgtcgcgggacgccgccgtcctccgacagcaagagtccggcctggagcgattcaaacagtggggtcagcagaaccggtacagcatcgtcttcggcgcatgggtggcttccatgggtgtcgcgctcgccatggtgggacgcaacaagtacctcacgacctcgcagaagctcgtgcaagcccgtgtctacgcccagggcctcacgctcgccgtcctcgtggcgtccgccgctttcgagacggccgacgccaagcagggcaccggccgctgggagacgatcaaggtcatcgaccccaacgatcccgagcacaagcacttgatcgagaagcgcatccataaggaggagtacgaggggcaagacctctggagggatatggttgctgctgaggaaaagcgcctggcttcgcgaaaagctgagagcactactgaatcggctgctaagacgcaaaagaagaatgagaagaaagaggctcaggagcaagagtcctga

SEQ ID NO: 20976 - protein, 251 aa, Muscodor strobelii
  misc_feature: SGI Peptide ID NO. 567091
  misc_feature (1)..(251): NCBI GI: 39950384 Blast Desc: conserved [Magnaporthe grisea 70-15] gi|58257419|gb|AAW69331.1| [Magnaporthe grisea] gi|145020990|gb|EDK05119.1| conserved [Magnaporthe grisea 70-15]
  misc_feature (1)..(226): NCBI GI: 46107560 Blast Desc: FG00663.1 [Gibberella zeae PH-1]
  misc_feature (1)..(226): NCBI GI: 171695446 Blast Desc: protein product [Podospora anserina] gi|170947965|emb|CAP60129.1| protein product [Podospora anserina]
  misc_feature (1)..(245): NCBI GI: 154321515 Blast Desc: BC1G_01632 [Botryotinia fuckeliana B05.10] gi|150852170|gb|EDN27362.1| BC1G_01632 [Botryotinia fuckeliana B05.10]
  misc_feature (1)..(226): NCBI GI: 116182064 Blast Desc: CHGG_01660 [Chaetomium globosum CBS 148.51] gi|88185957|gb|EAQ93425.1| CHGG_01660 [Chaetomium globosum CBS 148.51]
  misc_feature (1)..(226): NCBI GI: 46115212 Blast Desc: FG03448.1 [Gibberella zeae PH-1]
  misc_feature (1)..(230): NCBI GI: 256734742 Blast Desc: [Nectria haematococca mpVI 77-13-4]
  misc_feature (1)..(227): NCBI GI: 256723786 Blast Desc: NECHADRAFT_67826 [Nectria haematococca mpVI 77-13-4]
  misc_feature (1)..(226): NCBI GI: 156053990 Blast Desc: SS1G_05843 [Sclerotinia sclerotiorum 1980] gi|154703623|gb|EDO03362.1| SS1G_05843 [Sclerotinia sclerotiorum 1980]
  misc_feature (1)..(249): NCBI GI: 169597653 Blast Desc: SNOG_01614 [Phaeosphaeria nodorum SN15] gi|111070143|gb|EAT91263.1| SNOG_01614 [Phaeosphaeria nodorum SN15]
  misc_feature: Useful for introducing or modulating the production of volatile compounds
MKVISPEEEKAHYNAVLKGGFIGGSLGVGLGLLGVIGASRRYPAFRSLTLPFRAFLVTSTGTFGAIVNAERYSNAFHLANNPMNFYKDQASRDAAVLRQQESGLERFKQWGQQNRYSIVFGAWVASMGVALAMVGRNKYLTTSQKLVQARVYAQGLTLAVLVASAAFETADAKQGTGRWETIKVIDPNDPEHKHLIEKRIHKEEYEGQDLWRDMVAAEEKRLASRKAESTTESAAKTQKKNEKKEAQEQES

SEQ ID NO: 20977 - DNA, 3847 bp, Muscodor strobelii
  misc_feature: SGI EST ID NO. CUFF.49280.0
  misc_feature: Variant of the nucleotide sequence at SEQ ID NO 20975
ctgcaggtcatccaaggatggcgggattactcgtagaacttggattacatcacgtaaaaattcccgaattgatttctttcttcatccatccggtgtcttcgcgataattttctctacgggcacgcgcatagtagagttcaattgcgactgttgcacttccgaggagtttagagttggtccaataaaaaggtagacgtcgccaccgttgatgccatcatagcttcatcaggcagataagcgcaaacaacaagaaaacgttccgaaacctactcgacctccacaatcaacaacaacaataactttgacgcaataattttgcattgttcagcactaagcgctttccgacagctgcaattccggatcgatagctatagctctttacacgtagcttgaccaataacgataatcactcatcgtcaagcgaagcaagacagccgcgcaatccaccaacaatgaaagtaatcagcccagaggaagaaaaggcacactacaatgccgtgctcaagggcggctttatcggtggctctctcggcgtcggcctaggtctcctgggcgtcatcggcgcctcgcgtcgctatcccgccttccgctccctcacactgcccttccgcgcatttctcgtgacgtcaacgggcacattcggcgccatcgtcaacgccgagcgctactccaatgccttccacctagccaacaacccgatgaacttctacaaggaccaggcgtcgcgggacgccgccgtcctccgacagcaagagtccggcctggagcgattcaaacagtggggtcagcagaaccggtacagcatcgtcttcggcgcatgggtggcttccatgggtgtcgcgctcgccatggtgggacgcaacaagtacctcacgacctcgcagaagctcgtgcaagcccgtgtctacgcccagggcctcacgctcgccgtcctcgtggcgtccgccgctttcgagacggccgacgccaagcagggcaccggccgctgggagacgatcaaggtcatcgaccccaacgatcccgagcacaagcacttgatcgagaagcgcatccataaggaggagtacgaggggcaagacctctggagggatatggttgctgctgaggaaaagcgcctggcttcgcgaaaagctgagagcactactgaatcggctgctaagacgcaaaagaagaatgagaagaaagaggctcaggagcaagagtcctgagattcatttcagtgttatttccatttcctaaatgtacaagagcttggaaatactggctttgcttgtatacttgcattgggcggtgatagatcatggcctcggcgttcaggttcggttgcacatgtagtttcgctttcctcttgtcgtctactacggaatactaaagatcctcgggatcgagactggcggatatagaaaagctttagaggcggttacggatggggtttcgtcccaccaaatgacaagagcttacgagaaactagtaataaaatataatattcaatgaccagttctttcgcaatcactcttgatcttcagttcatcttgcatagtgaagagacaataataagccttctcttattgactgctccaatacaggatccgacacctttatccaatgaagagccaatgtctgatgaacctacacaattaacatccccgatattacagctcctcgctatatatgcttccctgacataagaatagatgacctcggatcgtaaattcgtagcagtgcctacccctgattctccttaataataatacagtcgtatcctactatgttttcgttaagtagtatggactagcatagaatcgtgcagtccatgctacacctcgatggtgaagtggctgatctgtgaatagtacgcatgaacagcaagttcgagtatccaaacatctccaaagatatcagcaccgtcgaacccgcctatcataagaaggcggctatcatagagtaccgttccgtgatacccccggccggtggggggatatccgtagactcgacgcttgtcccaggacatggtgacgaggttgagtaacagcacgtcgttggagtactctgagccgtcgtggccgccaatgatgaagagataggacccgacgagtgtggacgtgtgcgagagtcgcctgaacggtatgggcatctgcaccgacttccatatctgcgtttcgacatcgtatacccacacgtcgttgaaacattcgccgccgtccgatcctccgtatactatcagcttgctgcctaccatattcgctgtgtggtagccgcgtgcctgtggtttactcatactaccaccacctaatcggccactgccgcttggactaccgctccgggggctgctgtcagaccccgatatcagtctccagctcatcttgtgtatatccgagacgtccagccgccagatatcattcaaagctcggacgccatcaccgccgccgaagacgtagattccattcttgtagaggcaggccgtgtgagcgcgccgcgcactaggggtctgatccccgacgatgcgcggcttgtgccacttgtagttcatagtgtccagcacatagacgtcgttgtagtaggccgggccatcgcctcctccaaatacgaccagcttcttaccgacggcggtgcaggtcattgcgcgcaagggcaggggtatctcgccggctacgacgggtgtgctccagtggaacgagtcggcgtccaagacatataggtcattgaaacaagctcgactgtcgcatcctccaaagacaaaaacattactaccgaccagggtggtcgtgtgcgctctcaatggcttgtgaggggcccctgacacaggcgcccttgaccaatacatgccggaggagggcgccgccgggacgtctgcagcggtggccgggtcttggaggggaggaagcgccgtataagcacctcgaggagggcgcgtgggcgcgggcggtttccgagcctgtgtggtgttgggcatagctagcgagctcggtttggcggacatggacgacgcagatcgcgagggcagcggacgacgagactcgccatctcttgtgtcagctgaggaagcggtggaagcggtggcctcggtctggtagtcgccattgcggcgaacggtgaaggtgggcacgggtgtcgggacagactgcggcgggtagtttgtcttggtggcagccgactgtgagcgctggcgcatggcgggctccgagtgcttgcgcctactgctgctgccgctggagttagcgccacctgagcttccgccatggctcttggaggccaggtggccaggcgtgtgactgcggaccgtcgcaggccgctctggcagctcggcgcgcggcgaggcggcgtcgatgatcttctggccgcgcacggtgcgagcccggctgctggaggacgaggtgggagaccgagtcgagtcggccatgctgtcgtcgcggactagggaaggcggaaggcggagagccgggtgcacatgcgccgtcgtctcgaggcttcccgagctccccgggtccaggtctggctactgggcgccagaccgacaatcacgggggtcgagaagtcggaaagactgtagcacccgacgtcctcggccaggacgtcgctgcgattgaagccaagcaatgtctgaattaagacgggcaaagtcccgtttccgattcggtactgagctgtgccagcagcagcgcagtcgtattctgtgtggggtatcaaagtgagctgaagctggacgaagtgtcgctcgcttgctggtcgtacgtgcttagtagctgtggttcgtgaagcagtcgggtcaaggtacgggaatgatgcgtcggcctgggccttggttttgacgtcggtatgcaaagtgacagcagggattgggtttgtg

SEQ ID NO: 20978 - DNA, 1584 bp, Muscodor strobelii
  misc_feature: SGI cDNA ID NO. 567092
  misc_feature: Reduced expression when VOC is produced
  misc_feature: Encodes the peptide sequence at SEQ ID NO 20979
atggccgactcgactcggtctcccacctcgtcctccagcagccgggctcgcaccgtgcgcggccagaagatcatcgacgccgcctcgccgcgcgccgagctgccagagcggcctgcgacggtccgcagtcacacgcctggccacctggcctccaagagccatggcggaagctcaggtggcgctaactccagcggcagcagcagtaggcgcaagcactcggagcccgccatgcgccagcgctcacagtcggctgccaccaagacaaactacccgccgcagtctgtcccgacacccgtgcccaccttcaccgttcgccgcaatggcgactaccagaccgaggccaccgcttccaccgcttcctcagctgacacaagagatggcgagtctcgtcgtccgctgccctcgcgatctgcgtcgtccatgtccgccaaaccgagctcgctagctatgcccaacaccacacaggctcggaaaccgcccgcgcccacgcgccctcctcgaggtgcttatacggcgcttcctcccctccaagacccggccaccgctgcagacgtcccggcggcgccctcctccggcatgtattggtcaagggcgcctgtgtcaggggcccctcacaagccattgagagcgcacacgaccaccctggtcggtagtaatgtttttgtctttggaggatgcgacagtcgagcttgtttcaatgacctatatgtcttggacgccgactcgttccactggagcacacccgtcgtagccggcgagatacccctgcccttgcgcgcaatgacctgcaccgccgtcggtaagaagctggtcgtatttggaggaggcgatggcccggcctactacaacgacgtctatgtgctggacactatgaactacaagtggcacaagccgcgcatcgtcggggatcagacccctagtgcgcggcgcgctcacacggcctgcctctacaagaatggaatctacgtcttcggcggcggtgatggcgtccgagctttgaatgatatctggcggctggacgtctcggatatacacaagatgagctggagactgatatcggggtctgacagcagcccccggagcggtagtccaagcggcagtggccgattaggtggtggtagtatgagtaaaccacaggcacgcggctaccacacagcgaatatggtaggcagcaagctgatagtatacggaggatcggacggcggcgaatgtttcaacgacgtgtgggtatacgatgtcgaaacgcagatatggaagtcggtgcagatgcccataccgttcaggcgactctcgcacacgtccacactcgtcgggtcctatctcttcatcattggcggccacgacggctcagagtactccaacgacgtgctgttactcaacctcgtcaccatgtcctgggacaagcgtcgagtctacggatatccccccaccggccgggggtatcacggaacggtactctatgatagccgccttcttatgataggcgggttcgacggtgctgatatctttggagatgtttggatactcgaacttgctgttcatgcgtactattcacagatcagccacttcaccatcgaggtgtag

SEQ ID NO: 20979 - protein, 527 aa, Muscodor strobelii
  misc_feature: SGI Peptide ID NO. 567092
  misc_feature (380)..(425): Pfam Id: PF01344 Pfam Desc: Kelch motif
  misc_feature (308)..(356): Pfam Id: PF01344 Pfam Desc: Kelch motif
  misc_feature (257)..(302): Pfam Id: PF01344 Pfam Desc: Kelch motif
  misc_feature (428)..(476): Pfam Id: PF01344 Pfam Desc: Kelch motif
  misc_feature (380)..(425): Pfam Id: PF07646 Pfam Desc: Kelch motif
  misc_feature (428)..(473): Pfam Id: PF07646 Pfam Desc: Kelch motif
  misc_feature (428)..(466): Pfam Id: PF01344 Pfam Desc: Kelch motif
  misc_feature (257)..(297): Pfam Id: PF01344 Pfam Desc: Kelch motif
  misc_feature (308)..(343): Pfam Id: PF01344 Pfam Desc: Kelch motif
  misc_feature (207)..(246): Pfam Id: PF01344 Pfam Desc: Kelch motif
  misc_feature (380)..(422): Pfam Id: PF07646 Pfam Desc: Kelch motif
  misc_feature (257)..(302): Pfam Id: PF07646 Pfam Desc: Kelch motif
  misc_feature (308)..(340): Pfam Id: PF07646 Pfam Desc: Kelch motif
  misc_feature (34)..(527): NCBI GI: 261358848 Blast Desc: Rab9 effector protein with Kelch motifs [Verticillium albo-atrum VaMs.102]
  misc_feature (33)..(527): NCBI GI: 98986297 Blast Desc: [Colletotrichum lagenarium]
  misc_feature (1)..(527): NCBI GI: 256735449 Blast Desc: NECHADRAFT_75303 [Nectria haematococca mpVI 77-13-4]
  misc_feature (1)..(527): NCBI GI: 171695444 Blast Desc: protein product [Podospora anserina] gi|170947964|emb|CAP60128.1| protein product [Podospora anserina]
  misc_feature (42)..(527): NCBI GI: 85116243 Blast Desc: NCU02620 [Neurospora crassa OR74A] gi|28926823|gb|EAA35787.1| conserved [Neurospora crassa OR74A] gi|38567150|emb|CAE76444.1| conserved [Neurospora crassa]
  misc_feature (165)..(527): NCBI GI: 116182066 Blast Desc: CHGG_01661 [Chaetomium globosum CBS 148.51] gi|88185958|gb|EAQ93426.1| CHGG_01661 [Chaetomium globosum CBS 148.51]
  misc_feature (1)..(527): NCBI GI: 154321555 Blast Desc: BC1G_01652 [Botryotinia fuckeliana B05.10] gi|150852190|gb|EDN27382.1| BC1G_01652 [Botryotinia fuckeliana B05.10]
  misc_feature (215)..(527): NCBI GI: 145614000 Blast Desc: MGG_01206 [Magnaporthe grisea 70-15] gi|145020995|gb|EDK05124.1| MGG_01206 [Magnaporthe grisea 70-15]
  misc_feature (174)..(527): NCBI GI: 156054032 Blast Desc: SS1G_05864 [Sclerotinia sclerotiorum 1980] gi|154703644|gb|EDO03383.1| SS1G_05864 [Sclerotinia sclerotiorum 1980]
  misc_feature (164)..(527): NCBI GI: 71018379 Blast Desc: UM03273.1 [Ustilago maydis 521] gi|46099027|gb|EAK84260.1| UM03273.1 [Ustilago maydis 521]
  misc_feature: Useful for introducing or modulating the production of volatile compounds
MADSTRSPTSSSSSRARTVRGQKIIDAASPRAELPERPATVRSHTPGHLASKSHGGSSGGANSSGSSSRRKHSEPAMRQRSQSAATKTNYPPQSVPTPVPTFTVRRNGDYQTEATASTASSADTRDGESRRPLPSRSASSMSAKPSSLAMPNTTQARKPPAPTRPPRGAYTALPPLQDPATAADVPAAPSSGMYWSRAPVSGAPHKPLRAHTTTLVGSNVFVFGGCDSRACFNDLYVLDADSFHWSTPVVAGEIPLPLRAMTCTAVGKKLVVFGGGDGPAYYNDVYVLDTMNYKWHKPRIVGDQTPSARRAHTACLYKNGIYVFGGGDGVRALNDIWRLDVSDIHKMSWRLISGSDSSPRSGSPSGSGRLGGGSMSKPQARGYHTANMVGSKLIVYGGSDGGECFNDVWVYDVETQIWKSVQMPIPFRRLSHTSTLVGSYLFIIGGHDGSEYSNDVLLLNLVTMSWDKRRVYGYPPTGRGYHGTVLYDSRLLMIGGFDGADIFGDVWILELAVHAYYSQISHFTIEV

SEQ ID NO: 20980 - DNA, 3847 bp, Muscodor strobelii
  misc_feature: SGI EST ID NO. CUFF.49280.0
  misc_feature: Variant of the nucleotide sequence at SEQ ID NO 20978
cacaaacccaatccctgctgtcactttgcataccgacgtcaaaaccaaggcccaggccgacgcatcattcccgtaccttgacccgactgcttcacgaaccacagctactaagcacgtacgaccagcaagcgagcgacacttcgtccagcttcagctcactttgataccccacacagaatacgactgcgctgctgctggcacagctcagtaccgaatcggaaacgggactttgcccgtcttaattcagacattgcttggcttcaatcgcagcgacgtcctggccgaggacgtcgggtgctacagtctttccgacttctcgacccccgtgattgtcggtctggcgcccagtagccagacctggacccggggagctcgggaagcctcgagacgacggcgcatgtgcacccggctctccgccttccgccttccctagtccgcgacgacagcatggccgactcgactcggtctcccacctcgtcctccagcagccgggctcgcaccgtgcgcggccagaagatcatcgacgccgcctcgccgcgcgccgagctgccagagcggcctgcgacggtccgcagtcacacgcctggccacctggcctccaagagccatggcggaagctcaggtggcgctaactccagcggcagcagcagtaggcgcaagcactcggagcccgccatgcgccagcgctcacagtcggctgccaccaagacaaactacccgccgcagtctgtcccgacacccgtgcccaccttcaccgttcgccgcaatggcgactaccagaccgaggccaccgcttccaccgcttcctcagctgacacaagagatggcgagtctcgtcgtccgctgccctcgcgatctgcgtcgtccatgtccgccaaaccgagctcgctagctatgcccaacaccacacaggctcggaaaccgcccgcgcccacgcgccctcctcgaggtgcttatacggcgcttcctcccctccaagacccggccaccgctgcagacgtcccggcggcgccctcctccggcatgtattggtcaagggcgcctgtgtcaggggcccctcacaagccattgagagcgcacacgaccaccctggtcggtagtaatgtttttgtctttggaggatgcgacagtcgagcttgtttcaatgacctatatgtcttggacgccgactcgttccactggagcacacccgtcgtagccggcgagatacccctgcccttgcgcgcaatgacctgcaccgccgtcggtaagaagctggtcgtatttggaggaggcgatggcccggcctactacaacgacgtctatgtgctggacactatgaactacaagtggcacaagccgcgcatcgtcggggatcagacccctagtgcgcggcgcgctcacacggcctgcctctacaagaatggaatctacgtcttcggcggcggtgatggcgtccgagctttgaatgatatctggcggctggacgtctcggatatacacaagatgagctggagactgatatcggggtctgacagcagcccccggagcggtagtccaagcggcagtggccgattaggtggtggtagtatgagtaaaccacaggcacgcggctaccacacagcgaatatggtaggcagcaagctgatagtatacggaggatcggacggcggcgaatgtttcaacgacgtgtgggtatacgatgtcgaaacgcagatatggaagtcggtgcagatgcccataccgttcaggcgactctcgcacacgtccacactcgtcgggtcctatctcttcatcattggcggccacgacggctcagagtactccaacgacgtgctgttactcaacctcgtcaccatgtcctgggacaagcgtcgagtctacggatatccccccaccggccgggggtatcacggaacggtactctatgatagccgccttcttatgataggcgggttcgacggtgctgatatctttggagatgtttggatactcgaacttgctgttcatgcgtactattcacagatcagccacttcaccatcgaggtgtagcatggactgcacgattctatgctagtccatactacttaacgaaaacatagtaggatacgactgtattattattaaggagaatcaggggtaggcactgctacgaatttacgatccgaggtcatctattcttatgtcagggaagcatatatagcgaggagctgtaatatcggggatgttaattgtgtaggttcatcagacattggctcttcattggataaaggtgtcggatcctgtattggagcagtcaataagagaaggcttattattgtctcttcactatgcaagatgaactgaagatcaagagtgattgcgaaagaactggtcattgaatattatattttattactagtttctcgtaagctcttgtcatttggtgggacgaaaccccatccgtaaccgcctctaaagcttttctatatccgccagtctcgatcccgaggatctttagtattccgtagtagacgacaagaggaaagcgaaactacatgtgcaaccgaacctgaacgccgaggccatgatctatcaccgcccaatgcaagtatacaagcaaagccagtatttccaagctcttgtacatttaggaaatggaaataacactgaaatgaatctcaggactcttgctcctgagcctctttcttctcattcttcttttgcgtcttagcagccgattcagtagtgctctcagcttttcgcgaagccaggcgcttttcctcagcagcaaccatatccctccagaggtcttgcccctcgtactcctccttatggatgcgcttctcgatcaagtgcttgtgctcgggatcgttggggtcgatgaccttgatcgtctcccagcggccggtgccctgcttggcgtcggccgtctcgaaagcggcggacgccacgaggacggcgagcgtgaggccctgggcgtagacacgggcttgcacgagcttctgcgaggtcgtgaggtacttgttgcgtcccaccatggcgagcgcgacacccatggaagccacccatgcgccgaagacgatgctgtaccggttctgctgaccccactgtttgaatcgctccaggccggactcttgctgtcggaggacggcggcgtcccgcgacgcctggtccttgtagaagttcatcgggttgttggctaggtggaaggcattggagtagcgctcggcgttgacgatggcgccgaatgtgcccgttgacgtcacgagaaatgcgcggaagggcagtgtgagggagcggaaggcgggatagcgacgcgaggcgccgatgacgcccaggagacctaggccgacgccgagagagccaccgataaagccgcccttgagcacggcattgtagtgtgccttttcttcctctgggctgattactttcattgttggtggattgcgcggctgtcttgcttcgcttgacgatgagtgattatcgttattggtcaagctacgtgtaaagagctatagctatcgatccggaattgcagctgtcggaaagcgcttagtgctgaacaatgcaaaattattgcgtcaaagttattgttgttgttgattgtggaggtcgagtaggtttcggaacgttttcttgttgtttgcgcttatctgcctgatgaagctatgatggcatcaacggtggcgacgtctacctttttattggaccaactctaaactcctcggaagtgcaacagtcgcaattgaactctactatgcgcgtgcccgtagagaaaattatcgcgaagacaccggatggatgaagaaagaaatcaattcgggaatttttacgtgatgtaatccaagttctacgagtaatcccgccatccttggatgacctgcag

SEQ ID NO: 20981 - DNA, 945 bp, Muscodor strobelii
  misc_feature: SGI cDNA ID NO. 567093
  misc_feature: Elevated expression when VOC is produced
  misc_feature: Encodes the peptide sequence at SEQ ID NO 20982
atggctcctagcacggatcccagtatttggagtcaagaaattgctgttccagctgagacaatatcatatgttgatgatgctgtcaaggcaaaaataccccatggttcgcaaatcctaacaatcgtgccttcgggctcatcatactgggcacgtacagcaaagattgacaccattgatccttatggaaacgaagtatcatacttcctcaagactcatcttggcggagaaagtctcaaattagtcctcggagaatatcaatcgatgaacgcattatggagtgtgatgccagagctcgtcgcccggccatatggttacggaacttatgaggatatgaaagatgtgcattttttcctatgctcgtatcatgagctcactaaggatatacctgacgttgatgattttccggctctcgttgccgagctgcacaagagatcgacgcatcctgatgagaagttcggattcccgtacacgacatacggaggccgacttccacagttttttccagtcacagacagctgggaagagactttcacttctggactacaaagaactttcgacgccgaagagagtactcaagggtatgatgaggacatggccctactcaggaggtctatcattgagaaggggatttatgggatggtaactgttctgtggatgtcaatacaaaccaacctgtcatattcgattcgacttgcctatgggctcacaacgagtgtaggtcttgcccgaaatgtttgcgagccagctgaagacttcgatgatagagttctcttatattcaacgagattcaatttacatgcttcttcgctttaccccggcaatctcaggttcagaaacactgtacgtgaggatatgcggaagcttaccgaaaaatattctggaggctatgaagcctggatcagcgacaagggcaatgctagaacgaccacgataacgaagttgtag

SEQ ID NO: 20982 - protein, 314 aa, Muscodor strobelii
  misc_feature: SGI Peptide ID NO. 567093
  misc_feature (10)..(313): NCBI GI: 261356063 Blast Desc: conserved [Verticillium albo-atrum VaMs.102]
  misc_feature (24)..(210): NCBI GI: 46135869 Blast Desc: FG09450.1 [Gibberella zeae PH-1]
  misc_feature (24)..(210): NCBI GI: 256734177 Blast Desc: [Nectria haematococca mpVI 77-13-4]
  misc_feature (24)..(281): NCBI GI: 169765035 Blast Desc: [Aspergillus oryzae RIB40] gi|83764843|dbj|BAE54987.1| protein product [Aspergillus oryzae]
  misc_feature (21)..(283): NCBI GI: 238503680 Blast Desc: conserved [Aspergillus flavus NRRL3357] gi|220690543|gb|EED46892.1| conserved [Aspergillus flavus NRRL3357]
  misc_feature (24)..(210): NCBI GI: 145256231 Blast Desc: An10g00710 [Aspergillus niger CBS 513.88] gi|134078637|emb|CAK40510.1| protein product [Aspergillus niger]
  misc_feature (24)..(207): NCBI GI: 255946231 Blast Desc: Pc20g14050 [Penicillium chrysogenum Wisconsin 54-1255] gi|211588618|emb|CAP86734.1| Pc20g14050 [Penicillium chrysogenum Wisconsin 54-1255]
  misc_feature (32)..(210): NCBI GI: 115385086 Blast Desc: conserved [Aspergillus terreus NIH2624] gi|114196782|gb|EAU38482.1| conserved [Aspergillus terreus NIH2624]
  misc_feature (24)..(293): NCBI GI: 240110347 Blast Desc: CPC735_063790 [Coccidioides posadasii C735 delta SOWgp]
  misc_feature (24)..(292): NCBI GI: 116206070 Blast Desc: CHGG_02328 [Chaetomium globosum CBS 148.51] gi|88182925|gb|EAQ90393.1| CHGG_02328 [Chaetomium globosum CBS 148.51]
  misc_feature: Useful for introducing or modulating the production of volatile compounds
MAPSTDPSIWSQEIAVPAETISYVDDAVKAKIPHGSQILTIVPSGSSYWARTAKIDTIDPYGNEVSYFLKTHLGGESLKLVLGEYQSMNALWSVMPELVARPYGYGTYEDMKDVHFFLCSYHELTKDIPDVDDFPALVAELHKRSTHPDEKFGFPYTTYGGRLPQFFPVTDSWEETFTSGLQRTFDAEESTQGYDEDMALLRRSIIEKGIYGMVTVLWMSIQTNLSYSIRLAYGLTTSVGLARNVCEPAEDFDDRVLLYSTRFNLHASSLYPGNLRFRNTVREDMRKLTEKYSGGYEAWISDKGNARTTTITKL

SEQ ID NO: 20983 - DNA, 3883 bp, Muscodor strobelii
  misc_feature: SGI EST ID NO. CUFF.49289.0
  misc_feature: Variant of the nucleotide sequence at SEQ ID NO 20981
atccattctagccaatctctcattttactcatggctcctagcacggatcccagtatttggagtcaagaaattgctgttccagctgagacaatatcatatgttgatgatgctgtcaaggcaaaaataccccatggttcgcaaatcctaacaatcgtgccttcgggctcatcatactgggcacgtacagcaaagattgacaccattgatccttatggaaacgaagtatcatacttcctcaagactcatcttggcggagaaagtctcaaattagtcctcggagaatatcaatcgatgaacgcattatggagtgtgatgccagagctcgtcgcccggccatatggttacggaacttatgaggatatgaaagatgtgcattttttcctatgctcgtatcatgagctcactaaggatatacctgacgttgatgattttccggctctcgttgccgagctgcacaagagatcgacgcatcctgatgagaagttcggattcccgtacacgacatacggaggccgacttccacagttttttccagtcacagacagctgggaagagactttcacttctggactacaaagaactttcgacgccgaagagagtactcaagggtatgatgaggacatggccctactcaggaggtctatcattgagaaggtgattcctcgactgatccgtccattggaaactggtcccaatcagatcaaaccgcggttggttcacgggtatgggtaacaaaatcctacgacgttattttttgatcatattccaaaggcatcatactaatgtttttgcagtgagcgatctaatctgtcagataccagaaattgatcctttattttacaacccgcggcctcacaggacacaaccgtgaacgataactaacgcaacatctttttggtaggggatttatgggatggtaactgttctgtggatgtcaatacaaaccaacctgtcatattcgattcgacttgcctatgggctcacaacgagtacgagcttgcaccttggcatattaagcgacacaagatgactgggccgtatatcaaggaatataccagacactttccaatcagcgagccagctgaagacttcgatgatagagttctcttatattcaacgagattcaatttacatgcttcttcgctttaccccggcaatctcaggttcagaaacactgtacgtgaggatatgcggaagcttaccgaaaaatattctggaggctatgaagcctggatcagcgacaagggcaatgctagaacgaccacgataacgaagttgtagaagacttcgggcgcttccgaatctggattctcgggtagcggtggccttcaaaggtcgttccgagctcgacgttggaactgatatccaagcctgattgatcgactataagagacagcaatggattcgtatttggactaggaagtagcacacaataaaatttcgtcatttgtttaggtttcactttctttcgtcttatacttgtttgagtcatccaaacgcggtatcatttgagaccctcgcgagaccagatgagttgtgtcctaaataaaagatagaaaaagactcaggtcgtgtttgagtccttatccgaaatgcgcgcgcacattcaacccccctctcatccatagtaggcggttatgcaatttgtgcaatatagattatacggttgagaatatgcagcttcaatacgcagtactccagggaacttgaagaggggagataacttatctggaaaacaattccgagtatattcggcctgttagacccacagacgaaaaatacgaaatgggttctgcacaagataaccacagtcttctcgtctgaattcaaatgaataattcgtagacctttcagataaccactagactacaaaggcgaactaccccgtattgtatgttaccaagtgtatacgagacgagggtctgatgcgcacgcatttcgtgcacatttcgacgcaaggaataacacaaaatacatcgggaggtataagcgcagtgcctaggtgtgtcactcatccgatctatagacttaggtacttagtatttatcgaaagcggcccgcagctagttctcttggtccctagccttgcgccattcccaaccacgacgtcgtaatgtccatattgctgcgactccggtaagaccttcaagtagagcaagcagtgtgaaaagccaggagtatcctatagcattggctaggggctgaaggacggcgactgctacggcagacaatgtacagcgacatatgttgttgcttgctccagcagtgcctggacgagaggggaatatgtcgacaagaagtgcactataaatctgatgcagtattgtgcatttcgcacccatatagaactggagaaccaatggtattgcaggatgcgctttagcttgaactgcccacccgtagccaccaacggcaaatatggacacaataattattggtattgtccccgtcgatctagccttttcgataggaaaagatctgatgtcaatgtctttcttgccattcacatgtaaacctgctgcttctgctgttttacggaagccccaatccatcagccttccagcaatatacccaccaagaatgacgccgccgccgccagccagaaaggagagtccaacctcgagatcattgaagccatatccggcatagatatgcgggattgaagtctgaacgcagtaccagactgtgtagggcgtagcacaaagccagagaatcagagccgtgtctcgataaaagagtattcgaaatgaagcaaatggatttggcaccgagagactgcccctgcccgttttgccagaattcaggtcttcagaaattgggcctgacggattttcttgagtaagttgtctttgagaagatttcaagctcggagaatagctctgcgatgaaggtccagaaccactttcgacatcatcgggagagtgatgcgtcgcaagtgatttgcttcgctcagaactcgataccaaaatctgccaccatgttacccatatacccttgggctcgaccagaccattgcctacaactgatctaccggtctctggcattgtccacccaatgagtagtactgccgaggtgccgaaaatcacgagtgttagaaaacaccatttggcattgttgcttgcaagaattgcaccgcctcccaagaccggacctatacagggcccaagattagtagcggccatcattgggcccaatactgaaccacgtcgggaatgagggacaatgtcggcaacaacagcatatgcaagactcaatactgcgcttccacccacactctgcagcgctcggagaagcaacagtcccacatagctttcgttttctaccagaccgataccagcaagcagatacaaagtgaacgtgaacaagaacactggccgtcgtccgagtgtatcggaaagcggtgaaaagaatgagggcgcaatgccctggaatatcacataaagagtaattgtcagattgatagcttgaattgacgtatgataacgctcggctaacaggtctatgattggaagatagatcgttgcggtaagtgaggatgccagggcaagatatccaagtaagtaggttagatacaaaatcatagtattagagaagactgagtagggaatatcgggtcccgtcgtctcaagctcgggccttgattgtttctcatccgcttgctggcataagtcattgcgggtggtttgttgcagtggcgctcttctttctgtatgttcaatgccctgtgggggtgaacaggcagtttgtggcttcattatcgcaaaattaaggtagtgtgaggatatgaatctgggtattaaaaattaaaactatactcagcactccaaaaaagagaatgaagcttcaaaacgtacctaataaatcatacgtgtcgatgaatcgg

SEQ ID NO: 20984 - DNA, 1692 bp, Muscodor strobelii
  misc_feature: SGI cDNA ID NO. 567094
  misc_feature: Encodes the peptide sequence at SEQ ID NO 20985
atgaagccacaaactgcctgttcacccccacagggcattgaacatacagaaagaagagcgccactgcaacaaaccacccgcaatgacttatgccagcaagcggatgagaaacaatcaaggcccgagcttgagacgacgggacccgatattccctactcagtcttctctaatactatgattttgtatctaacctacttacttggatatcttgccctggcatcctcacttaccgcaacgatctatcttccaatcatagacctgttagccgagcgttatcatacgtcaattcaagctatcaatctgacaattactctttatgtgatattccagggcattgcgccctcattcttttcaccgctttccgatacactcggacgacggccagtgttcttgttcacgttcactttgtatctgcttgctggtatcggtctggtagaaaacgaaagctatgtgggactgttgcttctccgagcgctgcagagtgtgggtggaagcgcagtattgagtcttgcatatgctgttgttgccgacattgtccctcattcccgacgtggttcagtattgggcccaatgatggccgctactaatcttgggccctgtataggtccggtcttgggaggcggtgcaattcttgcaagcaacaatgccaaatggtgttttctaacactcgtgattttcggcacctcggcagtactactcattgggtggacaatgccagagaccggtagatcagttgtaggcaatggtctggtcgagcccaagggtatatgggtaacatggtggcagattttggtatcgagttctgagcgaagcaaatcacttgcgacgcatcactctcccgatgatgtcgaaagtggttctggaccttcatcgcagagctattctccgagcttgaaatcttctcaaagacaacttactcaagaaaatccgtcaggcccaatttctgaagacctgaattctggcaaaacgggcaggggcagtctctcggtgccaaatccatttgcttcatttcgaatactcttttatcgagacacggctctgattctctggctttgtgctacgccctacacagtctggtactgcgttcagacttcaatcccgcatatctatgccggatatggcttcaatgatctcgaggttggactctcctttctggctggcggcggcggcgtcattcttggtgggtatattgctggaaggctgatggattggggcttccgtaaaacagcagaagcagcaggtttacatgtgaatggcaagaaagacattgacatcagatcttttcctatcgaaaaggctagatcgacggggacaataccaataattattgtgtccatatttgccgttggtggctacgggtgggcagttcaagctaaagcgcatcctgcaataccattggttctccagttctatatgggtgcgaaatgcacaatactgcatcagatttatagtgcacttcttgtcgacatattcccctctcgtccaggcactgctggagcaagcaacaacatatgtcgctgtacattgtctgccgtagcagtcgccgtccttcagcccctagccaatgctataggatactcctggcttttcacactgcttgctctacttgaaggtcttaccggagtcgcagcaatatggacattacgacgtcgtggttgggaatggcgcaaggctagggaccaagagaactag

SEQ ID NO: 20985 - protein, 563 aa, Muscodor strobelii
  misc_feature: SGI Peptide ID NO. 567094
  misc_feature (67)..(514): Pfam Id: PF07690 Pfam Desc: Major Facilitator Superfamily
  misc_feature (49)..(559): NCBI GI: 39944636 Blast Desc: MGG_04329 [Magnaporthe grisea 70-15] gi|145015068|gb|EDJ99636.1| MGG_04329 [Magnaporthe grisea 70-15]
  misc_feature (51)..(550): NCBI GI: 67900580 Blast Desc: AN7277.2 [Aspergillus nidulans FGSC A4] gi|40741958|gb|EAA61148.1| AN7277.2 [Aspergillus nidulans FGSC A4]
  misc_feature (15)..(559): NCBI GI: 70993750 Blast Desc: MFS transporter [Aspergillus fumigatus Af293] gi|66849356|gb|EAL89684.1| MFS transporter, [Aspergillus fumigatus Af293] gi|159125356|gb|EDP50473.1| MFS transporter,
  misc_feature (42)..(559): NCBI GI: 115391291 Blast Desc: conserved [Aspergillus terreus NIH2624] gi|114194074|gb|EAU35774.1| conserved [Aspergillus terreus NIH2624]
  misc_feature (51)..(550): NCBI GI: 259483376 Blast Desc: TPA: conserved [Aspergillus nidulans FGSC A4]
  misc_feature (3)..(559): NCBI GI: 119500304 Blast Desc: MFS transporter, [Neosartorya fischeri NRRL 181] gi|119415074|gb|EAW25012.1| MFS transporter, [Neosartorya fischeri NRRL 181]
  misc_feature (14)..(559): NCBI GI: 121707893 Blast Desc: MFS transporter, [Aspergillus clavatus NRRL 1] gi|119400118|gb|EAW10544.1| MFS transporter, [Aspergillus clavatus NRRL 1]
  misc_feature (44)..(559): NCBI GI: 255947864 Blast Desc: Pc22g06710 [Penicillium chrysogenum Wisconsin 54-1255] gi|211591716|emb|CAP97959.1| Pc22g06710 [Penicillium chrysogenum Wisconsin 54-1255]
  misc_feature (33)..(557): NCBI GI: 256726048 Blast Desc: NECHADRAFT_43520 [Nectria haematococca mpVI 77-13-4]
  misc_feature (7)..(559): NCBI GI: 156031347 Blast Desc: SS1G_14095 [Sclerotinia sclerotiorum 1980] gi|154699497|gb|EDN99235.1| SS1G_14095 [Sclerotinia sclerotiorum 1980]
MKPQTACSPPQGIEHTERRAPLQQTTRNDLCQQADEKQSRPELETTGPDIPYSVFSNTMILYLTYLLGYLALASSLTATIYLPIIDLLAERYHTSIQAINLTITLYVIFQGIAPSFFSPLSDTLGRRPVFLFTFTLYLLAGIGLVENESYVGLLLLRALQSVGGSAVLSLAYAVVADIVPHSRRGSVLGPMMAATNLGPCIGPVLGGGAILASNNAKWCFLTLVIFGTSAVLLIGWTMPETGRSVVGNGLVEPKGIWVTWWQILVSSSERSKSLATHHSPDDVESGSGPSSQSYSPSLKSSQRQLTQENPSGPISEDLNSGKTGRGSLSVPNPFASFRILFYRDTALILWLCATPYTVWYCVQTSIPHIYAGYGFNDLEVGLSFLAGGGGVILGGYIAGRLMDWGFRKTAEAAGLHVNGKKDIDIRSFPIEKARSTGTIPIIIVSIFAVGGYGWAVQAKAHPAIPLVLQFYMGAKCTILHQIYSALLVDIFPSRPGTAGASNNICRCTLSAVAVAVLQPLANAIGYSWLFTLLALLEGLTGVAAIWTLRRRGWEWRKARDQEN

SEQ ID NO: 20986 - DNA, 2660 bp, Muscodor strobelii
  misc_feature: SGI EST ID NO. CUFF.49290.2
  misc_feature: Variant of the nucleotide sequence at SEQ ID NO 20984
caataatagggtccgattcatcgacacgtatgatttattagattcatatcctcacactaccttaattttgcgataatgaagccacaaactgcctgttcacccccacagggcattgaacatacagaaagaagagcgccactgcaacaaaccacccgcaatgacttatgccagcaagcggatgagaaacaatcaaggcccgagcttgagacgacgggacccgatattccctactcagtcttctctaatactatgattttgtatctaacctacttacttggatatcttgccctggcatcctcacttaccgcaacgatctatcttccaatcatagacctgttagccgagcgttatcatacgtcaattcaagctatcaatctgacaattactctttatgtgatattccagggcattgcgccctcattcttttcaccgctttccgatacactcggacgacggccagtgttcttgttcacgttcactttgtatctgcttgctggtatcggtctggtagaaaacgaaagctatgtgggactgttgcttctccgagcgctgcagagtgtgggtggaagcgcagtattgagtcttgcatatgctgttgttgccgacattgtccctcattcccgacgtggttcagtattgggcccaatgatggccgctactaatcttgggccctgtataggtccggtcttgggaggcggtgcaattcttgcaagcaacaatgccaaatggtgttttctaacactcgtgattttcggcacctcggcagtactactcattgggtggacaatgccagagaccggtagatcagttgtaggcaatggtctggtcgagcccaagggtatatgggtaacatggtggcagattttggtatcgagttctgagcgaagcaaatcacttgcgacgcatcactctcccgatgatgtcgaaagtggttctggaccttcatcgcagagctattctccgagcttgaaatcttctcaaagacaacttactcaagaaaatccgtcaggcccaatttctgaagacctgaattctggcaaaacgggcaggggcagtctctcggtgccaaatccatttgcttcatttcgaatactcttttatcgagacacggctctgattctctggctttgtgctacgccctacacagtctggtactgcgttcagacttcaatcccgcatatctatgccggatatggcttcaatgatctcgaggttggactctcctttctggctggcggcggcggcgtcattcttggtgggtatattgctggaaggctgatggattggggcttccgtaaaacagcagaagcagcaggtttacatgtgaatggcaagaaagacattgacatcagatcttttcctatcgaaaaggctagatcgacggggacaataccaataattattgtgtccatatttgccgttggtggctacgggtgggcagttcaagctaaagcgcatcctgcaataccattggttctccagttctatatgggtgcgaaatgcacaatactgcatcagatttatagtgcacttcttgtcgacatattcccctctcgtccaggcactgctggagcaagcaacaacatatgtcgctgtacattgtctgccgtagcagtcgccgtccttcagcccctagccaatgctataggatactcctggcttttcacactgcttgctctacttgaaggtcttaccggagtcgcagcaatatggacattacgacgtcgtggttgggaatggcgcaaggctagggaccaagagaactagctgcgggccgctttcgataaatactaagtacctaagtctatagatcggatgagtgacacacctaggcactgcgcttatacctcccgatgtattttgtgttattccttgcgtcgaaatgtgcacgaaatgcgtgcgcatcagaccctcgtctcgtatacacttggtaacatacaatacggggtagttcgcctttgtagtctagtggttatctgaaaggtctacgaattattcatttgaattcagacgagaagactgtggttatcttgtgcagaacccatttcgtatttttcgtctgtgggtctaacaggccgaatatactcggaattgttttccagataagttatctcccctcttcaagttccctggagtactgcgtattgaagctgcatattctcaaccgtataatctatattgcacaaattgcataaccgcctactatggatgagaggggggttgaatgtgcgcgcgcatttcggataaggactcaaacacgacctgagtctttttctatcttttatttaggacacaactcatctggtctcgcgagggtctcaaatgataccgcgtttggatgactcaaacaagtataagacgaaagaaagtgaaacctaaacaaatgacgaaattttattgtgtgctacttcctagtccaaatacgaatccattgctgtctcttatagtcgatcaatcaggcttggatatcagttccaacgtcgagctcggaacgacctttgaaggccaccgctacccgagaatccagattcggaagcgcccgaagtcttctacaacttcgttatcgtggtcgttctagcattgcccttgtcgctgatccaggcttcatagcctccagaatatttttcggtaagcttccgcatatcctcacgtacactgtt

SEQ ID NO: 20987 - DNA, 1911 bp, Muscodor strobelii
  misc_feature: SGI cDNA ID NO. 567095
  misc_feature: Encodes the peptide sequence at SEQ ID NO 20988
atgagtgccgtgaaaattcgcagctctcaaggtgcgtatgggacgcggcaccgataccagcgctatgatcacgtactgatatcagcaggttgctggacgtgtaggttgcgacggaagaagtgcgatgagatgaagccaatatgcaccatatgtagtaccttggaaatcagctgctattatagcgagtccaagccgacttggctcgatggtggagctttagagaaacagatggccgatgacctcaaggccatggtgaagcagaaagctaatgagaggcgggaacgaaaatggacgcaatctgacgtcgacatcagcacatcacaaagcgaacaacatcgatattcttctctagctatacgcaccggaggaggtccgtcccccagtgacgagggtgcgagcgacgatcatagctctagtactgggacaagtgggatttcgacatcccaggctgagaccgctccttcatcgaatgcgtcgccgccaggtacaagatggtctatggaagcagatagtatctctgccaatcttccgacttttccaaacgagcgatcagaagtcgaagtcattttcactatggtttatcttgactatgtggttcccttcttgttccctttctatcgtccatgtctggtcgagtcaagccgtggttggatgcttgcaatactaatgaagaatcgaacactctttcatacagctctgtcattagcaaattggctttatgctgtgatattagagagtgcagaggggagtcatagcgcttgtagagcagcgaactggacagagctccaaactcaacaggaaatagctatgaacgcaatgcaacaggacattaagtctctgaacgagcgtggcgttgctaactcgttcaccgactgtattagctgcatgcaaagtatgattcaactcctcgaattcgaggttgccacggcaaacacaacaaattggcagattcatctcgacgctgccattgtccttttcgatcagctgatcacgagccacgcttccgacaccgacaacccgtgggattcagtacaggaccgcatgtcctttcctcatgctaggcggccactgaagaatggccgaacgattctgacaagtgaccagtcaagttttcgattctatacagcatatctattatggttagatatagtcgctgcaactgcacgtggcgaggcgccgcgcttacaaaaataccatgccgagttgctcgagggtgactcacctgcaattcacctcagcgaatacgtaggttgccacaactgggtcatgatagagatatcaaacatagctcggcttgctgcgcgcaagcgtgaacaggtatccaaggaatcgctttcaatggacgaaatagtccaagacgcctgtgcaatcaacgaacgaatccagagcaaaatgaacgagctagagccatattcaacggcacgaacgagtaatatattcgacccttcatcgcaagctcctgtgacgccgtactcgagtctcagtcagatgtttgcccattccgaaccacgggccacgcctgcgcaggatcttcacacccgtatttgggcgcaggcggcaattacgtacttgacgatagtcgtctcaggactacagccaaacctccctgagatgcaaacaagtgtacaagccaccatagagatgttccgaggtctacaatcgccgctagttttacgaacaatgatatggcccttcgccataacgggctgtatggcctcaccagaagaagaagcctggtttgctgaagctgtgaacaatatgggcgcactgcaggctattggcaccgtcaaagagtcacttgctttgattcaggaagtctggaagcatagacagtgtatgtatggttccccagaaatatgggatgctgcgacctgttttagtgtgcttgggcatccatctttgctggtataa

SEQ ID NO: 20988 - protein, 636 aa, Muscodor strobelii
  misc_feature: SGI Peptide ID NO. 567095
  misc_feature (29)..(67): Pfam Id: PF00172 Pfam Desc: Fungal Zn(2)-Cys(6) binuclear cluster domain
  misc_feature (28)..(636): NCBI GI: 256734789 Blast Desc: NECHADRAFT_98980 [Nectria haematococca mpVI 77-13-4]
  misc_feature (28)..(636): NCBI GI: 46107782 Blast Desc: FG00774.1 [Gibberella zeae PH-1]
  misc_feature (28)..(636): NCBI GI: 116181342 Blast Desc: CHGG_01299 [Chaetomium globosum CBS 148.51] gi|88185596|gb|EAQ93064.1| CHGG_01299 [Chaetomium globosum CBS 148.51]
  misc_feature (28)..(636): NCBI GI: 171695546 Blast Desc: protein product [Podospora anserina] gi|170948015|emb|CAP60179.1| protein product [Podospora anserina]
  misc_feature (68)..(636): NCBI GI: 261361433 Blast Desc: conserved [Verticillium albo-atrum VaMs.102]
  misc_feature (28)..(636): NCBI GI: 256722519 Blast Desc: NECHADRAFT_35055 [Nectria haematococca mpVI 77-13-4]
  misc_feature (68)..(636): NCBI GI: 145614092 Blast Desc: MGG_08974 [Magnaporthe grisea 70-15] gi|145021067|gb|EDK05196.1| MGG_08974 [Magnaporthe grisea 70-15]
  misc_feature (28)..(636): NCBI GI: 256727904 Blast Desc: NECHADRAFT_83501 [Nectria haematococca mpVI 77-13-4]
  misc_feature (28)..(610): NCBI GI: 154308110 Blast Desc: BC1G_08222 [Botryotinia fuckeliana B05.10] gi|150853107|gb|EDN28299.1| BC1G_08222 [Botryotinia fuckeliana B05.10]
  misc_feature (31)..(597): NCBI GI: 46119035 Blast Desc: FG04747.1 [Gibberella zeae PH-1]
MSAVKIRSSQGAYGTRHRYQRYDHVLISAGCWTCRLRRKKCDEMKPICTICSTLEISCYYSESKPTWLDGGALEKQMADDLKAMVKQKANERRERKWTQSDVDISTSQSEQHRYSSLAIRTGGGPSPSDEGASDDHSSSTGTSGISTSQAETAPSSNASPPGTRWSMEADSISANLPTFPNERSEVEVIFTMVYLDYVVPFLFPFYRPCLVESSRGWMLAILMKNRTLFHTALSLANWLYAVILESAEGSHSACRAANWTELQTQQEIAMNAMQQDIKSLNERGVANSFTDCISCMQSMIQLLEFEVATANTTNWQIHLDAAIVLFDQLITSHASDTDNPWDSVQDRMSFPHARRPLKNGRTILTSDQSSFRFYTAYLLWLDIVAATARGEAPRLQKYHAELLEGDSPAIHLSEYVGCHNWVMIEISNIARLAARKREQVSKESLSMDEIVQDACAINERIQSKMNELEPYSTARTSNIFDPSSQAPVTPYSSLSQMFAHSEPRATPAQDLHTRIWAQAAITYLTIVVSGLQPNLPEMQTSVQATIEMFRGLQSPLVLRTMIWPFAITGCMASPEEEAWFAEAVNNMGALQAIGTVKESLALIQEVWKHRQCMYGSPEIWDAATCFSVLGHPSLLV

SEQ ID NO: 20989 - DNA, 2707 bp, Muscodor strobelii
  misc_feature: SGI EST ID NO. CUFF.49294.0
  misc_feature: Variant of the nucleotide sequence at SEQ ID NO 20987
tctaggtgcctcaactaggtacaaacattgattcttggcgtcagtagttctacatcctgaccctttctgacaagattcaaccttctgggtcttctgtgtccatcctataaattagcgaaggaatatatttgatatgaacctagcgaccctttgatatcggaacgacaaagtgcaccatcgctttcagctctgtcgcctttcaattagcattggtgcgatcggatgacaaatctcgacaaccctgaatagtgcctgcagaacagtcaaagcatatctagatgcaccattttcgggtcggcgcccaattcttaacactatttatcatcttagtatcacgctgagattttcaacggatcttgaacagagcgatatgagtgccgtgaaaattcgcagctctcaaggttgctggacgtgtaggttgcgacggaagaagtgcgatgagatgaagccaatatgcaccatatgtagtaccttggaaatcagctgctattatagcgagtccaagccgacttggctcgatggtggagctttagagaaacagatggccgatgacctcaaggccatggtgaagcagaaagctaatgagaggcgggaacgaaaatggacgcaatctgacgtcgacatcagcacatcacaaagcgaacaacatcgatattcttctctagctatacgcaccggaggaggtccgtcccccagtgacgagggtgcgagcgacgatcatagctctagtactgggacaagtgggatttcgacatcccaggctgagaccgctccttcatcgaatgcgtcgccgccaggtacaagatggtctatggaagcagatagtatctctgccaatcttccgacttttccaaacgagcgatcagaagtcgaagtcattttcactatggtttatcttgactatgtggttcccttcttgttccctttctatcgtccatgtctggtcgagtcaagccgtggttggatgcttgcaatactaatgaagaatcgaacactctttcatacagctctgtcattagcaaattggctttatgctgtgatattagagagtgcagaggggagtcatagcgcttgtagagcagcgaactggacagagctccaaactcaacaggaaatagctatgaacgcaatgcaacaggacattaagtctctgaacgagcgtggcgttgctaactcgttcaccgactgtattagctgcatgcaaagtatgattcaactcctcgaattcgaggttgccacggcaaacacaacaaattggcagattcatctcgacgctgccattgtccttttcgatcagctgatcacgagccacgcttccgacaccgacaacccgtgggattcagtacaggaccgcatgtcctttcctcatgctaggcggccactgaagaatggccgaacgattctgacaagtgaccagtcaagttttcgattctatacagcatatctattatggttagatatagtcgctgcaactgcacgtggcgaggcgccgcgcttacaaaaataccatgccgagttgctcgagggtgactcacctgcaattcacctcagcgaatacgtaggttgccacaactgggtcatgatagagatatcaaacatagctcggcttgctgcgcgcaagcgtgaacaggtatccaaggaatcgctttcaatggacgaaatagtccaagacgcctgtgcaatcaacgaacgaatccagagcaaaatgaacgagctagagccatattcaacggcacgaacgagtaatatattcgacccttcatcgcaagctcctgtgacgccgtactcgagtctcagtcagatgtttgcccattccgaaccacgggccacgcctgcgcaggatcttcacacccgtatttgggcgcaggcggcaattacgtacttgacgatagtcgtctcaggactacagccaaacctccctgagatgcaaacaagtgtacaagccaccatagagatgttccgaggtctacaatcgccgctagttttacgaacaatgatatggcccttcgccataacgggctgtatggcctcaccagaagaagaagcctggtttgctgaagctgtgaacaatatgggcgcactgcaggctattggcaccgtcaaagagtcacttgctttgattcaggaagtctggaagcatagacagtgtatgtatggttccccagaaatatgggatgctgcgacctgttttagtgtgcttgggcatccatctttgctggtataagaaatatgaattatttgcttcgaaccataatagacacgccgtcgtcaaattgatagcgtttcgaacacgtacagaaaagactgattgtatctatgaggttctatttcagggttaagatatgtgtacggggattctttgaaagacccttcgtgatgccaagtcatcgaaagtaatgaaggaatgatagatttgtttttatgcctaatacacatatgtccgcaaaagaaacattatgttctgccatttagccgtatccagagctagggaaatgttcaaaacaactagatagatgtctagcctgtgcctggctaaaacctctgttacccgttgttttgaacagtgtatcattcggtattggcgcatagttgatctcttttcgcctgtatttctgcgcgaagaccgtacagattcagcaccaacttggttgcctaccttactctcatatgtagtctgtcgtaagtcactacaggccaatcgcctctt

SEQ ID NO: 20990 - DNA, 1104 bp, Muscodor strobelii
  misc_feature: SGI cDNA ID NO. 567096
  misc_feature: Encodes the peptide sequence at SEQ ID NO 20991
atgaacgcaatgcaacaggacattaagtctctgaacgagcgtggcgttgctaactcgttcaccgactgtattagctgcatgcaaagtatgattcaactcctcgaattcgaggttgccacggcaaacacaacaaattggcagattcatctcgacgctgccattgtccttttcgatcagctgatcacgagccacgcttccgacaccgacaacccgtgggattcagtacaggaccgcatgtcctttcctcatgctaggcggccactgaagaatggccgaacgattctgacaagtgaccagtcaagttttcgattctatacagcatatctattatggttagatatagtcgctgcaactgcacgtggcgaggcgccgcgcttacaaaaataccatgccgagttgctcgagggtgactcacctgcaattcacctcagcgaatacgtaggttgccacaactgggtcatgatagagatatcaaacatagctcggcttgctgcgcgcaagcgtgaacaggtatccaaggaatcgctttcaatggacgaaatagtccaagacgcctgtgcaatcaacgaacgaatccagagcaaaatgaacgagctagagccatattcaacggcacgaacgagtaatatattcgacccttcatcgcaagctcctgtgacgccgtactcgagtctcagtcagatgtttgcccattccgaaccacgggccacgcctgcgcaggatcttcacacccgtatttgggcgcaggcggcaattacgtacttgacgatagtcgtctcaggactacagccaaacctccctgagatgcaaacaagtgtacaagccaccatagagatgttccgaggtctacaatcgccgctagttttacgaacaatgatatggcccttcgccataacgggctgtatggcctcaccagaagaagaagcctggtttgctgaagctgtgaacaatatgggcgcactgcaggctattggcaccgtcaaagagtcacttgctttgattcaggaagtctggaagcatagacagtgtatgtatggttccccagaaatatgggatgctgcgacctgttttagtgtgcttgggcatccatctttgctggtataa

SEQ ID NO: 20991 - protein, 367 aa, Muscodor strobelii
  misc_feature: SGI Peptide ID NO. 567096
  misc_feature (4)..(367): NCBI GI: 116181342 Blast Desc: CHGG_01299 [Chaetomium globosum CBS 148.51] gi|88185596|gb|EAQ93064.1| CHGG_01299 [Chaetomium globosum CBS 148.51]
  misc_feature (1)..(367): NCBI GI: 256734789 Blast Desc: NECHADRAFT_98980 [Nectria haematococca mpVI 77-13-4]
  misc_feature (4)..(367): NCBI GI: 171695546 Blast Desc: protein product [Podospora anserina] gi|170948015|emb|CAP60179.1| protein product [Podospora anserina]
  misc_feature (1)..(367): NCBI GI: 46107782 Blast Desc: FG00774.1 [Gibberella zeae PH-1]
  misc_feature (1)..(367): NCBI GI: 261361433 Blast Desc: conserved [Verticillium albo-atrum VaMs.102]
  misc_feature (1)..(367): NCBI GI: 145614092 Blast Desc: MGG_08974 [Magnaporthe grisea 70-15] gi|145021067|gb|EDK05196.1| MGG_08974 [Magnaporthe grisea 70-15]
  misc_feature (4)..(357): NCBI GI: 242805508 Blast Desc: conserved [Talaromyces stipitatus ATCC 10500] gi|218715171|gb|EED14593.1| conserved [Talaromyces stipitatus ATCC 10500]
  misc_feature (1)..(367): NCBI GI: 256722519 Blast Desc: NECHADRAFT_35055 [Nectria haematococca mpVI 77-13-4]
  misc_feature (1)..(367): NCBI GI: 169625124 Blast Desc: SNOG_15831 [Phaeosphaeria nodorum SN15] gi|111055549|gb|EAT76669.1| SNOG_15831 [Phaeosphaeria nodorum SN15]
  misc_feature (1)..(367): NCBI GI: 256727904 Blast Desc: NECHADRAFT_83501 [Nectria haematococca mpVI 77-13-4]
MNAMQQDIKSLNERGVANSFTDCISCMQSMIQLLEFEVATANTTNWQIHLDAAIVLFDQLITSHASDTDNPWDSVQDRMSFPHARRPLKNGRTILTSDQSSFRFYTAYLLWLDIVAATARGEAPRLQKYHAELLEGDSPAIHLSEYVGCHNWVMIEISNIARLAARKREQVSKESLSMDEIVQDACAINERIQSKMNELEPYSTARTSNIFDPSSQAPVTPYSSLSQMFAHSEPRATPAQDLHTRIWAQAAITYLTIVVSGLQPNLPEMQTSVQATIEMFRGLQSPLVLRTMIWPFAITGCMASPEEEAWFAEAVNNMGALQAIGTVKESLALIQEVWKHRQCMYGSPEIWDAATCFSVLGHPSLLV

SEQ ID NO: 20992 - DNA, 2707 bp, Muscodor strobelii; identical to SEQ ID NO: 20989
  misc_feature: SGI EST ID NO. CUFF.49294.0
  misc_feature: Variant of the nucleotide sequence at SEQ ID NO 20990

SEQ ID NO: 20993 - DNA, 1854 bp, Muscodor strobelii
  misc_feature: SGI cDNA ID NO. 567097
  misc_feature: Encodes the peptide sequence at SEQ ID NO 20994
atgagtgccgtgaaaattcgcagctctcaaggttgctggacgtgtaggttgcgacggaagaagtgcgatgagatgaagccaatatgcaccatatgtagtaccttggaaatcagctgctattatagcgagtccaagccgacttggctcgatggtggagctttagagaaacagatggccgatgacctcaaggccatggtgaagcagaaagctaatgagaggcgggaacgaaaatggacgcaatctgacgtcgacatcagcacatcacaaagcgaacaacatcgatattcttctctagctatacgcaccggaggaggtccgtcccccagtgacgagggtgcgagcgacgatcatagctctagtactgggacaagtgggatttcgacatcccaggctgagaccgctccttcatcgaatgcgtcgccgccaggtacaagatggtctatggaagcagatagtatctctgccaatcttccgacttttccaaacgagcgatcagaagtcgaagtcattttcactatggtttatcttgactatgtggttcccttcttgttccctttctatcgtccatgtctggtcgagtcaagccgtggttggatgcttgcaatactaatgaagaatcgaacactctttcatacagctctgtcattagcaaattggctttatgctgtgatattagagagtgcagaggggagtcatagcgcttgtagagcagcgaactggacagagctccaaactcaacaggaaatagctatgaacgcaatgcaacaggacattaagtctctgaacgagcgtggcgttgctaactcgttcaccgactgtattagctgcatgcaaagtatgattcaactcctcgaattcgaggttgccacggcaaacacaacaaattggcagattcatctcgacgctgccattgtccttttcgatcagctgatcacgagccacgcttccgacaccgacaacccgtgggattcagtacaggaccgcatgtcctttcctcatgctaggcggccactgaagaatggccgaacgattctgacaagtgaccagtcaagttttcgattctatacagcatatctattatggttagatatagtcgctgcaactgcacgtggcgaggcgccgcgcttacaaaaataccatgccgagttgctcgagggtgactcacctgcaattcacctcagcgaatacgtaggttgccacaactgggtcatgatagagatatcaaacatagctcggcttgctgcgcgcaagcgtgaacaggtatccaaggaatcgctttcaatggacgaaatagtccaagacgcctgtgcaatcaacgaacgaatccagagcaaaatgaacgagctagagccatattcaacggcacgaacgagtaatatattcgacccttcatcgcaagctcctgtgacgccgtactcgagtctcagtcagatgtttgcccattccgaaccacgggccacgcctgcgcaggatcttcacacccgtatttgggcgcaggcggcaattacgtacttgacgatagtcgtctcaggactacagccaaacctccctgagatgcaaacaagtgtacaagccaccatagagatgttccgaggtctacaatcgccgctagttttacgaacaatgatatggcccttcgccataacgggctgtatggcctcaccagaagaagaagcctggtttgctgaagctgtgaacaatatgggcgcactgcaggctattggcaccgtcaaagagtcacttgctttgattcaggaagtctggaagcatagacagtgtatgtatggttccccagaaatatgggatgctgcgacctgttttagtgtgcttgggcatccatctttgctggtataa

SEQ ID NO: 20994 - protein, 617 aa, Muscodor strobelii
  misc_feature: SGI Peptide ID NO. 567097
  misc_feature (10)..(48): Pfam Id: PF00172 Pfam Desc: Fungal Zn(2)-Cys(6) binuclear cluster domain
  misc_feature (1)..(617): NCBI GI: 256734789 Blast Desc: NECHADRAFT_98980 [Nectria haematococca mpVI 77-13-4]
  misc_feature (5)..(617): NCBI GI: 46107782 Blast Desc: FG00774.1 [Gibberella zeae PH-1]
  misc_feature (5)..(617): NCBI GI: 171695546 Blast Desc: protein product [Podospora anserina] gi|170948015|emb|CAP60179.1| protein product [Podospora anserina]
  misc_feature (7)..(617): NCBI GI: 116181342 Blast Desc: CHGG_01299 [Chaetomium globosum CBS 148.51] gi|88185596|gb|EAQ93064.1| CHGG_01299 [Chaetomium globosum CBS 148.51]
  misc_feature (49)..(617): NCBI GI: 261361433 Blast Desc: conserved [Verticillium albo-atrum VaMs.102]
  misc_feature (7)..(617): NCBI GI: 256722519 Blast Desc: NECHADRAFT_35055 [Nectria haematococca mpVI 77-13-4]
  misc_feature (49)..(617): NCBI GI: 145614092 Blast Desc: MGG_08974 [Magnaporthe grisea 70-15] gi|145021067|gb|EDK05196.1| MGG_08974 [Magnaporthe grisea 70-15]
  misc_feature (8)..(617): NCBI GI: 256727904 Blast Desc: NECHADRAFT_83501 [Nectria haematococca mpVI 77-13-4]
  misc_feature (7)..(591): NCBI GI: 154308110 Blast Desc: BC1G_08222 [Botryotinia fuckeliana B05.10] gi|150853107|gb|EDN28299.1| BC1G_08222 [Botryotinia fuckeliana B05.10]
  misc_feature (12)..(578): NCBI GI: 46119035 Blast Desc: FG04747.1 [Gibberella zeae PH-1]
MSAVKIRSSQGCWTCRLRRKKCDEMKPICTICSTLEISCYYSESKPTWLDGGALEKQMADDLKAMVKQKANERRERKWTQSDVDISTSQSEQHRYSSLAIRTGGGPSPSDEGASDDHSSSTGTSGISTSQAETAPSSNASPPGTRWSMEADSISANLPTFPNERSEVEVIFTMVYLDYVVPFLFPFYRPCLVESSRGWMLAILMKNRTLFHTALSLANWLYAVILESAEGSHSACRAANWTELQTQQEIAMNAMQQDIKSLNERGVANSFTDCISCMQSMIQLLEFEVATANTTNWQIHLDAAIVLFDQLITSHASDTDNPWDSVQDRMSFPHARRPLKNGRTILTSDQSSFRFYTAYLLWLDIVAATARGEAPRLQKYHAELLEGDSPAIHLSEYVGCHNWVMIEISNIARLAARKREQVSKESLSMDEIVQDACAINERIQSKMNELEPYSTARTSNIFDPSSQAPVTPYSSLSQMFAHSEPRATPAQDLHTRIWAQAAITYLTIVVSGLQPNLPEMQTSVQATIEMFRGLQSPLVLRTMIWPFAITGCMASPEEEAWFAEAVNNMGALQAIGTVKESLALIQEVWKHRQCMYGSPEIWDAATCFSVLGHPSLLV

SEQ ID NO: 20995 - DNA, 2707 bp, Muscodor strobelii; identical to SEQ ID NO: 20989
  misc_feature: SGI EST ID NO. CUFF.49294.0
  misc_feature: Variant of the nucleotide sequence at SEQ ID NO 20993

SEQ ID NO: 20996 - DNA, 654 bp, Muscodor strobelii
  misc_feature: SGI cDNA ID NO. 567098
  misc_feature: Encodes the peptide sequence at SEQ ID NO 20997
atggcgcagcattcgacattcgccttcacaccacctggagccgatccgacaagtacagcaagcgcaagcgggatggacggtatggatggtatgcaagggacgagtggcatggacaatatgggcggtgatacgggaagctgtaaaatatccatgctgtggaattggaatactattgatgcttgtttcctatccgaggaatggcagatcaagagccaaggggggtttgccgggctgtgtattggtgtcatcctcctcgtgatgtttcttgaattcctccgccgcctctccaagacgtacgatcgatacttgattcgacaacatcagaaaaaggctactgtattagctgtcccaccagctaacagctcagccgatggctcgctcattgcgaaagatcaagcgcctctcttactcacagctccctttcgtcccagcatctcccaacaagcagttcgtgctttgttgcataccttgcaattcgcaacggcatattggatcatgcttctggccatgtactataacggattcgtcattataagcatatttatcggcgcatacattggggcttttatatttcaatgggagcagtttggtcctcgaaacgacggtgctgcgataccaggtacaattcaagaagcaacaggctgttgtggctga

SEQ ID NO: 20997 - protein, 217 aa, Muscodor strobelii
  misc_feature: SGI Peptide ID NO. 567098
  misc_feature (49)..(198): Pfam Id: PF04145 Pfam Desc: Ctr copper transporter family
  misc_feature (21)..(217): NCBI GI: 261361329 Blast Desc: copper transport protein ctr4 [Verticillium albo-atrum VaMs.102]
  misc_feature (16)..(217): NCBI GI: 256734788 Blast Desc: [Nectria haematococca mpVI 77-13-4]
  misc_feature (28)..(217): NCBI GI: 46107780 Blast Desc: FG00773.1 [Gibberella zeae PH-1]
  misc_feature (47)..(217): NCBI GI: 169600159 Blast Desc: SNOG_02909 [Phaeosphaeria nodorum SN15] gi|160705392|gb|EAT89640.2| SNOG_02909 [Phaeosphaeria nodorum SN15]
  misc_feature (47)..(217): NCBI GI: 116191095 Blast Desc: CHGG_05265 [Chaetomium globosum CBS 148.51] gi|88181178|gb|EAQ88646.1| CHGG_05265 [Chaetomium globosum CBS 148.51]
  misc_feature (9)..(217): NCBI GI: 242818288 Blast Desc: Ctr copper transporter family protein [Talaromyces stipitatus ATCC 10500] gi|218713552|gb|EED12976.1| Ctr copper transporter family protein [Talaromyces stipitatus ATCC 10500]
  misc_feature (37)..(217): NCBI GI: 115442664 Blast Desc: ATEG_09517 [Aspergillus terreus NIH2624] gi|114188008|gb|EAU29708.1| ATEG_09517 [Aspergillus terreus NIH2624]
  misc_feature (1)..(217): NCBI GI: 212530582 Blast Desc: Ctr copper transporter family protein [Penicillium marneffei ATCC 18224] gi|212530584|ref|XP_002145449.1| Ctr copper transporter family protein [Penicillium marneffei ATCC 18224] Ctr
  misc_feature (18)..(217): NCBI GI: 238499567 Blast Desc: Ctr copper transporter family protein [Aspergillus flavus NRRL3357] gi|220692771|gb|EED49117.1| Ctr copper transporter family protein [Aspergillus flavus NRRL3357]
  misc_feature (27)..(217): NCBI GI: 255943153 Blast Desc: Pc18g05180 [Penicillium chrysogenum Wisconsin 54-1255] gi|211587078|emb|CAP94742.1| Pc18g05180 [Penicillium chrysogenum Wisconsin 54-1255]
MAQHSTFAFTPPGADPTSTASASGMDGMDGMQGTSGMDNMGGDTGSCKISMLWNWNTIDACFLSEEWQIKSQGGFAGLCIGVILLVMFLEFLRRLSKTYDRYLIRQHQKKATVLAVPPANSSADGSLIAKDQAPLLLTAPFRPSISQQAVRALLHTLQFATAYWIMLLAMYYNGFVIISIFIGAYIGAFIFQWEQFGPRNDGAAIPGTIQEATGCCG

SEQ ID NO: 20998 - DNA, 799 bp, Muscodor strobelii
  misc_feature: SGI EST ID NO. CUFF.49300.0
  misc_feature: Variant of the nucleotide sequence at SEQ ID NO 20996
catgctggcatagtcttggaattcgcctggaacctatacttctcgatgtcacatacatgcacttatggtttctgcatttagcattctcaagcaacaaatcagtcaatccgaatgtcggatccgaatccgacgttaactacaacaatggcgcagcattcgacattcgccttcacaccacctggagccgatccgacaagtacagcaagcgcaagcgggatggacggtatggatggtatgcaagggacgagtggcatggacaatatgggcggtgatacgggaagctgtaaaatatccatgctgtggaattggaatactattgatgcttgtttcctatccgaggaatggcagatcaagagccaaggggggtttgccgggctgtgtattggtgtcatcctcctcgtgatgtttcttgaattcctccgccgcctctccaagacgtacgatcgatacttgattcgacaacatcagaaaaaggctactgtattagctgtcccaccagctaacagctcagccgatggctcgctcattgcgaaagatcaagcgcctctcttactcacagctccctttcgtcccagcatctcccaacaagcagttcgtgctttgttgcataccttgcaattcgcaacggcatattggatcatgcttctggccatgtactataacggattcgtcattataagcatatttatcggcgcatacattggggcttttatatttcaatgggagcagtttggtcctcgaaacgacggtgctgcgataccaggtacaattcaagaagcaacaggctgttgtggctgag

SEQ ID NO: 20999 - DNA, 1137 bp, Muscodor strobelii
  misc_feature: SGI cDNA ID NO. 567099
  misc_feature: Encodes the peptide sequence at SEQ ID NO 21000
atgaccggtgcacgaactgtattatcgaaaatgtcaaaactattcaagcccacgagtctcggcactctctcgctagatcaccgagtagcaatggccccattgacgcgatatcgctctgatgaagaatgggtaccactatcaatggcacgagagtactaccagcaaagagcgtcagtgcctggtactctcctaattagcgaagctacgctgatttcgagttccgcaatctgtcgttacaacgtacctggactgtttaatgaagcacagatagagagatggaaagagatcaccgatgcagtacacgagaagagctcatttatctactgtcagatctggcacctcggccgtgccggatggccacaaattcacaaggagagaggtaccaagttcgcttcatccagcgctgtctgcatagaagagtctagaggcgtgccggatgaattgacagaaagtgaaatatgggacatcataagcgactacgctactgcagcgaagaatgcgattaaagccggatttgacggcgtggagctgcacggtgccaatggctacttaattgatcaatttacgcaagacaattgcaatcggagaaccgatgcgtggggtgggagtgttgagaagcgagcaagatttgctctcgaagttactaaggcggtcgtcgatgccattggagccgacaagaccgcaatacgattgagcccctttagtactttccaaggcatgctcatggaggatccatatcctcaattcgaatacctggtcaaggaacttaaatcttttaatttatcctatcttcacctcgttgaagctcgcatcgctggaaacatagaagcagactacagcgctgatcacaacgtgggatcttttatcaggctctggaataatcagagcccggtagtcctggctggcgggtttactcccgaatcggcgttcaaggttgtcgatgagacatatgcggattgcgatatcatcatcgcttttggcagatacttcatttcaaaccccgaccttgtgtacagattgaaggaggggatcgatttcgccaaatatgatcgatcaacattttacacacccaagaaagcagcaggctacatagacttgcccttcagtcctcaatttcagatgcaggaagggctataa

SEQ ID NO: 21000 - protein, 378 aa, Muscodor strobelii
  misc_feature: SGI Peptide ID NO. 567099
  misc_feature (13)..(347): Pfam Id: PF00724 Pfam Desc: NADH:flavin oxidoreductase / NADH oxidase family
  misc_feature (12)..(375): NCBI GI: 154318608 Blast Desc: NADPH dehydrogenase [Botryotinia fuckeliana B05.10] gi|150857823|gb|EDN33015.1| NADPH dehydrogenase [Botryotinia fuckeliana B05.10]
  misc_feature (12)..(376): NCBI GI: 156063746 Blast Desc: SS1G_01991 [Sclerotinia sclerotiorum 1980] gi|154697325|gb|EDN97063.1| SS1G_01991 [Sclerotinia sclerotiorum 1980]
  misc_feature (12)..(372): NCBI GI: 256728348 Blast Desc: NECHADRAFT_54107 [Nectria haematococca mpVI 77-13-4]
  misc_feature (11)..(373): NCBI GI: 255943375 Blast Desc: Pc18g06290 [Penicillium chrysogenum Wisconsin 54-1255] gi|211587189|emb|CAP94853.1| Pc18g06290 [Penicillium chrysogenum Wisconsin 54-1255]
  misc_feature (12)..(373): NCBI GI: 169598728 Blast Desc: SNOG_02169 [Phaeosphaeria nodorum SN15] gi|111069261|gb|EAT90381.1| SNOG_02169 [Phaeosphaeria nodorum SN15]
  misc_feature (12)..(372): NCBI GI: 256727818 Blast Desc: NECHADRAFT_46448 [Nectria haematococca mpVI 77-13-4]
  misc_feature (12)..(373): NCBI GI: 169767956 Blast Desc: [Aspergillus oryzae RIB40] gi|83766304|dbj|BAE56447.1| protein product [Aspergillus oryzae]
  misc_feature (12)..(373): NCBI GI: 238484885 Blast Desc: NADH:flavin oxidoreductase/NADH oxidase family protein [Aspergillus flavus NRRL3357] gi|220701731|gb|EED58069.1| NADH:flavin oxidoreductase/NADH oxidase family protein flavus
  misc_feature (12)..(372): NCBI GI: 115436982 Blast Desc: ATEG_09073 [Aspergillus terreus NIH2624] gi|114188510|gb|EAU30210.1| ATEG_09073 [Aspergillus terreus NIH2624]
  misc_feature (11)..(373): NCBI GI: 121710322 Blast Desc: NADH:flavin oxidoreductase/NADH oxidase family protein [Aspergillus clavatus NRRL 1] gi|119400927|gb|EAW11351.1| NADH:flavin oxidoreductase/NADH oxidase family protein clavatus
  misc_feature (1)..(367): SWISSPROT Homolog: EC 1.6.99.1 NADPH dehydrogenase
MTGARTVLSKMSKLFKPTSLGTLSLDHRVAMAPLTRYRSDEEWVPLSMAREYYQQRASVPGTLLISEATLISSSAICRYNVPGLFNEAQIERWKEITDAVHEKSSFIYCQIWHLGRAGWPQIHKERGTKFASSSAVCIEESRGVPDELTESEIWDIISDYATAAKNAIKAGFDGVELHGANGYLIDQFTQDNCNRRTDAWGGSVEKRARFALEVTKAVVDAIGADKTAIRLSPFSTFQGMLMEDPYPQFEYLVKELKSFNLSYLHLVEARIAGNIEADYSADHNVGSFIRLWNNQSPVVLAGGFTPESAFKVVDETYADCDIIIAFGRYFISNPDLVYRLKEGIDFAKYDRSTFYTPKKAAGYIDLPFSPQFQMQEGL

SEQ ID NO: 21001 - DNA, 1504 bp, Muscodor strobelii
  misc_feature: SGI EST ID NO. CUFF.49306.2
  misc_feature: Variant of the nucleotide sequence at SEQ ID NO 20999
tgactacatacagctcagcatacacacgtatggttgcgctataggattcatatgttcagtgatgatctcatacaaatctctgatgactgaggggtcttcctgcataaggagtaaatggaagaagttccctgagtggagtaataagatcaagtggaacacataggagggccatctgcattttcaagacatgcgttgagaacctctttcaacatctttatgttcctacaaagcgaatacccagtttttcacataatgaccggtgcacgaactgtattatcgaaaatgtcaaaactattcaagcccacgagtctcggcactctctcgctagatcaccgagtagcaatggccccattgacgcgatatcgctctgatgaagaatgggtaccactatcaatggcacgaggtaaggtctgggcttgcaaacattgtctaccaatgtttccgatcattttgattgccaaaatcaatcctgcgctgatacaagacagagtactaccagcaaagagcgtcagtgcctggtactctcctaattagcgaagctacgctgatttcgagttccgcaatctgtcgttacaacgtacctggactgtttaatgaagcacagatagagagatggaaagagatcaccgatgcagtacacgagaagagctcatttatctactgtcagatctggcacctcggccgtgccggatggccacaaattcacaaggagagaggtaccaagttcgcttcatccagcgctgtctgcatagaagagtctagaggcgtgccggatgaattgacagaaagtgaaatatgggacatcataagcgactacgctactgcagcgaagaatgcgattaaagccggatttgacggcgtggagctgcacggtgccaatggctacttaattgatcaatttacgcaagacaattgcaatcggagaaccgatgcgtggggtgggagtgttgagaagcgagcaagatttgctctcgaagttactaaggcggtcgtcgatgccattggagccgacaagaccgcaatacgattgagcccctttagtactttccaaggcatgctcatggaggatccatatcctcaattcgaatacctggtcaaggaacttaaatcttttaatttatcctatcttcacctcgttgaagctcgcatcgctggaaacatagaagcagactacagcgctgatcacaacgtgggatcttttatcaggctctggaataatcagagcccggtagtcctggctggcgggtttactcccgaatcggcgttcaaggttgtcgatgagacatatgcggattgcgatatcatcatcgcttttggcagatacttcatttcaaaccccgaccttgtgtacagattgaaggaggggatcgatttcgccaaatatgatcgatcaacattttacacacccaagaaagcagcaggctacatagacttgcccttcagtcctcaatttcagatgcaggaagggctataaatataatagatggaatatagtagagcacaa

SEQ ID NO: 21002 - DNA, 1056 bp, Muscodor strobelii
  misc_feature: SGI cDNA ID NO. 567100
  misc_feature: Elevated expression when VOC is produced
  misc_feature: Encodes the peptide sequence at SEQ ID NO 21003
atgattaacgcaagattatcggtgatgccagagatataccacgcccacccggacttcgcttttgatcgcgactttaaaggatatggcgaacaaggcatagacccgaaatggcctaataacgcaaagatcgcggtctcttttgtgataaactatgaagaggggggagagcggagtgtattaaatggggatggaggtgtgtataaaacagtcccgttccccttttcaattcgttatgttatagaaggatctgtgctaatttgtgtgacagtccgcctagaatcaatgaacgcaattgacaacgccgagtccgaatatgaatatggaagccgagccggattctggaggatattccgattatttaataacttgaaaatgaaattcacattgtacgccgtagcacaggcagtcgagcagcaacccgaggtggtcaagcgatgcgtagaggaaggccatgatgttgcgtcgcatgcataccgatggatcgagtatcatgatatgccaatcgaaaaggaaaaagagtacattcgaaaggccatcgtatcactgaagaacctcgctggatacgctcctagagggtggtactatggacggaatagtcctcactcgcgaacactagtgcctcaagtgtacgaggagatgggcgagacactcgagtgggtcagtgatacatatgccgacgatgtgccttattggattgatctacctttcgaacgtgattgtccaaatccgaagggttgtcttatggttccctactcttacgactgcaacgatttcaaatttcatactgttggttctgggtttcgtgaccccgaaggcttctttaatcatctcaaaaatgccttcgatgtgctttatgaagagggtgaagcaggcatgtcaaagatgatgacaatcggtcttcattgtcgtattatcggacgacctggtcgatttggagcacttaagaaatttgccgagtatattaatcagaaggatggcgtctgggtagcaacaagaagtgagatcgcggaagaattcaagaagaatcatccatacagaaaggggtatttggcatga

SEQ ID NO: 21003 - protein, 351 aa, Muscodor strobelii
  misc_feature: SGI Peptide ID NO. 567100
  misc_feature (51)..(218): Pfam Id: PF01522 Pfam Desc: Polysaccharide deacetylase
  misc_feature (105)..(193): Pfam Id: PF01522 Pfam Desc: Polysaccharide deacetylase
  misc_feature (9)..(351): NCBI GI: 67904680 Blast Desc: AN9327.2 [Aspergillus nidulans FGSC A4] gi|40747238|gb|EAA66394.1| AN9327.2 [Aspergillus nidulans FGSC A4] gi|259488164|tpe|CBF87411.1| TPA: conserved [Aspergillus FGSC
  misc_feature (9)..(351): NCBI GI: 39976497 Blast Desc: MGG_05828 [Magnaporthe grisea 70-15] gi|145011930|gb|EDJ96586.1| MGG_05828 [Magnaporthe grisea 70-15]
  misc_feature (9)..(351): NCBI GI: 189189012 Blast Desc: chitin deacetylase 1 [Pyrenophora tritici-repentis Pt-1C-BFP] gi|187972451|gb|EDU39950.1| chitin deacetylase 1 [Pyrenophora tritici-repentis Pt-1C-BFP]
  misc_feature (9)..(348): NCBI GI: 169599569 Blast Desc: SNOG_02608 [Phaeosphaeria nodorum SN15] gi|160705272|gb|EAT89339.2| SNOG_02608 [Phaeosphaeria nodorum SN15]
  misc_feature (19)..(345): NCBI GI: 150864551 Blast Desc: PICST_30682 [Pichia stipitis CBS 6054] gi|149385807|gb|ABN65382.2| [Pichia stipitis CBS 6054]
  misc_feature (12)..(346): NCBI GI: 212538141 Blast Desc: chitin deacetylase, [Penicillium marneffei ATCC 18224] gi|210068968|gb|EEA23059.1| chitin deacetylase, [Penicillium marneffei ATCC 18224]
  misc_feature (12)..(346): NCBI GI: 255933754 Blast Desc: Pc12g14510 [Penicillium chrysogenum Wisconsin 54-1255] gi|211582875|emb|CAP81078.1| Pc12g14510 [Penicillium chrysogenum Wisconsin 54-1255]
  misc_feature (23)..(347): NCBI GI: 213406822 Blast Desc: chitin deacetylase Cda1 [Schizosaccharomyces japonicus yFS275] gi|212002229|gb|EEB07889.1| chitin deacetylase Cda1 [Schizosaccharomyces japonicus yFS275]
  misc_feature (23)..(346): NCBI GI: 19115330 Blast Desc: chitin deacetylase Cda1 [Schizosaccharomyces pombe] gi|74581909|sp|O13842.1|CDA1_SCHPO RecName: Full=Chitin deacetylase 1 gi|2239196|emb|CAB10114.1| chitin deacetylase Cda1
  misc_feature (21)..(345): NCBI GI: 237799559 Blast Desc: polysaccharide deacetylase [Pseudomonas syringae pv. oryzae str. 1_6]
  misc_feature (23)..(346): SWISSPROT Homolog: EC 3.5.1.41 Chitin deacetylase
  misc_feature: Useful for introducing or modulating the production of volatile compounds
MINARLSVMPEIYHAHPDFAFDRDFKGYGEQGIDPKWPNNAKIAVSFVINYEEGGERSVLNGDGGVYKTVPFPFSIRYVIEGSVLICVTVRLESMNAIDNAESEYEYGSRAGFWRIFRLFNNLKMKFTLYAVAQAVEQQPEVVKRCVEEGHDVASHAYRWIEYHDMPIEKEKEYIRKAIVSLKNLAGYAPRGWYYGRNSPHSRTLVPQVYEEMGETLEWVSDTYADDVPYWIDLPFERDCPNPKGCLMVPYSYDCNDFKFHTVGSGFRDPEGFFNHLKNAFDVLYEEGEAGMSKMMTIGLHCRIIGRPGRFGALKKFAEYINQKDGVWVATRSEIAEEFKKNHPYRKGYLA

SEQ ID NO: 21004 - DNA, 1058 bp, Muscodor strobelii
  misc_feature: SGI EST ID NO. CUFF.49311.0
  misc_feature: Variant of the nucleotide sequence at SEQ ID NO 21002
ctcacactccgtcatataccagacaacgccgagtccgaatatgaatatggaagccgagccggattctggaggatattccgattatttaataacttgaaaatgaaattcacattgtacgccgtagcacaggcagtcgagcagcaacccgaggtggtcaagcgatgcgtagaggaaggccatgatgttgcgtcgcatgcataccgatggatcgagtatcatgatatgccaatcgaaaaggaaaaagagtacattcgaaaggccatcgtatcactgaagaacctcgctggatacgctcctagagggtggtactatggacggaatagtcctcactcgcgaacactagtgcctcaagtgtacgaggagatgggcgagacactcgagtgggtcagtgatacatatgccgacgatgtgccttattggattgatctacctttcgaacgtgattgtccaaatccgaagggttgtcttatggttccctactcttacgactgcaacgatttcaaatttcatactgttggttctgggtttcgtgaccccgaaggcttctttaatcatctcaaaaatgccttcgatgtgctttatgaagagggtgaagcaggcatgtcaaagatgatgacaatcggtcttcattgtcgtattatcggacgacctggtcgatttggagcacttaagaaatttgccgagtatattaatcagaaggatggcgtctgggtagcaacaagaagtgagatcgcggaagaattcaagaagaatcatccatacagaaaggggtatttggcatgaagccacggatagttggcccatcttgctggtgccaatgacggggctatactagtactatcatgatacaaagacgcgtctcgagagtcgtgatgctgataaacggaattagacactttgagcgttagtgaacatctctttgttctggattatggatcttgtggatgatataattcaatcaccaagatagtggtcttgtatccgagatgtttatgcgttattcttttatgttcacaaaatgatcataattgagttcccttacccaaatgccagcaaat

SEQ ID NO: 21005 - DNA, 4809 bp, Muscodor strobelii
  misc_feature: SGI cDNA ID NO. 567101
  misc_feature: Encodes the peptide sequence at SEQ ID NO 21006
atgcctggcatcatcgaccctgagcctgagccagagctgctcgacgacgccgaccccgactctctgcccgccgagctccctgtcgacaacaccccgccccggccctacgtcgtcctgcagcagcacgtcgagctcgagatcgacttccgcgagaagcgcgtcttcggtcgctcccacattctcgtcgcccccatcgccgaggacgtcgccaccatctacatcgatgcgcgccagtgcaacatcgacctcgccaacgtcaccgtctccaactgtccggccacggcaacctaccacgacccgtgcgacctgtttgccgtccccgagagctatgactggtccgccggccagtggcaccagaggcagaagcgagtcacgcctctactacaccaccgccgcgatgaggtccccgtcatctcccacgacatggcctgctgccagcccctcgacggcgccctccaggtcacccttcccagccccaaggaggtcaaggacaggaacgccaacgcatcaagagcagaccagcaagagttactgatccaagcagacggtaatgttacgggctaccgcgtcagcatacccttcgagttgaagaatgtcaacagtggtctgcactttgtcggcgtcgacgacggtgatacgcgctatccacacgtctacacccgccactcggtcgagccgggcaccgcctgctccatctttccctgtatcgacgatcccggctgccgcaacttctggaagatctccatcaccacgccccgcaccctcggcgacgccctgcaccagccacttgccacccaacagcactttaagaaggttgctatgaatggcagtgctaatggcagcgccagtcgcaagaggaagtttggcgaggaggagcccaaacaactccatcaccaccgggagtttagcttgacagaggaagacaagcttctggagatgactgtcgtctgctcgggattcctcaccggtgagacagcccacaagaccgacgagtcaaagaagatcatgaccttcgaagtcgacaagaacaaggcagcaaagcatattggcttcgctgtcgggccctttgagcacgtggacctctggtcggaattccgaagcgaggaagatgaccaaaagttgggcgtcagtgcagccaaggtccacggctactgcttgccaggtcgcgtcgaggaagtcaggagcacgtgtgctgctattgtcactgctgtggaccatttcgtcttacaattcggccgttatccctttgagaactacaaaatgtgctttgtcgacgacatggttgaaagcgcgataccgctctgcgccttctccttgtgcagcagcagactactctgtcccgcagatatcatcgactacgaaatcgagactacgagaaccctcgtatactcacttgccagccaatggttcggagtcaatgtcgttcctaacacaagcgcagatatctgggtggtcgccggggttgcctggtttatgaccgatcacttcatgaagtacgccgaagggaacaatgctttcagattccggatgaaaaccatggcggaccggcttgttgatatcgatgtgaagcggccttcattgcaggatctcgggagccatctctatctgggaagctttgaggtcgatttcatgaacctcaaggctccgctggttctattcatcttagaccgacgactctccaagtcctctggctctacgggtatttcccgaattatttctcgcatggtaagcaaggcaaatacgtccacccaggccaatgatgatgtgctctcttccgatgcgtttcgcaaagcttgtgagaaactaggaagcacgcgcctggaaacattctggcaacaatgggtcgttgggtcgggttgcccgagattcctggttcatcaacggttcaacaagaaaaagctctgcgtggagatgactattcagcaaaaccaagacatccatgcaagcaagaaaagacagattgacttggatgaattctggaaagagattcgagaagaaactcatgcggtatgggctggacctctacaaagttgctttacaggacccatgacgattaggatacacgaagccgacggcactccttacgagcatatagtagaacttcgcgaggatgctgctaagtcggttaggtttgagatcccttacaacacgaagtacaagcgacttaagaggaatcgccggcaacgtgaaagggccatggccaacaatcatgcgaaagaagagggtcaaaaagagctttattacttgggcgatgtcatgcagcaaccgcacgaaattgaagagtgggatttccgcgactgggatgaagagtcggagaacaaaatggaccaggagtcctatgaatggatccgcatggacgccgacttcgagtggatctgtgagatgaggtcaaatttacctgcatacatgtatgcttctcagctgcagcaagatagagacgttgctgctcagcaagattcgatgctgttcctccaacaatcctctgcgcggtcaggggcgcatccactcatggcgaccatcctgacccgcacacttctagatgtgcgctacttctacggcctccgtctcatggccgttgatgaccttccgacccatgcggtacaggaacaagtggattggatagggtttcggcacctgcggaaagtgttccagcatttcttctgctatcctggaaccaatacacccaaaccaaatgacttcgccaacatgcgtcagtatgcaattcagcgtgcgattccagaagctgtagcccgtattcgtggcgaggatggcaagtgtcccaaagaagctcgacatttcatactcgaagttcttcaaggcaacaataacgaggacaatgcgtattcagatcagccatatatttgtaggctcatcagagccctcgctgtctgccaaatcccagacaagcagaaagaaaagcccccgatgaccatgtcattgtcattcggagacaatgacgaggatgatattatgggcgaggaaatcgaccccgaacccgaagagttccagaaacaagctctcgaagagattgagcattatcgacgtaaagatgagcatgcttcatcgttccaaaattgtttcaccgtcgcttctttagatgcactttgtctactgatgaaagccaaggttatccgccaagaccccatgacattcgcccaatatctgcaagataggacttgcgatgttgttcgtatcaaggcctgcgactcccttgttgagcttgactttttagaagacgacaactttctacaatttttcctttcactggccagtacggatccatcgccctttgtgcgagaccaactattcaagacgctatgtcgtgggttggctcggatggctacgggagagagccccgatccgagcaaagaagccccacagctcattaaggatgacttggtggttgagcaagaggctctaatcatggacgagagacaaagggcaagagaacgaaaaacagatctcaaggtcgctcttggtgccttgaagacgcgcactgaagacaatgagatgctgcaagaagctctttggcaggcactggattcacctgtgttaacagtagcagagcgcatcaagttcttggagctttgtgctctgcttgtcgacgcgagcgattctatgattgtcaagttcaagtacccagttgcttggcgtgcacaggtcgttgagagtgtccgtggcaaaacctgtaaggttcgtttctcgagacattttagaacaaagtctcgcaaaacatatgccacaccggtaccatctgcgccgccgaagcctcagctcatcaagctgaaaagcgctgcccctctgagtaataagccaaccccagcaccgcctagtgagatacccgcagcttctgagcctgctccattgcagaagaagaactccatcagcgtcacgcttccaaaaataactccagtggctacgcaaccaactgtgaaggcgccaaagccgcccgtggcaaaagcatcgccgaaaccgtctgccccgaagccgtccgttgccgtcaagtcgagtgctccaagcacaccggccgcagccaccgcctcttctcaggataaggggccaccaaagggtgaacagcgtcgtgacagtattgctgtcttgccaccgattcggcctacaattgaagttccacagttggagcagaagataacgactgtcaagactcccaaattgaatgggaatggacacttggccacgaagaacccaaaatcgctcaaacgagctagcacggagagtgaaagtcaccgaccttcaaagatcgtcaaattgaacactgggcctattctcaatgctatgaagcagttggaagccgggacaccaagaacatcaacgagtggaccagaatcagcgaaaatgctgatcactgttaagttcgatcagttcgataaaatcaagcctagggacagaggggaaggctccacaatccgggccgcaggcaagaaagcaacgcctgatgagaggacaaattcaaataatgaaccgcttgaattgcctcagacctcacagttctctccatctaaacccgttgcgcgcaaggcaacgcctcccccaaaatcttcttctcagctaaaagcgtcgacaccgacctctacatcccagcctgttacaaaccctccatcgagcggcagtggcagtgggaaacccaggaaacctctaccagatatgacgcgtaaacctctcccatctgcgagccatatcaatcagcacccgacgccttccaaggcttcaggctcagcctctccccctgcatctgcacccccaccagtacagaagcctaagctgaaattgaagctcaagaagccttcttaa

SEQ ID NO: 21006 - protein, 1602 aa, Muscodor strobelii
  misc_feature: SGI Peptide ID NO. 567101
  misc_feature (23)..(1445): NCBI GI: 261355295 Blast Desc: transcription initiation factor TFIId 127kD subunit [Verticillium albo-atrum VaMs.102]
  misc_feature (36)..(1342): NCBI GI: 171687459 Blast Desc: protein product [Podospora anserina] gi|170943691|emb|CAP69343.1| protein product [Podospora anserina]
  misc_feature (35)..(1553): NCBI GI: 116180768 Blast Desc: CHGG_01012 [Chaetomium globosum CBS 148.51] gi|88185309|gb|EAQ92777.1| CHGG_01012 [Chaetomium globosum CBS 148.51]
  misc_feature (35)..(1332): NCBI GI: 85111588 Blast Desc: NCU02052 [Neurospora crassa OR74A] gi|28925766|gb|EAA34772.1| [Neurospora crassa OR74A] gi|38566902|emb|CAE76206.1| related to TSM1-component of TFIID
  misc_feature (7)..(1329): NCBI GI: 46135781 Blast Desc: FG09406.1 [Gibberella zeae PH-1]
  misc_feature (9)..(1241): NCBI GI: 256734846 Blast Desc: [Nectria haematococca mpVI 77-13-4]
  misc_feature (36)..(1356): NCBI GI: 154299901 Blast Desc: BC1G_10841 [Botryotinia fuckeliana B05.10] gi|150857121|gb|EDN32313.1| BC1G_10841 [Botryotinia fuckeliana B05.10]
  misc_feature (36)..(1267): NCBI GI: 156053606 Blast Desc: SS1G_05650 [Sclerotinia sclerotiorum 1980] gi|154703431|gb|EDO03170.1| SS1G_05650 [Sclerotinia sclerotiorum 1980]
  misc_feature (1)..(1317): NCBI GI: 67522074 Blast Desc: AN1494.2 [Aspergillus nidulans FGSC A4] gi|40744651|gb|EAA63807.1| AN1494.2 [Aspergillus nidulans FGSC A4] gi|259486816|tpe|CBF84980.1| TPA: transcription initiation
  misc_feature (36)..(1302): NCBI GI: 225561939 Blast Desc: TATA-binding protein associated factor Taf2 [Ajellomyces capsulatus G186AR]
MPGIIDPEPEPELLDDADPDSLPAELPVDNTPPRPYVVLQQHVELEIDFREKRVFGRSHILVAPIAEDVATIYIDARQCNIDLANVTVSNCPATATYHDPCDLFAVPESYDWSAGQWHQRQKRVTPLLHHRRDEVPVISHDMACCQPLDGALQVTLPSPKEVKDRNANASRADQQELLIQADGNVTGYRVSIPFELKNVNSGLHFVGVDDGDTRYPHVYTRHSVEPGTACSIFPCIDDPGCRNFWKISITTPRTLGDALHQPLATQQHFKKVAMNGSANGSASRKRKFGEEEPKQLHHHREFSLTEEDKLLEMTVVCSGFLTGETAHKTDESKKIMTFEVDKNKAAKHIGFAVGPFEHVDLWSEFRSEEDDQKLGVSAAKVHGYCLPGRVEEVRSTCAAIVTAVDHFVLQFGRYPFENYKMCFVDDMVESAIPLCAFSLCSSRLLCPADIIDYEIETTRTLVYSLASQWFGVNVVPNTSADIWVVAGVAWFMTDHFMKYAEGNNAFRFRMKTMADRLVDIDVKRPSLQDLGSHLYLGSFEVDFMNLKAPLVLFILDRRLSKSSGSTGISRIISRMVSKANTSTQANDDVLSSDAFRKACEKLGSTRLETFWQQWVVGSGCPRFLVHQRFNKKKLCVEMTIQQNQDIHASKKRQIDLDEFWKEIREETHAVWAGPLQSCFTGPMTIRIHEADGTPYEHIVELREDAAKSVRFEIPYNTKYKRLKRNRRQRERAMANNHAKEEGQKELYYLGDVMQQPHEIEEWDFRDWDEESENKMDQESYEWIRMDADFEWICEMRSNLPAYMYASQLQQDRDVAAQQDSMLFLQQSSARSGAHPLMATILTRTLLDVRYFYGLRLMAVDDLPTHAVQEQVDWIGFRHLRKVFQHFFCYPGTNTPKPNDFANMRQYAIQRAIPEAVARIRGEDGKCPKEARHFILEVLQGNNNEDNAYSDQPYICRLIRALAVCQIPDKQKEKPPMTMSLSFGDNDEDDIMGEEIDPEPEEFQKQALEEIEHYRRKDEHASSFQNCFTVASLDALCLLMKAKVIRQDPMTFAQYLQDRTCDVVRIKACDSLVELDFLEDDNFLQFFLSLASTDPSPFVRDQLFKTLCRGLARMATGESPDPSKEAPQLIKDDLVVEQEALIMDERQRARERKTDLKVALGALKTRTEDNEMLQEALWQALDSPVLTVAERIKFLELCALLVDASDSMIVKFKYPVAWRAQVVESVRGKTCKVRFSRHFRTKSRKTYATPVPSAPPKPQLIKLKSAAPLSNKPTPAPPSEIPAASEPAPLQKKNSISVTLPKITPVATQPTVKAPKPPVAKASPKPSAPKPSVAVKSSAPSTPAAATASSQDKGPPKGEQRRDSIAVLPPIRPTIEVPQLEQKITTVKTPKLNGNGHLATKNPKSLKRASTESESHRPSKIVKLNTGPILNAMKQLEAGTPRTSTSGPESAKMLITVKFDQFDKIKPRDRGEGSTIRAAGKKATPDERTNSNNEPLELPQTSQFSPSKPVARKATPPPKSSSQLKASTPTSTSQPVTNPPSSGSGSGKPRKPLPDMTRKPLPSASHINQHPTPSKASGSASPPASAPPPVQKPKLKLKLKKPS

SEQ ID NO: 21007 - DNA, 5963 bp, Muscodor strobelii
  misc_feature: SGI EST ID NO. CUFF.49317.0
  misc_feature: Variant of the nucleotide sequence at SEQ ID NO 21005
caggaacaaaccttcaacttgctcacacgcctcaggccgacgccctttacaatccttatttatcttccttatcttcccagttggaacatctggtttcgaatatcttcgtaccttcgctgtcatccgcgttgtagctgccacacaaaccaccacacttggacagctacctacgcaccttcattcatttcgtctgccctccgaccacctgcccaccaagacttggcactcctccaccgcaacctgagcctcgacattatcttcaaccaccgagccgccagcaccgctacccagctccaacagcgtcgacacagtcgcagccaaacttactgcagtttatcgcatcccaccgcccgtgtgcctccctcatcatctcgcacccgcatccgcaccaccagacacgactggacaccaccttcttctcatgactaccgcaatctgatcgccacatcgccccgccggctaccgacacggcttcacgatgcctggcatcatcgaccctgagcctgagccagagctgctcgacgacgccgaccccgactctctgcccgccgagctccctgtcgacaacaccccgccccggccctacgtcgtcctgcagcagcacgtcgagctcgagatcgacttccgcgagaagcgcgtcttcggtcgctcccacattctcgtcgcccccatcgccgaggacgtcgccaccatctacatcgatgcgcgccagtgcaacatcgacctcgccaacgtcaccgtctccaactgtccggccacggcaacctaccacgacccgtgcgacctgtttgccgtccccgagagctatgactggtccgccggccagtggcaccagaggcagaagcgagtcacgcctctactacaccaccgccgcgatgaggtccccgtcatctcccacgacatggcctgctgccagcccctcgacggcgccctccaggtcacccttcccagccccaaggaggtcaaggacaggaacgccaacgcatcaagagcagaccagcaagagttactgatccaagcagacggtaatgttacgggctaccgcgtcagcatacccttcgagttgaagaatgtcaacagtggtctgcactttgtcggcgtcgacgacggtgatacgcgctatccacacgtctacacccgccactcggtcgagccgggcaccgcctgctccatctttccctgtatcgacgatcccggctgccgcaacttctggaagatctccatcaccacgccccgcaccctcggcgacgccctgcaccagccacttgccacccaacagcactttaagaaggttgctatgaatggcagtgctaatggcagcgccagtcgcaagaggaagtttggcgaggaggagcccaaacaactccatcaccaccgggagtttagcttgacagaggaagacaagcttctggagatgactgtcgtctgctcgggattcctcaccggtgagacagcccacaagaccgacgagtcaaagaagatcatgaccttcgaagtcgacaagaacaaggcagcaaagcatattggcttcgctgtcgggccctttgagcacgtggacctctggtcggaattccgaagcgaggaagatgaccaaaagttgggcgtcagtgcagccaaggtccacggctactgcttgccaggtcgcgtcgaggaagtcaggagcacgtgtgctgctattgtcactgctgtggaccatttcgtcttacaattcggccgttatccctttgagaactacaaaatgtgctttgtcgacgacatggttgaaagcgcgataccgctctgcgccttctccttgtgcagcagcagactactctgtcccgcagatatcatcgactacgaaatcgagactacgagaaccctcgtatactcacttgccagccaatggttcggagtcaatgtcgttcctaacacaagcgcagatatctgggtggtcgccggggttgcctggtttatgaccgatcacttcatgaagtacgccgaagggaacaatgctttcagattccggatgaaaaccatggcggaccggcttgttgatatcgatgtgaagcggccttcattgcaggatctcgggagccatctctatctgggaagctttgaggtcgatttcatgaacctcaaggctccgctggttctattcatcttagaccgacgactctccaagtcctctggctctacgggtatttcccgaattatttctcgcatggtaagcaaggcaaatacgtccacccaggccaatgatgatgtgctctcttccgatgcgtttcgcaaagcttgtgagaaactaggaagcacgcgcctggaaacattctggcaacaatgggtcgttgggtcgggttgcccgagattcctggttcatcaacggttcaacaagaaaaagctctgcgtggagatgactattcagcaaaaccaagacatccatgcaagcaagaaaagacagattgacttggatgaattctggaaagagattcgagaagaaactcatgcggtatgggctggacctctacaaagttgctttacaggacccatgacgattaggatacacgaagccgacggcactccttacgagcatatagtagaacttcgcgaggatgctgctaagtcggttaggtttgagatcccttacaacacgaagtacaagcgacttaagaggaatcgccggcaacgtgaaagggccatggccaacaatcatgcgaaagaagagggtcaaaaagagctttattacttgggcgatgtcatgcagcaaccgcacgaaattgaagagtgggatttccgcgactgggatgaagagtcggagaacaaaatggaccaggagtcctatgaatggatccgcatggacgccgacttcgagtggatctgtgagatgaggtcaaatttacctgcatacatgtatgcttctcagctgcagcaagatagagacgttgctgctcagcaagattcgatgctgttcctccaacaatcctctgcgcggtcaggggcgcatccactcatggcgaccatcctgacccgcacacttctagatgtgcgctacttctacggcctccgtctcatggccgttgatgaccttccgacccatgcggtacaggaacaagtggattggatagggtttcggcacctgcggaaagtgttccagcatttcttctgctatcctggaaccaatacacccaaaccaaatgacttcgccaacatgcgtcagtatgcaattcagcgtgcgattccagaagctgtagcccgtattcgtggcgaggatggcaagtgtcccaaagaagctcgacatttcatactcgaagttcttcaaggcaacaataacgaggacaatgcgtattcagatcagccatatatttgtaggctcatcagagccctcgctgtctgccaaatcccagacaagcagaaagaaaagcccccgatgaccatgtcattgtcattcggagacaatgacgaggatgatattatgggcgaggaaatcgaccccgaacccgaagagttccagaaacaagctctcgaagagattgagcattatcgacgtaaagatgagcatgcttcatcgttccaaaattgtttcaccgtcgcttctttagatgcactttgtctactgatgaaagccaaggttatccgccaagaccccatgacattcgcccaatatctgcaagataggacttgcgatgttgttcgtatcaaggcctgcgactcccttgttgagcttgactttttagaagacgacaactttctacaatttttcctttcactggccagtacggatccatcgccctttgtgcgagaccaactattcaagacgctatgtcgtgggttggctcggatggctacgggagagagccccgatccgagcaaagaagccccacagctcattaaggatgacttggtggttgagcaagaggctctaatcatggacgagagacaaagggcaagagaacgaaaaacagatctcaaggtcgctcttggtgccttgaagacgcgcactgaagacaatgagatgctgcaagaagctctttggcaggcactggattcacctgtgttaacagtagcagagcgcatcaagttcttggagctttgtgctctgcttgtcgacgcgagcgattctatgattgtcaagttcaagtacccagttgcttggcgtgcacaggtcgttgagagtgtccgtggcaaaacctgtaaggttcgtttctcgagacattttagaacaaagtctcgcaaaacatatgccacaccggtaccatctgcgccgccgaagcctcagctcatcaagctgaaaagcgctgcccctctgagtaataagccaaccccagcaccgcctagtgagatacccgcagcttctgagcctgctccattgcagaagaagaactccatcagcgtcacgcttccaaaaataactccagtggctacgcaaccaactgtgaaggcgccaaagccgcccgtggcaaaagcatcgccgaaaccgtctgccccgaagccgtccgttgccgtcaagtcgagtgctccaagcacaccggccgcagccaccgcctcttctcaggataaggggccaccaaagggtgaacagcgtcgtgacagtattgctgtcttgccaccgattcggcctacaattgaagttccacagttggagcagaagataacgactgtcaagactcccaaattgaatgggaatggacacttggccacgaagaacccaaaatcgctcaaacgagctagcacggagagtgaaagtcaccgaccttcaaagatcgtcaaattgaacactgggcctattctcaatgctatgaagcagttggaagccgggacaccaagaacatcaacgagtggaccagaatcagcgaaaatgctgatcactgttaagttcgatcagttcgataaaatcaagcctagggacagaggggaaggctccacaatccgggccgcaggcaagaaagcaacgcctgatgagaggacaaattcaaataatgaaccgcttgaattgcctcagacctcacagttctctccatctaaacccgttgcgcgcaaggcaacgcctcccccaaaatcttcttctcagctaaaagcgtcgacaccgacctctacatcccagcctgttacaaaccctccatcgagcggcagtggcagtgggaaacccaggaaacctctaccagatatgacgcgtaaacctctcccatctgcgagccatatcaatcagcacccgacgccttccaaggcttcaggctcagcctctccccctgcatctgcacccccaccagtacagaagcctaagctgaaattgaagctcaagaagccttcttaactcgctttggggatatccccaaaaataatggctctttctatcagtcccggtgactaccactctcgcgacgggacttatgtggcatgatccattgtgcatggacaaccttgcctcaccactatactttgttctctttgctataaattcgatgcgcagaagcgtaatgcctgatgcattgtcgctttcccttcacttcttttctgactctgttttactcggcatagcgatggcgttcggttctggttgtaggatgcgtttcccatccgaaacaaattgattaataagctcgactgttataggaaatacccaaaagtcgcctcgtcgtttcctaatgggcggggcaaggtggatgagacaggcaagatatcccgaggaaaatgaaagaaatagagacgatcgccttgtaaagaattgactaggtctagcttaatcggctaatagatcgtccgtgtagtatatattgtcttgctatattctggctgcctgtatgtgagaattgtcgagtaatgtgcaggcaagtaagatgtcatagccgatgtggtttgactggctttggttcacgcacggcttttcccaaagtagagtgaatcgaatactgtcgtgcacatcactattatgaaagatgctgttcctatatgtgttgcctagtatatctcgttttattttcaagccgctg

SEQ ID NO: 21008 - DNA, 456 bp, Muscodor strobelii
  misc_feature: SGI cDNA ID NO. 567102
  misc_feature: Encodes the peptide sequence at SEQ ID NO 21009
atgcgtacagcggcgactctccctggatccgcattcacgactcccaggcaataccagctcgcatctctcttcatggccccatcgacaccgcctcgcatgggtcatacggcaactgcacgcgatgtctgggaaggggctgatttcgaaattcacgaagatgatacggcggggtttaacaacggcgaagaagacgagactattgaggaagagtctggagacaacgccgatcgcaatgacgatcacgaagaaggggacgacgacacttcggggactacagaaggaggaagtgtctatgccgatgatctccaggtcgttgaagagccgtctttcgaggaaggacttacaactggctccccaatgccatcagcacgtcgtcgactgttacgtttgcatcatggaggaggccctagtgctaggcatgagcatgaacctggtgatagaatggacttggactag

SEQ ID NO: 21009 - protein, 151 aa, Muscodor strobelii
  misc_feature: SGI Peptide ID NO. 567102
MRTAATLPGSAFTTPRQYQLASLFMAPSTPPRMGHTATARDVWEGADFEIHEDDTAGFNNGEEDETIEEESGDNADRNDDHEEGDDDTSGTTEGGSVYADDLQVVEEPSFEEGLTTGSPMPSARRRLLRLHHGGGPSARHEHEPGDRMDLD

SEQ ID NO: 21010 - DNA, 1899 bp, Muscodor strobelii
  misc_feature: SGI EST ID NO. CUFF.49320.0
  misc_feature: Variant of the nucleotide sequence at SEQ ID NO 21008
tcaagctccaatattttaattggatgatgagctaagtgtcttccgcagagaagccaccatatttaaccacggtcatacctcaacggacaaggtctctcttgcttggtgatagcgcttcgaattgcgcatcaacgacaacaataacaatcaacttctacatcgcagcgcgttctagttgggttctcttaacctgtctgtccactctctctctattgcctcaacctcaaccttaaaggtttcctgatatatctccggcgggctcgccctttccttcagctcacaatgctccgccggcccccgacaactctcagtctaacagctgaggatgtcgcaagctacgaagaccggcggtatgcccaacagcaagcgcagatacaagccatgaacgacacaaacaacattctacgttccaagggaatgcccggtcaccaaggtcacgcggtaccaatggagacttcatcgcccagcagcacggatgaagccatggaagatgtcagcgcgcgcctcgcagagcgggagcaagaacgcgagcgtgagagagaacaagcactccgagaacgagaaatcggagaattcgagcactcagatgaagatgacgacgaccaagacgatgatgatgacgatgacccattcacaacactcccgcgttccgttgcaggcccacgccccgttagtcccggcgcacagcgcggcgctttcttacgacagcagcggggacgcggagctcatcagggacacgcgcggtcacagtcacattctacgtctataccgacttacacctcggcaacaggtacaaacgcgcgctcacggatcatgggctcagcgtccgcgtctgtgctcccgcctcccgcgggcccaggtttagggatcacccagcaaggaccagtcccagctcacctccagcagacaccggtacaaaacccatcacaaagcgggatcacgacacgtgcaggggctggcggcggtgtgcgaggaggcggcagcagtcgacaagcaagtgagccgcccccagcaccaactcgcgttcgaacacaagccgaacgcatcggtatcaccgggccgagtacacgctcaggggatctaggcacgggcacaggaagcacggcaccagccgggcccggaacgaggaggcgctaggaacgccaagactcgactgccaccgaacccgcatacacccatcactcatcacagacccctatgcgtacagcggcgactctccctggatccgcattcacgactcccaggcaataccagctcgcatctctcttcatggccccatcgacaccgcctcgcatgggtcatacggcaactgcacgcgatgtctgggaaggggctgatttcgaaattcacgaagatgatacggcggggtttaacaacggcgaagaagacgagactattgaggaagagtctggagacaacgccgatcgcaatgacgatcacgaagaaggggacgacgacacttcggggactacagaaggaggaagtgtctatgccgatgatctccaggtcgttgaagagccgtctttcgaggaaggacttacaactggctccccaatgccatcagcacgtcgtcgactgttacgtttgcatcatggaggaggccctagtgctaggcatgagcatgaacctggtgatagaatggacttggactagttatttgcattggctccaaggataggaggacggagactgcaccaggatgagagaagatatgttggatttcctccatgtcagaatgctgcggggagcaatcccctactcgttgtaggagtatattggcttgattgtttgctagctcaggaaaagcttgtacaaattcacagctcgattctgtgtaagttactataggccgttaggctatgagccaagagagataatacacactgtctataacgcgac

SEQ ID NO: 21011 - DNA, 855 bp, Muscodor strobelii
  misc_feature: SGI cDNA ID NO. 567103
  misc_feature: Encodes the peptide sequence at SEQ ID NO 21012
atgctccgccggcccccgacaactctcagtctaacagctgaggatgtcgcaagctacgaagaccggcggtatgcccaacagcaagcgcagatacaagccatgaacgacacaaacaacattctacgttccaagggaatgcccggtcaccaaggtcacgcggtaccaatggagacttcatcgcccagcagcacggatgaagccatggaagatgtcagcgcgcgcctcgcagagcgggagcaagaacgcgagcgtgagagagaacaagcactccgagaacgagaaatcggagaattcgagcactcagatgaagatgacgacgaccaagacgatgatgatgacgatgacccattcacaacactcccgcgttccgttgcaggcccacgccccgttagtcccggcgcacagcgcggcgctttcttacgacagcagcggggacgcggagctcatcagggacacgcgcggtcacagtcacattctacgtctataccgacttacacctcggcaacaggtacaaacgcgcgctcacggatcatgggctcagcgtccgcgtctgtgctcccgcctcccgcgggcccaggtttagggatcacccagcaaggaccagtcccagctcacctccagcagacaccggtacaaaacccatcacaaagcgggatcacgacacgtgcaggggctggcggcggtgtgcgaggaggcggcagcagtcgacaagcaagtgagccgcccccagcaccaactcgcgttcgaacacaagccgaacgcatcggtatcaccgggccgagtacacgctcaggggatctaggcacgggcacaggaagcacggcaccagccgggcccggaacgaggaggcgctag

SEQ ID NO: 21012 - protein, 284 aa, Muscodor strobelii
  misc_feature: SGI Peptide ID NO. 567103
MLRRPPTTLSLTAEDVASYEDRRYAQQQAQIQAMNDTNNILRSKGMPGHQGHAVPMETSSPSSTDEAMEDVSARLAEREQEREREREQALREREIGEFEHSDEDDDDQDDDDDDDPFTTLPRSVAGPRPVSPGAQRGAFLRQQRGRGAHQGHARSQSHSTSIPTYTSATGTNARSRIMGSASASVLPPPAGPGLGITQQGPVPAHLQQTPVQNPSQSGITTRAGAGGGVRGGGSSRQASEPPPAPTRVRTQAERIGITGPSTRSGDLGTGTGSTAPAGPGTRRR

SEQ ID NO: 21013 - DNA, 1899 bp, Muscodor strobelii; identical to SEQ ID NO: 21010
  misc_feature: SGI EST ID NO. CUFF.49320.0
  misc_feature: Variant of the nucleotide sequence at SEQ ID NO 21011

SEQ ID NO: 21014 - DNA, 720 bp, Muscodor strobelii
  misc_feature: SGI cDNA ID NO. 567104
  misc_feature: Reduced expression when VOC is produced
  misc_feature: Encodes the peptide sequence at SEQ ID NO 21015
atggacgcgcacgccctcctgacctcgcagggttggcgtgggaagggccactcgctcaacccgacaagcgacagcatcggcctgacccaccacatcctcatcaaacggaacgaagatggcgccggcctcggcagtaagaaggaccacaaagccgaggcctggtggctcaacgccttcgaccaggccctcaagggcatcgacatgaagagcggcacgatgaagcagaccctgaaaggcggccagttggaaaagatcgtcgcccgcagcgctgccaacaaatacactggtgctcgcggcctctacgcgtcgtttgttcgtggtggagtaatggagggttcagcgaacgatcctaccactgggctccctacaccccccgacagtggtgcagacacacccctaagtacgggatccgaagccaaggataagaagaagaggaggaggaagatggacgagaaagatgcggagtcgaaagaagagaaagaagagcgccgcgcaaggcgggaagagaaaagacgaaagaaagccaacaaggttgctttgagagaggcggaagagcgtgcggcgagaaaggtcgagaaaaagaaggtcaaaaaggctgagcggcaagcagccaaggagacactcaaatcaacggaaacaagagaagaacgcaaagtgaggagagatgcaaggcggaaacggaaagaggaaaaacgacggataagggctataggggcctaa

SEQ ID NO: 21015 - protein, 239 aa, Muscodor strobelii
  misc_feature: SGI Peptide ID NO. 567104
  misc_feature (1)..(113): NCBI GI: 116182156 Blast Desc: CHGG_01706 [Chaetomium globosum CBS 148.51] gi|88186003|gb|EAQ93471.1| CHGG_01706 [Chaetomium globosum CBS 148.51]
  misc_feature (1)..(228): NCBI GI: 154320947 Blast Desc: BC1G_01348 [Botryotinia fuckeliana B05.10] gi|150851886|gb|EDN27078.1| BC1G_01348 [Botryotinia fuckeliana B05.10]
  misc_feature (1)..(190): NCBI GI: 256735409 Blast Desc: NECHADRAFT_75226 [Nectria haematococca mpVI 77-13-4]
  misc_feature (1)..(163): NCBI GI: 145614530 Blast Desc: MGG_04649 [Magnaporthe grisea 70-15] gi|145021435|gb|EDK05564.1| MGG_04649 [Magnaporthe grisea 70-15]
  misc_feature (1)..(115): NCBI GI: 46108062 Blast Desc: FG00913.1 [Gibberella zeae PH-1]
  misc_feature (1)..(132): NCBI GI: 171695068 Blast Desc: protein product [Podospora anserina] gi|170947776|emb|CAP59939.1| protein product [Podospora anserina]
  misc_feature (1)..(116): NCBI GI: 156054632 Blast Desc: SS1G_06164 [Sclerotinia sclerotiorum 1980] gi|154703944|gb|EDO03683.1| SS1G_06164 [Sclerotinia sclerotiorum 1980]
  misc_feature (1)..(143): NCBI GI: 261358865 Blast Desc: conserved [Verticillium albo-atrum VaMs.102]
  misc_feature (1)..(236): NCBI GI: 169622085 Blast Desc: SNOG_14257 [Phaeosphaeria nodorum SN15] gi|111057374|gb|EAT78494.1| SNOG_14257 [Phaeosphaeria nodorum SN15]
  misc_feature (1)..(174): NCBI GI: 226278783 Blast Desc: conserved [Paracoccidioides brasiliensis Pb01]
  misc_feature: Useful for introducing or modulating the production of volatile compounds
MDAHALLTSQGWRGKGHSLNPTSDSIGLTHHILIKRNEDGAGLGSKKDHKAEAWWLNAFDQALKGIDMKSGTMKQTLKGGQLEKIVARSAANKYTGARGLYASFVRGGVMEGSANDPTTGLPTPPDSGADTPLSTGSEAKDKKKRRRKMDEKDAESKEEKEERRARREEKRRKKANKVALREAEERAARKVEKKKVKKAERQAAKETLKSTETREERKVRRDARRKRKEEKRRIRAIGA

SEQ ID NO: 21016 - DNA, 903 bp, Muscodor strobelii
  misc_feature: SGI cDNA ID NO. 567105
  misc_feature: Encodes the peptide sequence at SEQ ID NO 21017
atggcatggcagtgtgccactccaaagctgataagtgaagcaaactctaggtttgaatatgtgaaagggtttgagcagagtgatggtctcctgccaaacacatggatagttgtacgcctcgacggccgtggtttcagcaagctatgtgtaaaatacaattttgagaagcccaatgatcgccgggctctggatctcatgaacgccgcagccaaagcggtggtgacagagctgcctgatattaccatcgcctatggcgtgagcgacgagtatagctttgttttgcacaagacaacgcagttattcgagaggagagctagcaagctcatcaccaccatcgcctcaacattcacagcatactacgtccttttctggtccacgtatttccctgaaacgccactatccgcccctgtgcccagttttgatgggcgagcagtgtgctatcccagtcttcagaatctgcgagattacatgagctggcggcaggcagactgtcatatcaacaatctctacaacaccactttctggtctctgatacaacttggcggtatggatgcaaatgaagccgaaaggtcccttgccggcacgtttgccagagacaagaatgagattctgttctccaagtttcaaatcaactacaacaacgagccggagatatacaagaaaggcagtgtagtcttccgagactatgagcttgttgagccaggaagtcacagcgtcgctgagacaatagacaatctagcagagccactcgcacagtcaaagacacaggaagaaaatgacaagaagcgccggaataaagctcgtgtggttgtagatcatttagatatcatcaaagatgatttctgggaccagagaccctggctgctgtcgaataaaccgggtaaaatccccaagcagatataa

SEQ ID NO: 21017 - protein, 300 aa, Muscodor strobelii
  misc_feature: SGI Peptide ID NO. 567105
  misc_feature (14)..(287): Pfam Id: PF04446 Pfam Desc: tRNAHis guanylyltransferase
  misc_feature (14)..(227): Pfam Id: PF04446 Pfam Desc: tRNAHis guanylyltransferase
  misc_feature (14)..(299): NCBI GI: 261358866 Blast Desc: tRNA(His) guanylyltransferase [Verticillium albo-atrum VaMs.102]
  misc_feature (16)..(299): NCBI GI: 256734706 Blast Desc: NECHADRAFT_30739 [Nectria haematococca mpVI 77-13-4]
  misc_feature (48)..(299): NCBI GI: 46108064 Blast Desc: FG00914.1 [Gibberella zeae PH-1]
  misc_feature (14)..(299): NCBI GI: 74617973 Blast Desc: FG00914.1 [Gibberella zeae PH-1]
  misc_feature (45)..(299): NCBI GI: 171695070 Blast Desc: protein product [Podospora anserina] gi|170947777|emb|CAP59940.1| protein product [Podospora anserina]
  misc_feature (14)..(299): NCBI GI: 169770385 Blast Desc: [Aspergillus oryzae RIB40] gi|83767521|dbj|BAE57660.1| protein product [Aspergillus oryzae]
  misc_feature (14)..(300): NCBI GI: 121701067 Blast Desc: tRNAHis guanylyltransferase, [Aspergillus clavatus NRRL 1] gi|119396941|gb|EAW07372.1| tRNAHis guanylyltransferase, [Aspergillus clavatus NRRL 1]
  misc_feature (14)..(298): NCBI GI: 119494994 Blast Desc: tRNAHis guanylyltransferase, [Neosartorya fischeri NRRL 181] gi|119412456|gb|EAW22397.1| tRNAHis guanylyltransferase, [Neosartorya fischeri NRRL 181]
  misc_feature (14)..(297): NCBI GI: 238837882 Blast Desc: histidine tRNA 5'-guanylyltransferase [Microsporum canis CBS 113480]
  misc_feature (14)..(298): NCBI GI: 159131585 Blast Desc: tRNAHis guanylyltransferase Thg1, [Aspergillus fumigatus A1163]
MAWQCATPKLISEANSRFEYVKGFEQSDGLLPNTWIVVRLDGRGFSKLCVKYNFEKPNDRRALDLMNAAAKAVVTELPDITIAYGVSDEYSFVLHKTTQLFERRASKLITTIASTFTAYYVLFWSTYFPETPLSAPVPSFDGRAVCYPSLQNLRDYMSWRQADCHINNLYNTTFWSLIQLGGMDANEAERSLAGTFARDKNEILFSKFQINYNNEPEIYKKGSVVFRDYELVEPGSHSVAETIDNLAEPLAQSKTQEENDKKRRNKARVVVDHLDIIKDDFWDQRPWLLSNKPGKIPKQI

SEQ ID NO: 21018 - DNA, 2009 bp, Muscodor strobelii
  misc_feature: SGI EST ID NO. CUFF.49327.0
  misc_feature: Variant of the nucleotide sequence at SEQ ID NO 21016
gacgaccccaccaaggagctaaggctgtgaagcttgaaagactcccgtctctggcggaaacaagccacaagcccctccaagaggtctacaggcaagaaagacaaatactacaagatacatcttactcatgatatccaaaatacttgcaacggatataacatacctttctattgtgtgcctatggtgtgaagcaatggcaaattcacggtttgaatatgtgaaagggtttgagcagagtgatggtctcctgccaaacacatggatagttgtacgcctcgacggccgtggtttcagcaagctatgtgtaaaatacaattttgagaagcccaatgatcgccgggctctggatctcatgaacgccgcagccaaagcggtggtgacagagctgcctgatattaccatcgcctatggcgtgagcgacgagtatagctttgttttgcacaagacaacgcagttattcgagaggagagctagcaagctcatcaccaccatcgcctcaacattcacagcatactacgtccttttctggtccacgtatttccctgaaacgccactatccgcccctgtgcccagttttgatgggcgagcagtgtgctatcccagtcttcagaatctgcgagattacatgagctggcggcaggcagactgtcatatcaacaatctctacaacaccactttctggtctctgatacaacttggcggtatggatgcaaatgaagccgaaaggtcccttgccggcacgtttgccagagacaagaatgagattctgttctccaagtttcaaatcaactacaacaacgagccggagatatacaagaaaggcagtgtagtcttccgagactatgagcttgttgagccaggaagtcacagcgtcgctgagacaatagacaatctagcagagccactcgcacagtcaaagacacaggaagaaaatgacaagaagcgccggaataaagctcgtgtggttgtagatcatttagatatcatcaaagatgatttctgggaccagagaccctggctgctgtcgaataaaccgggtaaaatccccaagcagatataatgcccatttcttgatacccctcaacgcctttctaatgctcagctatgtatacgtgcaattctcgctgcaggtacaagatgaagataatgtaccgaaagttacttaggcccctatagcccttatccgtcgtttttcctctttccgtttccgccttgcatctctcctcactttgcgttcttctcttgtttccgttgatttgagtgtctccttggctgcttgccgctcagcctttttgaccttctttttctcgacctttctcgccgcacgctcttccgcctctctcaaagcaaccttgttggctttctttcgtcttttctcttcccgccttgcgcggcgctcttctttctcttctttcgactccgcatctttctcgtccatcttcctcctcctcttcttcttatccttggcttcggatcccgtacttaggggtgtgtctgcaccactgtcggggggtgtagggagcccagtggtaggatcgttcgctgaaccctccattactccaccacgaacaaacgacgcgtagaggccgcgagcaccagtgtatttgttggcagcgctgcgggcgacgatcttttccaactggccgcctttcagggtctgcttcatcgtgccgctcttcatgtcgatgcccttgagggcctggtcgaaggcgttgagccaccaggcctcggctttgtggtccttcttactgccgaggccggcgccatcttcgttccgtttgatgaggatgtggtgggtcaggccgatgctgtcgcttgtcgggttgagcgagtggcccttcccacgccaaccctgcgaggtcaggagggcgtgcgcgtccatgcagcgccgcggaatgatgaggttttgtcttcttacactgctatatataaaacatctgctgcagtgtggttgtaagctcgcgtgcgagcactagtcagtgaagcaggtcgagggctttggacgtcga

SEQ ID NO: 21019 - DNA, 1413 bp, Muscodor strobelii
  misc_feature: SGI cDNA ID NO. 567106
  misc_feature: Reduced expression when VOC is produced
  misc_feature: Encodes the peptide sequence at SEQ ID NO 21020
atgaatctactactttctgatgactatctgctgcaggattaccccgagaacatcaccaacacaatccgctccggccacacgacatgcctgcgcttcaaccgccgaggcgactacctcgcctcgggtcgcgtggacggcaccgtcgtcgtctgggatctcgagaccatgggcgtcgcccgcaagctgaggggccataggtcggccatcacttcgcttagctggtcccgctgcggccgctatctgctctctgcctgtcagggctggagagctgtgctgtgggatttgcagcatggcaacaggttcagagaggtccgcttccgagcaccggtctacacagccgagctgcatccttggaatcacttgctcttcgttgcttcgatattcgatgaacctccgtcactagtcgacctgactgagcctatcgacgtcaagcacattctcccctcagcgcccaagcgagccaatgccgacgccgacgcagcgaccaaagagaaacacgcgaaagaagacgctaagcagatgactacggcgacggtgtggacagccacgggagatcacatcctcgcaggcactaacaagggccgactgaacatcatcgattcccacacgaacgacatcatctggtccgagaagatatgcagctccgtcatcaccacgcttaagttgacagggtctgggagagagctgcttgtcaattcacaagatagaatcatccgaaccttccacgtgcccaacctatcggcccaagatcttgacccagacacgatccagatgccgctcgagcacaagttccaggatgtggtcaaccgacttagttggaatcatgtcacattcagcgccacgggtgaatacgtagcggcgtctacatacaacaaccacgaattgtatatctgggaaagaaatcacggcagtctagtgcgaatgctggagggtcccaaggaggagcaaggcgtcatcgagtggcatcctcacagagcgctgcttgccgcctgcgggctagagacaggtcgcatctacatctggtccgtgaccagtccgcagcggtggtctgcactggcgcctgacttcgtcgaggtggaggagaacgtcgagtacatagagcgtgaggatgagtttgatattcacccccaggaggagatcaacaagcgaagactcgatctggaggatgaggatatcgatgtgctaaccatggactcgggaaaggggtacgacgaggacatggcgggcacggggttccggatgccggtcttgtacaacctgggggagagcgacagcgaggaggagtttgtggccgtgtcgacggggactgtccggcgcagatcaatgggtgaaggtggggagggcggccctgttgaggaggagaagcctgttacgagtaagaaagcaaagagtggcaaggctaagaagaagtaa

SEQ ID NO: 21020 - protein, 470 aa, Muscodor strobelii
  misc_feature: SGI Peptide ID NO. 567106
  misc_feature (56)..(94): Pfam Id: PF00400 Pfam Desc: WD domain, G-beta repeat
  misc_feature (28)..(52): Pfam Id: PF00400 Pfam Desc: WD domain, G-beta repeat
  misc_feature (1)..(470): NCBI GI: 256735408 Blast Desc: NECHADRAFT_75224 [Nectria haematococca mpVI 77-13-4]
  misc_feature (1)..(470): NCBI GI: 46108066 Blast Desc: FG00915.1 [Gibberella zeae PH-1]
  misc_feature (1)..(462): NCBI GI: 116182154 Blast Desc: CHGG_01705 [Chaetomium globosum CBS 148.51] gi|88186002|gb|EAQ93470.1| CHGG_01705 [Chaetomium globosum CBS 148.51]
  misc_feature (1)..(470): NCBI GI: 39945338 Blast Desc: MGG_04651 [Magnaporthe grisea 70-15] gi|145021434|gb|EDK05563.1| MGG_04651 [Magnaporthe grisea 70-15]
  misc_feature (1)..(460): NCBI GI: 85111776 Blast Desc: NCU02104 [Neurospora crassa OR74A] gi|28925864|gb|EAA34862.1| conserved [Neurospora crassa OR74A]
  misc_feature (1)..(470): NCBI GI: 171695072 Blast Desc: protein product [Podospora anserina] gi|170947778|emb|CAP59941.1| protein product [Podospora anserina]
  misc_feature (1)..(447): NCBI GI: 261189981 Blast Desc: WD domain-containing protein [Ajellomyces dermatitidis SLH14081] gi|239591637|gb|EEQ74218.1| WD domain-containing protein [Ajellomyces dermatitidis SLH14081] WD domain-containing
  misc_feature (1)..(445): NCBI GI: 156054156 Blast Desc: SS1G_05926 [Sclerotinia sclerotiorum 1980] gi|154703706|gb|EDO03445.1| SS1G_05926 [Sclerotinia sclerotiorum 1980]
  misc_feature (1)..(447): NCBI GI: 258563156 Blast Desc: conserved [Uncinocarpus reesii 1704] gi|237907830|gb|EEP82231.1| conserved [Uncinocarpus reesii 1704]
  misc_feature (1)..(443): NCBI GI: 226278781 Blast Desc: Set1 complex component swd1 [Paracoccidioides brasiliensis Pb01]
  misc_feature: Useful for introducing or modulating the production of volatile compounds
MNLLLSDDYLLQDYPENITNTIRSGHTTCLRFNRRGDYLASGRVDGTVVVWDLETMGVARKLRGHRSAITSLSWSRCGRYLLSACQGWRAVLWDLQHGNRFREVRFRAPVYTAELHPWNHLLFVASIFDEPPSLVDLTEPIDVKHILPSAPKRANADADAATKEKHAKEDAKQMTTATVWTATGDHILAGTNKGRLNIIDSHTNDIIWSEKICSSVITTLKLTGSGRELLVNSQDRIIRTFHVPNLSAQDLDPDTIQMPLEHKFQDVVNRLSWNHVTFSATGEYVAASTYNNHELYIWERNHGSLVRMLEGPKEEQGVIEWHPHRALLAACGLETGRIYIWSVTSPQRWSALAPDFVEVEENVEYIEREDEFDIHPQEEINKRRLDLEDEDIDVLTMDSGKGYDEDMAGTGFRMPVLYNLGESDSEEEFVAVSTGTVRRRSMGEGGEGGPVEEEKPVTSKKAKSGKAKKK

SEQ ID NO: 21021 - DNA, 2079 bp, Muscodor strobelii
  misc_feature: SGI EST ID NO. CUFF.49329.0
  misc_feature: Variant of the nucleotide sequence at SEQ ID NO 21019
ctccaaacctccaaactacaatcatcgtcgaaatctcccccaccatacacacacatgcgactcgacgaccccatactactcgtgccaccgcgcaccagcatgcataggccaagatgaatctactactttctgatgactatctgctgcaggattaccccgagaacatcaccaacacaatccgctccggccacacgacatgcctgcgcttcaaccgccgaggcgactacctcgcctcgggtcgcgtggacggcaccgtcgtcgtctgggatctcgagaccatgggcgtcgcccgcaagctgaggggccataggtcggccatcacttcgcttagctggtcccgctgcggccgctatctgctctctgcctgtcagggctggagagctgtgctgtgggatttgcagcatggcaacaggttcagagaggtccgcttccgagcaccggtctacacagccgagctgcatccttggaatcacttgctcttcgttgcttcgatattcgatgaacctccgtcactagtcgacctgactgagcctatcgacgtcaagcacattctcccctcagcgcccaagcgagccaatgccgacgccgacgcagcgaccaaagagaaacacgcgaaagaagacgctaagcagatgactacggcgacggtgtggacagccacgggagatcacatcctcgcaggcactaacaagggccgactgaacatcatcgattcccacacgaacgacatcatctggtccgagaagatatgcagctccgtcatcaccacgcttaagttgacagggtctgggagagagctgcttgtcaattcacaagatagaatcatccgaaccttccacgtgcccaacctatcggcccaagatcttgacccagacacgatccagatgccgctcgagcacaagttccaggatgtggtcaaccgacttagttggaatcatgtcacattcagcgccacgggtgaatacgtagcggcgtctacatacaacaaccacgaattgtatatctgggaaagaaatcacggcagtctagtgcgaatgctggagggtcccaaggaggagcaaggcgtcatcgagtggcatcctcacagagcgctgcttgccgcctgcgggctagagacaggtcgcatctacatctggtccgtgaccagtccgcagcggtggtctgcactggcgcctgacttcgtcgaggtggaggagaacgtcgagtacatagagcgtgaggatgagtttgatattcacccccaggaggagatcaacaagcgaagactcgatctggaggatgaggatatcgatgtgctaaccatggactcgggaaaggggtacgacgaggacatggcgggcacggggttccggatgccggtcttgtacaacctgggggagagcgacagcgaggaggagtttgtggccgtgtcgacggggactgtccggcgcagatcaatgggtgaaggtggggagggcggccctgttgaggaggagaagcctgttacgagtaagaaagcaaagagtggcaaggctaagaagaagtaatccctaataagagcatatgccaagaggcatacagagactaccttactcaacgatgatatcctctttggtgacctctagtatgagatctttgtaccagaggcaacacagtcttgtgaatctcaaaacgtaatacgcaactggcgtatggacttagtaataaggcgacaatgtcatggacccatgttttggcagctggatgggtgtcaaaataaatggcaccgccaagtactacaattggtatatcaccaaacaatatgaagaatgatgttttgatcatcaatcaacgcttgatggaaatgaatctcgccaactttaaatgatgataataatgccctacgttgctgctgtagctaggtgtatgtactgtaggcgaaaggtaagtgtcttattcctgttgatagtagcctgatagccaattatatctcgaatcacatgcgttgagttttatgcgagcatttaataggagtttgtgtggttgcaaagacattgagtcaatgccagatgtttgcagcaccaggaaggagtggaccgatgaatggctgccgcgactgcc

SEQ ID NO: 21022 - DNA, 5259 bp, Muscodor strobelii
  misc_feature: SGI cDNA ID NO. 567107
  misc_feature: Reduced expression when VOC is produced
  misc_feature: Encodes the peptide sequence at SEQ ID NO 21023
atggcgaacctccacttcgcgcactcggatgcgcccctcaagacagtcgaggagatccagttcggtctcctctcgcccgaagagatcaagaacatgagcgtcgtccacatcatgtaccccgagaccatggacgagacgcgcaccaagccccgccagaacggcctcaacgacccccgcctcggctccgtcgaccgccagttcaagtgtgccacctgcctcgagaacatgggagagtgccccggtcatttcggtcacattgagctggccaagcctgtctatcatcccggctttattaagaaagtgaagaagatcctcgagatcgtctgcaccaattgcagcaaagtcaaggaagatagagaaaatcccgagtttctcgctgctgtgaacactcgcgatcccaagtcccgcttccagaaggtctggtccgtctgcaagggcaagatgatctgcagcaacgaggtccccaaggacgaggagaaggagtacgagccccacaacaagcccaagcagcacggccatggcggctgcggcaatagccagcccaagatccgccacacagccctcaagctcacagccgtctccgagaacaaggatgaggatggaaccaaggtcaaggaccagcgcatgatcactccggagcaggcgctcaacatcctcaagaacatctccgacgaggatctccgagacatggggctcaacaaagactacgctcgaccagagtggatgatcatcaccgtggtcgctgtgcctccacctcccgtccgtcccagtatctccatggatggtaccggtcagggtctcaggaacgaggatgacttgacatacaagcttggtgacatcattcgggccaacatcaacgtccgacaggcgattcaggaaggctccgcaaaccacattgctcaggagttcgagcagctgctccagtatcatgtggctacgctgatggacaatgacatcgccggacaaccacaagcactccagaaaagcggtcgccccgtcaagtcaatccgcgctcgtctaaagggcaaagaaggtcgactccgtggaaacttgatgggaaagcgtgtcgatttctctgcgcgaaccgtcatcacaggtgatgccaacatctcgctcgatgaagttggtgttcctcgtagcattgcaagagtcctcacgtaccctgagacggttactccctacaacatttcccgtcttcacaagctggtgcagaacggtcccaacgaacatcctggtgccaagtatgttgttcgctccgatggaactcgcattgacctacgacatcacaagcgtgctggtcagatctctctcgagtacggctggaaagtcgagcgtcatcttcaggacggagattacatcatcttcaaccgtcaaccatctctgcacaaagagtccatgatgggtcatcgagtaagagtcatgccttactctaccttccgactcaatttgtctgtgacctcaccctacaatgccgatttcgacggtgacgagatgaaccttcacgtcccacaaaccgaggagacccgcgccgagatcaaggagctgtgcatggttcccctcaacatcgtttcgcctcagcggaacggcccgctcatgggtattgtacaggacacattggcgggtgtgtacaagatggctcgacgagatgtcttcatggacaaagaccaagtcaccaacattctgttatgggtacctaactgggatggcgttatccctcaaccggccatcctcaagcctaggccgagatggacgggtaaacaaatcatcagcatgattattccgccggagatcagcctctacaacaagcctggtgctgataaggacaatgcactgagcgactggtgtccaagggacgatgacggcatacttatccgatctggcgaagttctttttggtctccttaccaagaaaatcgttggtgccgccggaggtggtatcgttcacctatgttacaatgagctgggctccgacggcgcaatggccttcctgaatgggtgccaacgtgtcattaactattggctccttcacaacggcttcagtattggcatcggtgacactattccggacaagatcaccatcgagaagattcaagcagatatcgataagcagaagggagaggtcgctgagctgaccgaaaaggcaactgcaaatatactggaggctcttccgggaatgaacgtccgtgaaactttcgaaagccaggtctctgcgtcgcttaatagggcccgtgacacagctggcaagaccactgagaacagtctaaaggattccaataacgcagttacaatggctcgatccggttccaagggatcatctatcaatatctcgcaaatgacagccctcgttggacaacaggttgtggaaggcaagcgtattccttttggtttcaaataccgcacgttgccccatttcaccaaggatgactactctcccgaggctcgtggtttcgtggagaactcatacctgcgaggattgacgccaaccgaattcttctttcacgctatggctggtcgcgagggtcttatcgacactgccgtcaagactgccgagacaggttatatccagcgccgtctcgtcaaggccctcgaggacgtcagtgcccgttatgatggcactgttcgcaattctctcggcgatgttatccagttctgctacggtgaagatggtcttgatgccatgatcatcgagaaacaggtcatggatcattgggcgattagggatagcgactttgtgaaccgctaccggctcgacgtgatggaggagctgccgccccaaattgccgattctcttgaatatatacaagatatcaccaatgatgctgagtctcaagacttacttgaccaggaatgggaggctctcaagaaagatcgtcaattcttgagagacctcaagggcaatgcagagaagcttgagacaggatttcagctccctctcaacgttggtcgtttgatcgaatcgtcaaagaaacttctcaaagtggatgattctaaggcgagcaatcttaagcccgaggacgttattcctgtcgtacagaatttcctagatgagatgaccgttatccgtggaaccgacgatgtgtcgagagaagcagatgcgaatgccactcttcttttcaaggccttactccgttcaagactggctttcaaacgacttgcttgcttccatcgactagacaagatgtctttccgtcacgtcatcggggagctagatcgcaaatggcgtagatccatggttaaccctggcgagatggttggcgtgttggccgcccagtccattggtgaacctgctacgcaaatgacgctgaatactttccatttcacgggtatcgcagcgaagaacgtcacacttggtgtccctcgactgaaggaaattctcaatgtagccagtaacatcaagaccccgtcgatgatggtctacctcgagggtaatcctactcaagacgaagccaagaggatgcgcagtatcgtcgagcatacaaatttacgatctgtcacagccgtcactgagatttactacgacccggtcattgaggaaacaaccatcgaggaggatcgagacatggttgagtcatacttcctcatcccagatgaaaccggtccctcgatcgatagacagtcgcgatggctgcttcgcattgtcctagatcgtcagaagatgcttgacaaaggcctgagtattgacgacatcgttgtgagacttcgacaagactacggaagcgacttggccatcatccccagtgatgacaacagtccaaaccaagtcattcgtatccgccccatgcccgaagataaggacgaaggcagcgacaaggccattgaagatgatatcatgctcaagcgtcttgccgatcatctcctagagaatctcacgctccgtggtgttcacggaatcgagcgagcgttccttaatagtgcgcaaaagattgccgtgacaccaagtggtgccctcctccagcaaaaggataaccccctttgcgacgagtggtaccttgataccacggggacttctctgcgcgacgtcttgtgtgttgaaggagttgacgcgaaccgcacgatcacgaacgatctatggcaaaccgtggaggtcttcggtattgaagctgcgcgtttgaatttgctgaatgagttaagacgtgtgctcgccttcgatggttcatacgtcaatgagcgccatctctctctacttgttgatgtcatgacctaccgcggaagcattgcggctgtgacgagacatggcataaaccgtgccgatacaggtgcgcttatgagatgttcgtttgaggagacagttgaaattcttctagaggccgcctctctcggcgagctcgacgactgcagaggtgtctccgagaacgtaatgcttggtcagcttgcccccatgggtacgggacatttccaggtcttcttggatcccaagatgctcgacacggtcatttctgataactcccgaatgggcctgatgccgggtatgactgtgaagggcagtggagcggatggtgctgcgacaccctacgataccggctcacccatgtcagacagtggtttcagtggcatgatcgcttcacccaatttaaatatgggcaatttctcccccatcgttggtgctggatcagataacaactctggcggcttttccgagtacggtggctatggaggcggaaccagcccgtacaggcccggttcagcaagtcccggcgcaaccagccctttctcgtcgacatcacctatgggcagctatgggcaaggaagctattcacctacatcgccaggtgctggatattcgccttcgtctcctttgatgggaggtggtctatacgccagttcaccacagttcagcccgtcgtcgccatcgttttcacccagctcgcctagcttcaggggcaataacaccatgaccagtccgtcaagtccaaactatagtccaagttccccgagcttctctccctcgtcgccgcaacactactcccccacttctccgaacatgaactcgccttcgtcgccaaactactcgccaacgagcccgacatacagtcccacgtctcctaagtatggcgcgagttcgccctcgtactcaccctcttctccgaactcgtactctccttcaagcccccagttcaaccccaccaatggagcaactcagcaatctcccacgagtccttcgtactcaccatcgtcccctcaatgggcgcccaatagctcacctgctcctggtggcaactccagtcccaagtattctcccacttcacctaagcagggctaa

SEQ ID NO: 21023 - protein, 1752 aa, Muscodor strobelii
  misc_feature: SGI Peptide ID NO. 567107
  misc_feature (13)..(351): Pfam Id: PF04997 Pfam Desc: RNA polymerase Rpb1, domain 1
  misc_feature (353)..(518): Pfam Id: PF00623 Pfam Desc: RNA polymerase Rpb1, domain 2
  misc_feature (521)..(686): Pfam Id: PF04983 Pfam Desc: RNA polymerase Rpb1, domain 3
  misc_feature (710)..(817): Pfam Id: PF05000 Pfam Desc: RNA polymerase Rpb1, domain 4
  misc_feature (824)..(1422): Pfam Id: PF04998 Pfam Desc: RNA polymerase Rpb1, domain 5
  misc_feature (890)..(1076): Pfam Id: PF04992 Pfam Desc: RNA polymerase Rpb1, domain 6
  misc_feature (1159)..(1292): Pfam Id: PF04990 Pfam Desc: RNA polymerase Rpb1, domain 7
  misc_feature (1)..(1749): NCBI GI: 116182152 Blast Desc: DNA-directed RNA polymerase II largest subunit [Chaetomium globosum CBS 148.51] gi|88186001|gb|EAQ93469.1| DNA-directed RNA polymerase II largest subunit [Chaetomium CBS
  misc_feature (1)..(1696): NCBI GI: 85111774 Blast Desc: DNA-directed RNA polymerase II largest subunit [Neurospora crassa OR74A] gi|28925863|gb|EAA34861.1| DNA-directed RNA polymerase II largest subunit [Neurospora crassa OR74A]
  misc_feature (1)..(1707): NCBI GI: 261358868 Blast Desc: DNA-directed RNA polymerase II subunit RPB1 [Verticillium albo-atrum VaMs.102]
  misc_feature (1)..(1687): NCBI GI: 171695074 Blast Desc: protein product [Podospora anserina] gi|170947779|emb|CAP59942.1| protein product [Podospora anserina]
  misc_feature (1)..(1726): NCBI GI: 145614528 Blast Desc: MGG_04652 [Magnaporthe grisea 70-15] gi|145021433|gb|EDK05562.1| MGG_04652 [Magnaporthe grisea 70-15]
  misc_feature (1)..(1739): NCBI GI: 154297219 Blast Desc: BC1G_12445 [Botryotinia fuckeliana B05.10] gi|150842972|gb|EDN18165.1| BC1G_12445 [Botryotinia fuckeliana B05.10]
  misc_feature (1)..(1739): NCBI GI: 156054160 Blast Desc: SS1G_05928 [Sclerotinia sclerotiorum 1980] gi|154703708|gb|EDO03447.1| SS1G_05928 [Sclerotinia sclerotiorum 1980]
  misc_feature (1)..(1697): NCBI GI: 46108068 Blast Desc: FG00916.1 [Gibberella zeae PH-1]
  misc_feature (1)..(1749): NCBI GI: 70996164 Blast Desc: DNA-dependent RNA polymerase II largest subunit [Aspergillus fumigatus Af293] gi|66850472|gb|EAL90799.1| DNA-dependent RNA polymerase II largest subunit, [Aspergillus RNA
  misc_feature (1)..(1749): NCBI GI: 119494984 Blast Desc: DNA-dependent RNA polymerase II largest subunit, [Neosartorya fischeri NRRL 181] gi|119412451|gb|EAW22392.1| DNA-dependent RNA polymerase II largest subunit, [Neosartorya
  misc_feature (1)..(1580): SWISSPROT Homolog: EC 2.7.7.6 DNA-directed RNA polymerase
  misc_feature: Useful for introducing or modulating the production of volatile compounds
MANLHFAHSDAPLKTVEEIQFGLLSPEEIKNMSVVHIMYPETMDETRTKPRQNGLNDPRLGSVDRQFKCATCLENMGECPGHFGHIELAKPVYHPGFIKKVKKILEIVCTNCSKVKEDRENPEFLAAVNTRDPKSRFQKVWSVCKGKMICSNEVPKDEEKEYEPHNKPKQHGHGGCGNSQPKIRHTALKLTAVSENKDEDGTKVKDQRMITPEQALNILKNISDEDLRDMGLNKDYARPEWMIITVVAVPPPPVRPSISMDGTGQGLRNEDDLTYKLGDIIRANINVRQAIQEGSANHIAQEFEQLLQYHVATLMDNDIAGQPQALQKSGRPVKSIRARLKGKEGRLRGNLMGKRVDFSARTVITGDANISLDEVGVPRSIARVLTYPETVTPYNISRLHKLVQNGPNEHPGAKYVVRSDGTRIDLRHHKRAGQISLEYGWKVERHLQDGDYIIFNRQPSLHKESMMGHRVRVMPYSTFRLNLSVTSPYNADFDGDEMNLHVPQTEETRAEIKELCMVPLNIVSPQRNGPLMGIVQDTLAGVYKMARRDVFMDKDQVTNILLWVPNWDGVIPQPAILKPRPRWTGKQIISMIIPPEISLYNKPGADKDNALSDWCPRDDDGILIRSGEVLFGLLTKKIVGAAGGGIVHLCYNELGSDGAMAFLNGCQRVINYWLLHNGFSIGIGDTIPDKITIEKIQADIDKQKGEVAELTEKATANILEALPGMNVRETFESQVSASLNRARDTAGKTTENSLKDSNNAVTMARSGSKGSSINISQMTALVGQQVVEGKRIPFGFKYRTLPHFTKDDYSPEARGFVENSYLRGLTPTEFFFHAMAGREGLIDTAVKTAETGYIQRRLVKALEDVSARYDGTVRNSLGDVIQFCYGEDGLDAMIIEKQVMDHWAIRDSDFVNRYRLDVMEELPPQIADSLEYIQDITNDAESQDLLDQEWEALKKDRQFLRDLKGNAEKLETGFQLPLNVGRLIESSKKLLKVDDSKASNLKPEDVIPVVQNFLDEMTVIRGTDDVSREADANATLLFKALLRSRLAFKRLACFHRLDKMSFRHVIGELDRKWRRSMVNPGEMVGVLAAQSIGEPATQMTLNTFHFTGIAAKNVTLGVPRLKEILNVASNIKTPSMMVYLEGNPTQDEAKRMRSIVEHTNLRSVTAVTEIYYDPVIEETTIEEDRDMVESYFLIPDETGPSIDRQSRWLLRIVLDRQKMLDKGLSIDDIVVRLRQDYGSDLAIIPSDDNSPNQVIRIRPMPEDKDEGSDKAIEDDIMLKRLADHLLENLTLRGVHGIERAFLNSAQKIAVTPSGALLQQKDNPLCDEWYLDTTGTSLRDVLCVEGVDANRTITNDLWQTVEVFGIEAARLNLLNELRRVLAFDGSYVNERHLSLLVDVMTYRGSIAAVTRHGINRADTGALMRCSFEETVEILLEAASLGELDDCRGVSENVMLGQLAPMGTGHFQVFLDPKMLDTVISDNSRMGLMPGMTVKGSGADGAATPYDTGSPMSDSGFSGMIASPNLNMGNFSPIVGAGSDNNSGGFSEYGGYGGGTSPYRPGSASPGATSPFSSTSPMGSYGQGSYSPTSPGAGYSPSSPLMGGGLYASSPQFSPSSPSFSPSSPSFRGNNTMTSPSSPNYSPSSPSFSPSSPQHYSPTSPNMNSPSSPNYSPTSPTYSPTSPKYGASSPSYSPSSPNSYSPSSPQFNPTNGATQQSPTSPSYSPSSPQWAPNSSPAPGGNSSPKYSPTSPKQG

SEQ ID NO: 21024 - DNA, 6509 bp, Muscodor strobelii
  misc_feature: SGI EST ID NO. CUFF.49599.0
  misc_feature: Variant of the nucleotide sequence at SEQ ID NO 21022
caccataacatcgttttgcgcgacatcaccatcccatccaccacgcgtcggccatcgcagcaccagttctcccgcgatctgccgacatctgcgttttggcgacaccaccgttgacgagcccgcgaccgactgccccccagcgcgcgccgagagaaaagtcgtcacccctacggcctcgcggcctgccgcctgaggaaggcacgacctcctctccttcctgtgccatcgacggcttcctctcatttccacctccccgcgcctgaccgcgcacccctccatctcccgttcaattctcgctctcttcaccgcctgtgtatcatcatcatcatcaccgttgtcgcggttgctttcttttcatttcgtttcgtcctccgcttctttcgagggcgcttaatctgtgcactgcacgcatccacgcgatcacgactcacgaacgcgacctgcatcgcccacccattccttccgtcatccaccatcctcgtcatccgacccatcacacgatacacaccagcccagcatggcgaacctccacttcgcgcactcggatgcgcccctcaagacagtcgaggagatccagttcggtctcctctcgcccgaagagatcaagaacatgagcgtcgtccacatcatgtaccccgagaccatggacgagacgcgcaccaagccccgccagaacggcctcaacgacccccgcctcggctccgtcgaccgccagttcaagtgtgccacctgcctcgagaacatgggagagtgccccggtcatttcggtcacattgagctggccaagcctgtctatcatcccggctttattaagaaagtgaagaagatcctcgagatcgtctgcaccaattgcagcaaagtcaaggaagatagagaaaatcccgagtttctcgctgctgtgaacactcgcgatcccaagtcccgcttccagaaggtctggtccgtctgcaagggcaagatgatctgcagcaacgaggtccccaaggacgaggagaaggagtacgagccccacaacaagcccaagcagcacggccatggcggctgcggcaatagccagcccaagatccgccacacagccctcaagctcacagccgtctccgagaacaaggatgaggatggaaccaaggtcaaggaccagcgcatgatcactccggagcaggcgctcaacatcctcaagaacatctccgacgaggatctccgagacatggggctcaacaaagactacgctcgaccagagtggatgatcatcaccgtggtcgctgtgcctccacctcccgtccgtcccagtatctccatggatggtaccggtcagggtctcaggaacgaggatgacttgacatacaagcttggtgacatcattcgggccaacatcaacgtccgacaggcgattcaggaaggctccgcaaaccacattgctcaggagttcgagcagctgctccagtatcatgtggctacgctgatggacaatgacatcgccggacaaccacaagcactccagaaaagcggtcgccccgtcaagtcaatccgcgctcgtctaaagggcaaagaaggtcgactccgtggaaacttgatgggaaagcgtgtcgatttctctgcgcgaaccgtcatcacaggtgatgccaacatctcgctcgatgaagttggtgttcctcgtagcattgcaagagtcctcacgtaccctgagacggttactccctacaacatttcccgtcttcacaagctggtgcagaacggtcccaacgaacatcctggtgccaagtatgttgttcgctccgatggaactcgcattgacctacgacatcacaagcgtgctggtcagatctctctcgagtacggctggaaagtcgagcgtcatcttcaggacggagattacatcatcttcaaccgtcaaccatctctgcacaaagagtccatgatgggtcatcgagtaagagtcatgccttactctaccttccgactcaatttgtctgtgacctcaccctacaatgccgatttcgacggtgacgagatgaaccttcacgtcccacaaaccgaggagacccgcgccgagatcaaggagctgtgcatggttcccctcaacatcgtttcgcctcagcggaacggcccgctcatgggtattgtacaggacacattggcgggtgtgtacaagatggctcgacgagatgtcttcatggacaaagaccaagtcaccaacattctgttatgggtacctaactgggatggcgttatccctcaaccggccatcctcaagcctaggccgagatggacgggtaaacaaatcatcagcatgattattccgccggagatcagcctctacaacaagcctggtgctgataaggacaatgcactgagcgactggtgtccaagggacgatgacggcatacttatccgatctggcgaagttctttttggtctccttaccaagaaaatcgttggtgccgccggaggtggtatcgttcacctatgttacaatgagctgggctccgacggcgcaatggccttcctgaatgggtgccaacgtgtcattaactattggctccttcacaacggcttcagtattggcatcggtgacactattccggacaagatcaccatcgagaagattcaagcagatatcgataagcagaagggagaggtcgctgagctgaccgaaaaggcaactgcaaatatactggaggctcttccgggaatgaacgtccgtgaaactttcgaaagccaggtctctgcgtcgcttaatagggcccgtgacacagctggcaagaccactgagaacagtctaaaggattccaataacgcagttacaatggctcgatccggttccaagggatcatctatcaatatctcgcaaatgacagccctcgttggacaacaggttgtggaaggcaagcgtattccttttggtttcaaataccgcacgttgccccatttcaccaaggatgactactctcccgaggctcgtggtttcgtggagaactcatacctgcgaggattgacgccaaccgaattcttctttcacgctatggctggtcgcgagggtcttatcgacactgccgtcaagactgccgagacaggttatatccagcgccgtctcgtcaaggccctcgaggacgtcagtgcccgttatgatggcactgttcgcaattctctcggcgatgttatccagttctgctacggtgaagatggtcttgatgccatgatcatcgagaaacaggtcatggatcattgggcgattagggatagcgactttgtgaaccgctaccggctcgacgtgatggaggagctgccgccccaaattgccgattctcttgaatatatacaagatatcaccaatgatgctgagtctcaagacttacttgaccaggaatgggaggctctcaagaaagatcgtcaattcttgagagacctcaagggcaatgcagagaagcttgagacaggatttcagctccctctcaacgttggtcgtttgatcgaatcgtcaaagaaacttctcaaagtggatgattctaaggcgagcaatcttaagcccgaggacgttattcctgtcgtacagaatttcctagatgagatgaccgttatccgtggaaccgacgatgtgtcgagagaagcagatgcgaatgccactcttcttttcaaggccttactccgttcaagactggctttcaaacgacttgcttgcttccatcgactagacaagatgtctttccgtcacgtcatcggggagctagatcgcaaatggcgtagatccatggttaaccctggcgagatggttggcgtgttggccgcccagtccattggtgaacctgctacgcaaatgacgctgaatactttccatttcacgggtatcgcagcgaagaacgtcacacttggtgtccctcgactgaaggaaattctcaatgtagccagtaacatcaagaccccgtcgatgatggtctacctcgagggtaatcctactcaagacgaagccaagaggatgcgcagtatcgtcgagcatacaaatttacgatctgtcacagccgtcactgagatttactacgacccggtcattgaggaaacaaccatcgaggaggatcgagacatggttgagtcatacttcctcatcccagatgaaaccggtccctcgatcgatagacagtcgcgatggctgcttcgcattgtcctagatcgtcagaagatgcttgacaaaggcctgagtattgacgacatcgttgtgagacttcgacaagactacggaagcgacttggccatcatccccagtgatgacaacagtccaaaccaagtcattcgtatccgccccatgcccgaagataaggacgaaggcagcgacaaggccattgaagatgatatcatgctcaagcgtcttgccgatcatctcctagagaatctcacgctccgtggtgttcacggaatcgagcgagcgttccttaatagtgcgcaaaagattgccgtgacaccaagtggtgccctcctccagcaaaaggataaccccctttgcgacgagtggtaccttgataccacggggacttctctgcgcgacgtcttgtgtgttgaaggagttgacgcgaaccgcacgatcacgaacgatctatggcaaaccgtggaggtcttcggtattgaagctgcgcgtttgaatttgctgaatgagttaagacgtgtgctcgccttcgatggttcatacgtcaatgagcgccatctctctctacttgttgatgtcatgacctaccgcggaagcattgcggctgtgacgagacatggcataaaccgtgccgatacaggtgcgcttatgagatgttcgtttgaggagacagttgaaattcttctagaggccgcctctctcggcgagctcgacgactgcagaggtgtctccgagaacgtaatgcttggtcagcttgcccccatgggtacgggacatttccaggtcttcttggatcccaagatgctcgacacggtcatttctgataactcccgaatgggcctgatgccgggtatgactgtgaagggcagtggagcggatggtgctgcgacaccctacgataccggctcacccatgtcagacagtggtttcagtggcatgatcgcttcacccaatttaaatatgggcaatttctcccccatcgttggtgctggatcagataacaactctggcggcttttccgagtacggtggctatggaggcggaaccagcccgtacaggcccggttcagcaagtcccggcgcaaccagccctttctcgtcgacatcacctatgggcagctatgggcaaggaagctattcacctacatcgccaggtgctggatattcgccttcgtctcctttgatgggaggtggtctatacgccagttcaccacagttcagcccgtcgtcgccatcgttttcacccagctcgcctagcttcaggggcaataacaccatgaccagtccgtcaagtccaaactatagtccaagttccccgagcttctctccctcgtcgccgcaacactactcccccacttctccgaacatgaactcgccttcgtcgccaaactactcgccaacgagcccgacatacagtcccacgtctcctaagtatggcgcgagttcgccctcgtactcaccctcttctccgaactcgtactctccttcaagcccccagttcaaccccaccaatggagcaactcagcaatctcccacgagtccttcgtactcaccatcgtcccctcaatgggcgcccaatagctcacctgctcctggtggcaactccagtcccaagtattctcccacttcacctaagcagggctaaaccgccctcatgcatttcagccagtcatttgaataagcaactcgggcgtcaaaagggaattctggcccatgcattccggcgtttttgtgaattttgttacccccgtcctcgatggatcttggcgggtcatacacacccataatagagaaaaagattgtccttttttttctgcttctatgttcctcctttcccgctctcggcatcagttcaatactagaaaggcaacgaacaaagagcggcaatggttaccagttcgtccagacatagagaaaataaacattctcaaaagccaccgcacaagttgaaagacacggttctgcggttggtatatactgtacattagggacaggacgaaagtggatgcgtggaggcttggtctcctattgatttcttcacgtgaagagagggaagggagacaacagtctgactaaggcatcgctaccagattggacgaatgaataaagaaattgcaagagactgtccaaggaagtgaatgtggtctgagtcatcgggaaacatgacagccaccttggctatttcgcagaggattatgaaaaacagatgcggaaatttcggcagaagggacagattgttacagccagcccatgagatggggggaactcaacgatcccagtgagtaacttggtcgtctagacttacaatgtctttagactatagtggatatagttacctgccttaatgcctgttatgcccggaactacgacaatggccg

SEQ ID NO: 21025 - DNA, 624 bp, Muscodor strobelii
  misc_feature: SGI cDNA ID NO. 567108
  misc_feature: Encodes the peptide sequence at SEQ ID NO 21026
atgagattttacagcaatctgtctatcgcctcggtcttgagctccgtgctcgttctctcatcccagctaacgaggtctttcgccgctccactcgatgctggtaacgagtctactgctctcgaagctcgcgcaaagaccattccaccccaggaagagtggcaaggcctgatcgatgatccttctaagtttgccgactatgccaagctcggggccccgacagtagacacatcagtcttcttcaccggtcaggatcagaaaaccatcaatcaacttgtctcatgggcgggtggtcagggtcacacgcccattcgaaacatatggaacagtgcaaatttctatcagaaaggccagtatcccaatatcgccgacgatatgtggcgcaactaccagagggcgttctctacctatttcgccgaccagacgaaaggcgttgcttaccttctatttccccaagaccaaaaacctagcccagaccgtattttctacgacgttgagctcactgagattatcaacatggcgaaggttgacaagattatgaaccgatatatgaatgccgaatacgactggaagtctgagacgaaaatctattggcaagcggcagagggcaagcctacaaaattgtag

SEQ ID NO: 21026 - protein, 207 aa, Muscodor strobelii
  misc_feature: SGI Peptide ID NO. 567108
  misc_feature (71)..(178): NCBI GI: 169622472 Blast Desc: SNOG_14460 [Phaeosphaeria nodorum SN15] gi|160704782|gb|EAT78331.2| SNOG_14460 [Phaeosphaeria nodorum SN15]
MRFYSNLSIASVLSSVLVLSSQLTRSFAAPLDAGNESTALEARAKTIPPQEEWQGLIDDPSKFADYAKLGAPTVDTSVFFTGQDQKTINQLVSWAGGQGHTPIRNIWNSANFYQKGQYPNIADDMWRNYQRAFSTYFADQTKGVAYLLFPQDQKPSPDRIFYDVELTEIINMAKVDKIMNRYMNAEYDWKSETKIYWQAAEGKPTKL

SEQ ID NO: 21027 - DNA, 819 bp, Muscodor strobelii
  misc_feature: SGI cDNA ID NO. 567109
  misc_feature: Elevated expression when VOC is produced
  misc_feature: Encodes the peptide sequence at SEQ ID NO 21028
atgccagccttgaccgagttcattgggcttgaccaactcatctctacgggaaattttgaaggcatccaaaatctctacaacagcactgacctcaggcaacgaccagacttccgtaagtttgtcgcagagcaagccgcattcaacgctcagccagatatgcttgaatggtccttccaagcgggctacaacatacccgagaagctagccaacaatgaactatatgagaaagcgagctactctcgaagccctgctatcttcaaagttcttctcgcacacggtctcgatctgaacaaatacgatagcgagtcctttggcgacgcgttgagcctcgctgcccatcatggcgatactccttttgcgcgctttcttctcgagaatggcgctgatccgaatatgacacggggcctcgtggaatatgaagcagctgtctgggcgattgcaggtgcaaacccgtcacttgagatcttgcgacttatgctactgcacggttggacacagaaagaaagcacggctcacatagcagctgcagaaatggggaacatagaagccatcaaacttctcgtcgaagctgagaagccagctgaactcgaacttgccgacccatggtggagcatcccgactgagggagctggtgcacccgggactgccctgtacagagccgcactcaagggacaagagaggtctgtagaatacctattagagaaaggtgccaatacgcacttcgaggaccgtcagggacgctcatgcgcatgggcggctagagaaagtggtaacgcgaaggtgatcgacatgatagaaaacagtcgtcaatctacttag

SEQ ID NO: 21028 - protein, 272 aa, Muscodor strobelii
  misc_feature: SGI Peptide ID NO. 567109
  misc_feature (215)..(244): Pfam Id: PF00023 Pfam Desc: Ankyrin repeat
  misc_feature (14)..(265): NCBI GI: 145244168 Blast Desc: An11g06030 [Aspergillus niger] gi|134079276|emb|CAK40758.1| protein product [Aspergillus niger]
  misc_feature (14)..(266): NCBI GI: 169622470 Blast Desc: SNOG_14459 [Phaeosphaeria nodorum SN15] gi|111057210|gb|EAT78330.1| SNOG_14459 [Phaeosphaeria nodorum SN15]
  misc_feature (69)..(269): NCBI GI: 67537808 Blast Desc: AN5074.2 [Aspergillus nidulans FGSC A4] gi|40740979|gb|EAA60169.1| AN5074.2 [Aspergillus nidulans FGSC A4] gi|259482044|tpe|CBF76145.1| TPA: conserved [Aspergillus FGSC
  misc_feature (75)..(265): NCBI GI: 238576464 Blast Desc: MPER_12988 [Moniliophthora perniciosa FA553] gi|215449006|gb|EEB88973.1| MPER_12988 [Moniliophthora perniciosa FA553]
  misc_feature (30)..(257): NCBI GI: 123448750 Blast Desc: ankyrin repeat protein [Trichomonas vaginalis G3] gi|121894972|gb|EAY00172.1| ankyrin repeat protein, [Trichomonas vaginalis G3]
  misc_feature (11)..(265): NCBI GI: 229582572 Blast Desc: Ankyrin [Sulfolobus islandicus Y.N.15.51] gi|228013288|gb|ACP49049.1| Ankyrin [Sulfolobus islandicus Y.N.15.51]
  misc_feature (75)..(249): NCBI GI: 238576464 Blast Desc: MPER_12988 [Moniliophthora perniciosa FA553] gi|215449006|gb|EEB88973.1| MPER_12988 [Moniliophthora perniciosa FA553]
  misc_feature (44)..(265): NCBI GI: 154414721 Blast Desc: ankyrin repeat protein [Trichomonas vaginalis G3] gi|121914604|gb|EAY19401.1| ankyrin repeat protein, [Trichomonas vaginalis G3]
  misc_feature (85)..(268): NCBI GI: 242816359 Blast Desc: multiple ankyrin repeats single kh domain protein, [Talaromyces stipitatus ATCC 10500] gi|218715100|gb|EED14523.1| multiple ankyrin repeats single kh domain protein, [Talaromyces
  misc_feature (83)..(265): NCBI GI: 123454807 Blast Desc: [Trichomonas vaginalis G3] gi|121897821|gb|EAY02930.1| TVAG_040800 [Trichomonas vaginalis G3]
  misc_feature: Useful for introducing or modulating the production of volatile compounds
MPALTEFIGLDQLISTGNFEGIQNLYNSTDLRQRPDFRKFVAEQAAFNAQPDMLEWSFQAGYNIPEKLANNELYEKASYSRSPAIFKVLLAHGLDLNKYDSESFGDALSLAAHHGDTPFARFLLENGADPNMTRGLVEYEAAVWAIAGANPSLEILRLMLLHGWTQKESTAHIAAAEMGNIEAIKLLVEAEKPAELELADPWWSIPTEGAGAPGTALYRAALKGQERSVEYLLEKGANTHFEDRQGRSCAWAARESGNAKVIDMIENSRQST

SEQ ID NO: 21029 - DNA, 1172 bp, Muscodor strobelii
  misc_feature: SGI EST ID NO. CUFF.49389.0
  misc_feature: Variant of the nucleotide sequence at SEQ ID NO 21027
cataaagtaacgagtacgatggcgacggctgattcgttgccttacaattccttctctgcgaccccacgcatctcgtcggcgactaaagcccattcttcgcatatgtacccagaagcctagagctctccaccttcggcagactgcatctcaagatattcatgccactacgctaatagatacaatgccagccttgaccgagttcattgggcttgaccaactcatctctacgggaaattttgaaggcatccaaaatctctacaacagcactgacctcaggcaacgaccagacttccgtaagtttgtcgcagagcaagccgcattcaacgctcagccagatatgcttgaatggtccttccaagcgggctacaacatacccgagaagctagccaacaatgaactatatgagaaagcgagctactctcgaagccctgctatcttcaaagttcttctcgcacacggtctcgatctgaacaaatacgatagcgagtcctttggcgacgcgttgagcctcgctgcccatcatggcgatactccttttgcgcgctttcttctcgagaatggcgctgatccgaatatgacacggggcctcgtggaatatgaagcagctgtctgggcgattgcaggtgcaaacccgtcacttgagatcttgcgacttatgctactgcacggttggacacagaaagaaagcacggctcacatagcagctgcagaaatggggaacatagaagccatcaaacttctcgtcgaagctgagaagccagctgaactcgaacttgccgacccatggtggagcatcccgactgagggagctggtgcacccgggactgccctgtacagagccgcactcaagggacaagagaggtctgtagaatacctattagagaaaggtgccaatacgcacttcgaggaccgtcagggacgctcatgcgcatgggcggctagagaaagtggtaacgcgaaggtgatcgacatgatagaaaacagtcgtcaatctacttagcaatgcgggctttgtatactatgatgctatttgcgcccttttacttgtgttaattacactattacactattacaatcccgccatcatgttcattaattgcaaaagttgtaactttgcgtgtcgtgttcttgggccatacttagtcggcacaatagcaaccatgtaaatcaag

SEQ ID NO: 21030 - DNA, 261 bp, Muscodor strobelii
  misc_feature: SGI cDNA ID NO. 567110
  misc_feature: Elevated expression when VOC is produced
  misc_feature: Encodes the peptide sequence at SEQ ID NO 21031
atggcatctaaccagccctccgttgagttgaccgctcaggatattcgcaagatgcagccaaagccgatgacattcctctctttggccccggagacttccacctcctacccgtccgcccagaacatcaaacccgctgcacctcgtcgcagttctagtgtaagcagcgcgagtagccatcgtgttcttaagctaggacctgtccactggggtgagcacccagatgagcacaaggaggattaccacgaggtcgctgtcgagtaa

SEQ ID NO: 21031 - protein, 86 aa, Muscodor strobelii
  misc_feature: SGI Peptide ID NO. 567110
  misc_feature (12)..(86): NCBI GI: 171695076 Blast Desc: protein product [Podospora anserina] gi|170947780|emb|CAP59943.1| protein product [Podospora anserina]
  misc_feature (21)..(86): NCBI GI: 116182090 Blast Desc: [Chaetomium globosum CBS 148.51] gi|88185970|gb|EAQ93438.1| [Chaetomium globosum CBS 148.51]
  misc_feature (9)..(85): NCBI GI: 46108070 Blast Desc: FG00917.1 [Gibberella zeae PH-1]
  misc_feature (22)..(80): NCBI GI: 39945344 Blast Desc: [Magnaporthe grisea 70-15] gi|145021430|gb|EDK05559.1| [Magnaporthe grisea 70-15]
  misc_feature: Useful for introducing or modulating the production of volatile compounds
MASNQPSVELTAQDIRKMQPKPMTFLSLAPETSTSYPSAQNIKPAAPRRSSSVSSASSHRVLKLGPVHWGEHPDEHKEDYHEVAVE

SEQ ID NO: 21032 - DNA, 4362 bp, Muscodor strobelii
  misc_feature: SGI cDNA ID NO. 567111
  misc_feature: Reduced expression when VOC is produced
  misc_feature: Encodes the peptide sequence at SEQ ID NO 21033
atgcaatgctacgcggagttgacgcctccgacggccgtcacgcactcgctgagcctgcccttcgtctcggcgcaaagcagcaacctcgtcgtcgccagggcctcgctgctccaggtgttcgccaccaagtctgtctctgccgagcttgacaacgcccagaacgaccgcctccaggacccgccctccggccagcaccagccgtacgatgcggggctgcaagacgacgacggcctcgaggcctctttcctcgccgatgccgccctagtccgctccgaccgctcccactacaccaagctcgtcctcgttgccgagttcgctcttgccggcaccgtcaccggcctcgcgcgcgtcaagtgcccctcgtctgccgccggcggggacgccctgctgctggccttcaaggatgcaaagctcagcatggtcgagtggcaccccgccacacactccatcaccaccacctcgatccactactacgagcaggaggagcttcagggcagcgcctgggccccctcgctgagccactatgccaacatcctcaccgcagacccgggcagtcggtgcgccgcgcttaagttcggcctgcgcaatctagctatagtgcagttcagatcggcggaggaggacgtcgacatgcaggactgggacgaggagctcgacggcccttgccccgtcaaggagccggccgcggccacggtcaatggagccggcagcggccaagatactcccttctcggcctcgttcgtcctccgcctgcccaatctcgaccccactctcgtccatcccgtgcacgttgcctttttacatgagtatagagagcccacgtttggcatcctctcctccacgtcctcgccgtccgccgtccttggcaggaaggaccagctgtcgtacatggtcttcacgctcgatctcgagcagagggcctccaccaccatcctctccgtcaacggcttgcccgacgacctctcccacgtactcgccttgcctgcccctattggtggagccctcctaatcggctctaacgaactaatccacattgatcagtctggaaagccccatggtgtcggtgtgaaccccttctccaagcaagccacagcttttagcttggtcgaccaatctgatctggacctgagactcgagggctgcaaggtcgaagtcttgtcagcagaaaacggcgaactgctgatgattttgaacgatggcagccttgccttgatcactttccgcattgatggtagaaccgtgtcgggattgagtatccagctagtatcgtctgcctccggagggtctattgtgccaacccgcgtgtccactctcagcccgctccataaaagtgcaatgtttgtcggcagcgaagactctgattccttggtgcttggctggacacgcatacaaagtcaagtgggcaagcgaaaacatcgatttcacgacgcctccctcgacctcgagatggatgaagaagatctggaagacatgatagacgatgatgacttgtacggcgaggacacatcacctgctaaacagctctcacatactggcggtagtaatggtgtaaagtctggtgaagtcatcttccgcatacatgaccgtcttgtgagcattgcgccgatacgtgatttcacgttgtctcaacttccaccctcaacggatgaggaaaggatgaaccaggcaggtgtatccagcgacctgagcttgatctgtgccgtaggaggcggtaagtctggctctcttgcgattttgaaccgcgccattcaacctactgttatcggacgtttcgagtttcccgaagctcgaggtatttggacagtggccgcccagaaaccgattccgaaatcattacaggccgaccgtggcgcgacctccctcggtgcggaatacgatatttcagcgcaatatgataagtacatgattgtgtcaaaagtagatcttgacggatatgagacgtcggatgtttacgcattgacgggcgctggattcgaggcattgacgggaaccgaatttgaccctgctgccgggttcactattgaggctggtacgatgggcaaacatatgagagtgatccaggtgctcaagacggcgatccactgctatgacggagattttgggctgaaccaaattgtccccatgcttgacgaagaaacaggagccgagcctcgtgttgagagtgctagcatagctgacccttacatactcctcgtacgagacgatgccagcatttttgttgccaagatggacaataatttggaattagaggagctcgaaaaagaggacagtgctttaagctctacaaaatggataaccggctctctgtacgaagataaactcggcatattctcaacgacaaatgatgataaagggactgcgacgaaagacaatatcgtcatgttgttactcagtaaaagtggtgccctctacatctatgccctgccagacttatcgacaccgctatatgtcgctgagggattgtcatttttaccccctatcctctctgcagactatgcggcccggcgtggaacatctcgtgagactctaaaggagatagtctttgccgatctaggcgataaaacatcttcatatccctatttgattactaggaactcttatgatgacattaccatctatgagccgtaccgtatcccagtgtcaacaacagaactctcgaaagctctccattttcagaaattaccaaatccttgcatagcaagaggtgcggaactcacgacagaagatgatgtggaagttcacagaaagtatccaatgagacgatgtgacgaggtcgctggctacaaaactatatttctacctggtgactctccaagtttcatcatcaagtcgtcaaaaacgcagccaaaagtcatagagcttcaaggtagtggagtgcgcggcatgagctcgtttcacacagaaggctgtgaacgtggctttatatatacggatgctaatggcatcgcacgtgtctctcaactttccgcaaacaatactacttatgccgagaccggcatgcctctcaaaaaactacctttgcatgtcgatactcatgcagtcacttttcatcccccatcgggaactgtagccgtcggatgtggcattttagagccgtttgaactaccaaaggatgacgactatcataaggaatggcagctggagaaggacctctcactcaagcctcttgtagagcgcgggctcatcaagcttattaacccggttacctggacagtgatagatacaatcgagatggagccatgtgaaatagtcatgtgcgttgagaccctccatctcgaagtatctgaggctacaaatgaaagaaaatacctcatcgtcgtcggtaccgctatcgcccgcggagaagatctaccggttagaggacgtgttctcgtctatgacgttgtcgctgtcatacctgaacccggtaagccggagacagataagaagttgaagctcatagcgaaggaagatatcccccgaggcgcaattacggccctctctgagatcggcacacaaggcctgatgctcgtggcgcagggtcaaaaatgcatggtcagaggcctgaaggaagatggatccttattgcctgttgccttcatggacatgagttgctatgtgacagcagtccgcgagcttcgaggaactggactctgtctgatgggcgatgctgtaaaagggctatggttcactggctacacggaggagccgtataggatgattctcttcggcaaaagttcaacgaagttggaggtcctcactactgagttcttacctgatggtaacgagctttccatcgtggcatgtgattctgatggtggtattcatatcctagaatttgacccagagcatccgaaatcgatgcaaggacatcttctcctccatcgcacttcatttgccaccggtgcccatgtgccgacccgcagcagactgctgcctcgcacgttaccagccacgtcggattaccttgcccagcaccattctacgaatggaaactcaccaaccacaacagccgcatcaactatcctcttcacttcacctaccggagtcctcgccaccctctcgccactctccgaacctcaataccgccgattgaatttcttatctggtcagcttgtctcatccttaccccagcactacgcaggtctcaatcctaaggactaccgggcaccggcatcgacgggtgcagttgggagattcccgccgggcgtcgatgcggggatgggacgtaatattgtggatggagctttacttgcgcgttggaacgaacttggcgctggacgacgtagtgagatcgccgggcgggcaggcttctccggtgcggatgaagtgcgcgaggttcttagagaagtactggggaccaatggactaggatatctctag

SEQ ID NO: 21033 - protein, 1453 aa, Muscodor strobelii
  misc_feature: SGI Peptide ID NO. 567111
  misc_feature (1056)..(1377): Pfam Id: PF03178 Pfam Desc: CPSF A subunit region
  misc_feature (1)..(1453): NCBI GI: 171695066 Blast Desc: protein product [Podospora anserina] gi|170947775|emb|CAP59938.1| protein product [Podospora anserina]
  misc_feature (2)..(1310): NCBI GI: 116182170 Blast Desc: CHGG_01713 [Chaetomium globosum CBS 148.51] gi|88186010|gb|EAQ93478.1| CHGG_01713 [Chaetomium globosum CBS 148.51]
  misc_feature (1)..(1453): NCBI GI: 39974229 Blast Desc: MGG_00739 [Magnaporthe grisea 70-15] gi|145018328|gb|EDK02607.1| MGG_00739 [Magnaporthe grisea 70-15]
  misc_feature (1)..(1431): NCBI GI: 164429683 Blast Desc: NCU02082 [Neurospora crassa OR74A] gi|157073577|gb|EAA35373.2| conserved [Neurospora crassa OR74A]
  misc_feature (1)..(1452): NCBI GI: 46120520 Blast Desc: FG04907.1 [Gibberella zeae PH-1]
  misc_feature (1)..(1453): NCBI GI: 256734895 Blast Desc: [Nectria haematococca mpVI 77-13-4]
  misc_feature (1)..(1444): NCBI GI: 156040479 Blast Desc: SS1G_12256 [Sclerotinia sclerotiorum 1980] gi|154696312|gb|EDN96050.1| SS1G_12256 [Sclerotinia sclerotiorum 1980]
  misc_feature (297)..(1453): NCBI GI: 154320778 Blast Desc: BC1G_01861 [Botryotinia fuckeliana B05.10] gi|150853550|gb|EDN28742.1| BC1G_01861 [Botryotinia fuckeliana B05.10]
  misc_feature (242)..(1453): NCBI GI: 261361315 Blast Desc: cft-1 [Verticillium albo-atrum VaMs.102]
  misc_feature (1)..(1453): NCBI GI: 119195757 Blast Desc: CIMG_02253 [Coccidioides immitis RS] gi|121769680|sp|Q1E5B0.1|CFT1_COCIM RecName: Full=Protein CFT1; AltName: Full=Cleavage factor two protein 1
  misc_feature: Useful for introducing or modulating the production of volatile compounds
MQCYAELTPPTAVTHSLSLPFVSAQSSNLVVARASLLQVFATKSVSAELDNAQNDRLQDPPSGQHQPYDAGLQDDDGLEASFLADAALVRSDRSHYTKLVLVAEFALAGTVTGLARVKCPSSAAGGDALLLAFKDAKLSMVEWHPATHSITTTSIHYYEQEELQGSAWAPSLSHYANILTADPGSRCAALKFGLRNLAIVQFRSAEEDVDMQDWDEELDGPCPVKEPAAATVNGAGSGQDTPFSASFVLRLPNLDPTLVHPVHVAFLHEYREPTFGILSSTSSPSAVLGRKDQLSYMVFTLDLEQRASTTILSVNGLPDDLSHVLALPAPIGGALLIGSNELIHIDQSGKPHGVGVNPFSKQATAFSLVDQSDLDLRLEGCKVEVLSAENGELLMILNDGSLALITFRIDGRTVSGLSIQLVSSASGGSIVPTRVSTLSPLHKSAMFVGSEDSDSLVLGWTRIQSQVGKRKHRFHDASLDLEMDEEDLEDMIDDDDLYGEDTSPAKQLSHTGGSNGVKSGEVIFRIHDRLVSIAPIRDFTLSQLPPSTDEERMNQAGVSSDLSLICAVGGGKSGSLAILNRAIQPTVIGRFEFPEARGIWTVAAQKPIPKSLQADRGATSLGAEYDISAQYDKYMIVSKVDLDGYETSDVYALTGAGFEALTGTEFDPAAGFTIEAGTMGKHMRVIQVLKTAIHCYDGDFGLNQIVPMLDEETGAEPRVESASIADPYILLVRDDASIFVAKMDNNLELEELEKEDSALSSTKWITGSLYEDKLGIFSTTNDDKGTATKDNIVMLLLSKSGALYIYALPDLSTPLYVAEGLSFLPPILSADYAARRGTSRETLKEIVFADLGDKTSSYPYLITRNSYDDITIYEPYRIPVSTTELSKALHFQKLPNPCIARGAELTTEDDVEVHRKYPMRRCDEVAGYKTIFLPGDSPSFIIKSSKTQPKVIELQGSGVRGMSSFHTEGCERGFIYTDANGIARVSQLSANNTTYAETGMPLKKLPLHVDTHAVTFHPPSGTVAVGCGILEPFELPKDDDYHKEWQLEKDLSLKPLVERGLIKLINPVTWTVIDTIEMEPCEIVMCVETLHLEVSEATNERKYLIVVGTAIARGEDLPVRGRVLVYDVVAVIPEPGKPETDKKLKLIAKEDIPRGAITALSEIGTQGLMLVAQGQKCMVRGLKEDGSLLPVAFMDMSCYVTAVRELRGTGLCLMGDAVKGLWFTGYTEEPYRMILFGKSSTKLEVLTTEFLPDGNELSIVACDSDGGIHILEFDPEHPKSMQGHLLLHRTSFATGAHVPTRSRLLPRTLPATSDYLAQHHSTNGNSPTTTAASTILFTSPTGVLATLSPLSEPQYRRLNFLSGQLVSSLPQHYAGLNPKDYRAPASTGAVGRFPPGVDAGMGRNIVDGALLARWNELGAGRRSEIAGRAGFSGADEVREVLREVLGTNGLGYL

SEQ ID NO: 21034 - DNA, 5824 bp, Muscodor strobelii
  misc_feature: SGI EST ID NO. CUFF.49543.0
  misc_feature: Variant of the nucleotide sequence at SEQ ID NO 21032
gaaacagcttcattgaagaagtcgcgtcgcattccaacctgcagaaacacctgactataccattacacgccaattaacttgggaccatcagtagtcgccatcgtgcctgcactctcaacccatctggagatgcagcagcggtttgcgccatgcaatgctacgcggagttgacgcctccgacggccgtcacgcactcgctgagcctgcccttcgtctcggcgcaaagcagcaacctcgtcgtcgccagggcctcgctgctccaggtgttcgccaccaagtctgtctctgccgagcttgacaacgcccagaacgaccgcctccaggacccgccctccggccagcaccagccgtacgatgcggggctgcaagacgacgacggcctcgaggcctctttcctcgccgatgccgccctagtccgctccgaccgctcccactacaccaagctcgtcctcgttgccgagttcgctcttgccggcaccgtcaccggcctcgcgcgcgtcaagtgcccctcgtctgccgccggcggggacgccctgctgctggccttcaaggatgcaaagctcagcatggtcgagtggcaccccgccacacactccatcaccaccacctcgatccactactacgagcaggaggagcttcagggcagcgcctgggccccctcgctgagccactatgccaacatcctcaccgcagacccgggcagtcggtgcgccgcgcttaagttcggcctgcgcaatctagctatagtgcagttcagatcggcggaggaggacgtcgacatgcaggactgggacgaggagctcgacggcccttgccccgtcaaggagccggccgcggccacggtcaatggagccggcagcggccaagatactcccttctcggcctcgttcgtcctccgcctgcccaatctcgaccccactctcgtccatcccgtgcacgttgcctttttacatgagtatagagagcccacgtttggcatcctctcctccacgtcctcgccgtccgccgtccttggcaggaaggaccagctgtcgtacatggtcttcacgctcgatctcgagcagagggcctccaccaccatcctctccgtcaacggcttgcccgacgacctctcccacgtactcgccttgcctgcccctattggtggagccctcctaatcggctctaacgaactaatccacattgatcagtctggaaagccccatggtgtcggtgtgaaccccttctccaagcaagccacagcttttagcttggtcgaccaatctgatctggacctgagactcgagggctgcaaggtcgaagtcttgtcagcagaaaacggcgaactgctgatgattttgaacgatggcagccttgccttgatcactttccgcattgatggtagaaccgtgtcgggattgagtatccagctagtatcgtctgcctccggagggtctattgtgccaacccgcgtgtccactctcagcccgctccataaaagtgcaatgtttgtcggcagcgaagactctgattccttggtgcttggctggacacgcatacaaagtcaagtgggcaagcgaaaacatcgatttcacgacgcctccctcgacctcgagatggatgaagaagatctggaagacatgatagacgatgatgacttgtacggcgaggacacatcacctgctaaacagctctcacatactggcggtagtaatggtgtaaagtctggtgaagtcatcttccgcatacatgaccgtcttgtgagcattgcgccgatacgtgatttcacgttgtctcaacttccaccctcaacggatgaggaaaggatgaaccaggcaggtgtatccagcgacctgagcttgatctgtgccgtaggaggcggtaagtctggctctcttgcgattttgaaccgcgccattcaacctactgttatcggacgtttcgagtttcccgaagctcgaggtatttggacagtggccgcccagaaaccgattccgaaatcattacaggccgaccgtggcgcgacctccctcggtgcggaatacgatatttcagcgcaatatgataagtacatgattgtgtcaaaagtagatcttgacggatatgagacgtcggatgtttacgcattgacgggcgctggattcgaggcattgacgggaaccgaatttgaccctgctgccgggttcactattgaggctggtacgatgggcaaacatatgagagtgatccaggtgctcaagacggcgatccactgctatgacggagattttgggctgaaccaaattgtccccatgcttgacgaagaaacaggagccgagcctcgtgttgagagtgctagcatagctgacccttacatactcctcgtacgagacgatgccagcatttttgttgccaagatggacaataatttggaattagaggagctcgaaaaagaggacagtgctttaagctctacaaaatggataaccggctctctgtacgaagataaactcggcatattctcaacgacaaatgatgataaagggactgcgacgaaagacaatatcgtcatgttgttactcagtaaaagtggtgccctctacatctatgccctgccagacttatcgacaccgctatatgtcgctgagggattgtcatttttaccccctatcctctctgcagactatgcggcccggcgtggaacatctcgtgagactctaaaggagatagtctttgccgatctaggcgataaaacatcttcatatccctatttgattactaggaactcttatgatgacattaccatctatgagccgtaccgtatcccagtgtcaacaacagaactctcgaaagctctccattttcagaaattaccaaatccttgcatagcaagaggtgcggaactcacgacagaagatgatgtggaagttcacagaaagtatccaatgagacgatgtgacgaggtcgctggctacaaaactatatttctacctggtgactctccaagtttcatcatcaagtcgtcaaaaacgcagccaaaagtcatagagcttcaaggtagtggagtgcgcggcatgagctcgtttcacacagaaggctgtgaacgtggctttatatatacggatgctaatggcatcgcacgtgtctctcaactttccgcaaacaatactacttatgccgagaccggcatgcctctcaaaaaactacctttgcatgtcgatactcatgcagtcacttttcatcccccatcgggaactgtagccgtcggatgtggcattttagagccgtttgaactaccaaaggatgacgactatcataaggaatggcagctggagaaggacctctcactcaagcctcttgtagagcgcgggctcatcaagcttattaacccggttacctggacagtgatagatacaatcgagatggagccatgtgaaatagtcatgtgcgttgagaccctccatctcgaagtatctgaggctacaaatgaaagaaaatacctcatcgtcgtcggtaccgctatcgcccgcggagaagatctaccggttagaggacgtgttctcgtctatgacgttgtcgctgtcatacctgaacccggtaagccggagacagataagaagttgaagctcatagcgaaggaagatatcccccgaggcgcaattacggccctctctgagatcggcacacaaggcctgatgctcgtggcgcagggtcaaaaatgcatggtcagaggcctgaaggaagatggatccttattgcctgttgccttcatggacatgagttgctatgtgacagcagtccgcgagcttcgaggaactggactctgtctgatgggcgatgctgtaaaagggctatggttcactggctacacggaggagccgtataggatgattctcttcggcaaaagttcaacgaagttggaggtcctcactactgagttcttacctgatggtaacgagctttccatcgtggcatgtgattctgatggtggtattcatatcctagaatttgacccagagcatccgaaatcgatgcaaggacatcttctcctccatcgcacttcatttgccaccggtgcccatgtgccgacccgcagcagactgctgcctcgcacgttaccagccacgtcggattaccttgcccagcaccattctacgaatggaaactcaccaaccacaacagccgcatcaactatcctcttcacttcacctaccggagtcctcgccaccctctcgccactctccgaacctcaataccgccgattgaatttcttatctggtcagcttgtctcatccttaccccagcactacgcaggtctcaatcctaaggactaccgggcaccggcatcgacgggtgcagttgggagattcccgccgggcgtcgatgcggggatgggacgtaatattgtggatggagctttacttgcgcgttggaacgaacttggcgctggacgacgtagtgagatcgccgggcgggcaggcttctccggtgcggatgaagtgcgcgaggttcttagagaagtactggggaccaatggactaggatatctctagttaagcttggcgttatataacaagctgcacgtcgtgatatgattcgatagaaagtactagcaaggttgggttagatacgatggcacggaatgaggcgatcttggcatgagacacaagcacgattctcatggtgtaccatcatatgatttagaggttttcggattctataggaccaaaaatcaaggcgcttagagaacaacggatgtgtaagaatcaagtctagggaaatgcatatcaccctatcatgtatgacctaatactatacgtatactgagtgacagatacagcttgtaatgaaatcagaagaccacccaacgcctaaacctagctctataccgccccgacactccgtacccagcgaacagttaatcacccttagtcttggtgccagacttgagatctcgctcaatcgtgaaagatggctcgcctttgcccttgagatccgcaggatcgtattgctatcgctttatcagtaacggattcacacatatccaacatgaaaacagaacaagaaactcacaacatgatcccaccgtctataagcaccaccgcccgcctcccgctccctcatcaaatcagcaccttcctcataccgcatgatgcgactctcatcgctccaatctgcctctcccggcgggacggtcgcggttccctgcagagggacgtgtcgggatagagcgtccttgacgtttactgcgggcgtggcttttagggcctcgcggtttgagtcctggactgcggctaggggcgcgtgtttgggcgagcggttccgtgaggcgagggctgcgtcgtagggcccgtcgtggtggtagattgagcctgtgatcccgatgttgtctagtgcgtcgatggagtctgggagcgtctggttgttcttgcggaggtggtgggcgcgttgggcggctttggtttcttgccggatttgctgtagggggcttggggttttggaggacgacattttgaatataaggtagtttgttgcaagggatgtgtgatgtgaatgggttggtttttttttcccctgcgtgttgggctcgtataggtcgctcgactgttcgcgtgaaagtgatgggtggtagtcacggaaggttggtttgtctagtggaagattcgtaggtaaagatagcagagtttgggatgaatatttgagtcggaacaacattcagctcaattgaccatttccctggaagataagaaatgaaaacaactcgggatgccctggaaacaagccatgggacgatgaacatgcgtaatgatcttgaggctatgatgtaatgccgattgcgccggctggtgggtagcgggaagacagg

SEQ ID NO: 21035 - DNA, 4419 bp, Muscodor strobelii
  misc_feature: SGI cDNA ID NO. 567112
  misc_feature: Encodes the peptide sequence at SEQ ID NO 21036
atgcaatgctacgcggagttgacgcctccgacggccgtcacgcactcgctgagcctgcccttcgtctcggcgcaaagcagcaacctcgtcgtcgccagggcctcgctgctccaggtgttcgccaccaagtctgtctctgccgagcttgacaacgcccagaacgaccgcctccaggacccgccctccggccagcaccagccgtacgatgcggggctgcaagacgacgacggcctcgaggcctctttcctcgccgatgccgccctagtccgctccgaccgctcccactacaccaagctcgtcctcgttgccgagttcgctcttgccggcaccgtcaccggcctcgcgcgcgtcaagtgcccctcgtctgccgccggcggggacgccctgctgctggccttcaaggatgcaaagctcagcatggtcgagtggcaccccgccacacactccatcaccaccacctcgatccactactacgagcaggaggagcttcagggcagcgcctgggccccctcgctgagccactatgccaacatcctcaccgcagacccgggcagtcggtgcgccgcgcttaagttcggcctgcgcaatctagctatagtgcagttcagatcggcggaggaggacgtcgacatgcaggactgggacgaggagctcgacggcccttgccccgtcaaggagccggccgcggccacggtcaatggagccggcagcggccaagatactcccttctcggcctcgttcgtcctccgcctgcccaatctcgaccccactctcgtccatcccgtgcacgttgcctttttacatgagtatagagagcccacgtttggcatcctctcctccacgtcctcgccgtccgccgtccttggcaggaaggaccagctgtcgtacatggtcttcacgctcgatctcgagcagagggcctccaccaccatcctctccgtcaacggcttgcccgacgacctctcccacgtactcgccttgcctgcccctattggtggagccctcctaatcggctctaacgaactaatccacattgatcagtctggaaagccccatggtgtcggtgtgaaccccttctccaagcaagccacagcttttagcttggtcgaccaatctgatctggacctgagactcgagggctgcaaggtcgaagtcttgtcagcagaaaacggcgaactgctgatgattttgaacgatggcagccttgccttgatcactttccgcattgatggtagaaccgtgtcgggattgagtatccagctagtatcgtctgcctccggagggtctattgtgccaacccgcgtgtccactctcagcccgctccataaaagtgcaatgtttgtcggcagcgaagactctgattccttggtgcttggctggacacgcatacaaagtcaagtgggcaagcgaaaacatcgatttcacgacgcctccctcgacctcgagatggatgaagaagatctggaagacatgatagacgatgatgacttgtacggcgaggacacatcacctgctaaacagctctcacatactggcggtagtaatggtgtaaagtctggtgaagtcatcttccgcatacatgaccgtcttgtgagcattgcgccgatacgtgatttcacgttgtctcaacttccaccctcaacggatgaggaaaggatgaaccaggcaggtgtatccagcgacctgagcttgatctgtgccgtaggaggcggtaagtctggctctcttgcgattttgaaccgcgccattcaacctactgttatcggacgtttcgagtttcccgaagctcgaggtatttggacagtggccgcccagaaaccgattccgaaatcattacaggccgaccgtggcgcgacctccctcggtgcggaatacgatatttcagcgcaatatgataagtacatgattgtgtcaaaagtagatcttgacggatatgagacgtcggatgtttacgcattgacgggcgctggattcgaggcattgacgggaaccgaatttgaccctgctgccgggttcactattgaggctggtacgatgggcaaacatatgagagtgatccaggtgctcaagacggcgatccactgctatgacggagattttgggctgaaccaaattgtccccatgcttgacgaagaaacaggagccgagcctcgtgttgagagtgctagcatagctgacccttacatactcctcgtacgagacgatgccagcatttttgttgccaagatggacaataatttggaattagaggagctcgaaaaagaggacagtgctttaagctctacaaaatggataaccggctctctgtacgaagataaactcggcatattctcaacgacaaatgatgataaagggactgcgacgaaagacaatatcgtcatgttgttactcagtaaaagtggtgccctctacgtacgtcatggagccctttcccctcccagcactcgtgctatactaatgcgtgtgaagatctatgccctgccagacttatcgacaccgctatatgtcgctgagggattgtcatttttaccccctatcctctctgcagactatgcggcccggcgtggaacatctcgtgagactctaaaggagatagtctttgccgatctaggcgataaaacatcttcatatccctatttgattactaggaactcttatgatgacattaccatctatgagccgtaccgtatcccagtgtcaacaacagaactctcgaaagctctccattttcagaaattaccaaatccttgcatagcaagaggtgcggaactcacgacagaagatgatgtggaagttcacagaaagtatccaatgagacgatgtgacgaggtcgctggctacaaaactatatttctacctggtgactctccaagtttcatcatcaagtcgtcaaaaacgcagccaaaagtcatagagcttcaaggtagtggagtgcgcggcatgagctcgtttcacacagaaggctgtgaacgtggctttatatatacggatgctaatggcatcgcacgtgtctctcaactttccgcaaacaatactacttatgccgagaccggcatgcctctcaaaaaactacctttgcatgtcgatactcatgcagtcacttttcatcccccatcgggaactgtagccgtcggatgtggcattttagagccgtttgaactaccaaaggatgacgactatcataaggaatggcagctggagaaggacctctcactcaagcctcttgtagagcgcgggctcatcaagcttattaacccggttacctggacagtgatagatacaatcgagatggagccatgtgaaatagtcatgtgcgttgagaccctccatctcgaagtatctgaggctacaaatgaaagaaaatacctcatcgtcgtcggtaccgctatcgcccgcggagaagatctaccggttagaggacgtgttctcgtctatgacgttgtcgctgtcatacctgaacccggtaagccggagacagataagaagttgaagctcatagcgaaggaagatatcccccgaggcgcaattacggccctctctgagatcggcacacaaggcctgatgctcgtggcgcagggtcaaaaatgcatggtcagaggcctgaaggaagatggatccttattgcctgttgccttcatggacatgagttgctatgtgacagcagtccgcgagcttcgaggaactggactctgtctgatgggcgatgctgtaaaagggctatggttcactggctacacggaggagccgtataggatgattctcttcggcaaaagttcaacgaagttggaggtcctcactactgagttcttacctgatggtaacgagctttccatcgtggcatgtgattctgatggtggtattcatatcctagaatttgacccagagcatccgaaatcgatgcaaggacatcttctcctccatcgcacttcatttgccaccggtgcccatgtgccgacccgcagcagactgctgcctcgcacgttaccagccacgtcggattaccttgcccagcaccattctacgaatggaaactcaccaaccacaacagccgcatcaactatcctcttcacttcacctaccggagtcctcgccaccctctcgccactctccgaacctcaataccgccgattgaatttcttatctggtcagcttgtctcatccttaccccagcactacgcaggtctcaatcctaaggactaccgggcaccggcatcgacgggtgcagttgggagattcccgccgggcgtcgatgcggggatgggacgtaatattgtggatggagctttacttgcgcgttggaacgaacttggcgctggacgacgtagtgagatcgccgggcgggcaggcttctccggtgcggatgaagtgcgcgaggttcttagagaagtactggggaccaatggactaggatatctctag

SEQ ID NO: 21036 - protein, 1472 aa, Muscodor strobelii
  misc_feature: SGI Peptide ID NO. 567112
  misc_feature (1075)..(1396): Pfam Id: PF03178 Pfam Desc: CPSF A subunit region
  misc_feature (1)..(1472): NCBI GI: 171695066 Blast Desc: protein product [Podospora anserina] gi|170947775|emb|CAP59938.1| protein product [Podospora anserina]
  misc_feature (2)..(1329): NCBI GI: 116182170 Blast Desc: CHGG_01713 [Chaetomium globosum CBS 148.51] gi|88186010|gb|EAQ93478.1| CHGG_01713 [Chaetomium globosum CBS 148.51]
  misc_feature (1)..(1472): NCBI GI: 39974229 Blast Desc: MGG_00739 [Magnaporthe grisea 70-15] gi|145018328|gb|EDK02607.1| MGG_00739 [Magnaporthe grisea 70-15]
  misc_feature (1)..(1471): NCBI GI: 46120520 Blast Desc: FG04907.1 [Gibberella zeae PH-1]
  misc_feature (1)..(1472): NCBI GI: 256734895 Blast Desc: [Nectria haematococca mpVI 77-13-4]
  misc_feature (1)..(1463): NCBI GI: 156040479 Blast Desc: SS1G_12256 [Sclerotinia sclerotiorum 1980] gi|154696312|gb|EDN96050.1| SS1G_12256 [Sclerotinia sclerotiorum 1980]
  misc_feature (297)..(1472): NCBI GI: 154320778 Blast Desc: BC1G_01861 [Botryotinia fuckeliana B05.10] gi|150853550|gb|EDN28742.1| BC1G_01861 [Botryotinia fuckeliana B05.10]
  misc_feature (242)..(1472): NCBI GI: 261361315 Blast Desc: cft-1 [Verticillium albo-atrum VaMs.102]
  misc_feature (1)..(1472): NCBI GI: 119195757 Blast Desc: CIMG_02253 [Coccidioides immitis RS] gi|121769680|sp|Q1E5B0.1|CFT1_COCIM RecName: Full=Protein CFT1; AltName: Full=Cleavage factor two protein 1
  misc_feature (1)..(1472): NCBI GI: 261201748 Blast Desc: protein CFT1 [Ajellomyces dermatitidis SLH14081] gi|239590185|gb|EEQ72766.1| protein CFT1 [Ajellomyces dermatitidis SLH14081]
MQCYAELTPPTAVTHSLSLPFVSAQSSNLVVARASLLQVFATKSVSAELDNAQNDRLQDPPSGQHQPYDAGLQDDDGLEASFLADAALVRSDRSHYTKLVLVAEFALAGTVTGLARVKCPSSAAGGDALLLAFKDAKLSMVEWHPATHSITTTSIHYYEQEELQGSAWAPSLSHYANILTADPGSRCAALKFGLRNLAIVQFRSAEEDVDMQDWDEELDGPCPVKEPAAATVNGAGSGQDTPFSASFVLRLPNLDPTLVHPVHVAFLHEYREPTFGILSSTSSPSAVLGRKDQLSYMVFTLDLEQRASTTILSVNGLPDDLSHVLALPAPIGGALLIGSNELIHIDQSGKPHGVGVNPFSKQATAFSLVDQSDLDLRLEGCKVEVLSAENGELLMILNDGSLALITFRIDGRTVSGLSIQLVSSASGGSIVPTRVSTLSPLHKSAMFVGSEDSDSLVLGWTRIQSQVGKRKHRFHDASLDLEMDEEDLEDMIDDDDLYGEDTSPAKQLSHTGGSNGVKSGEVIFRIHDRLVSIAPIRDFTLSQLPPSTDEERMNQAGVSSDLSLICAVGGGKSGSLAILNRAIQPTVIGRFEFPEARGIWTVAAQKPIPKSLQADRGATSLGAEYDISAQYDKYMIVSKVDLDGYETSDVYALTGAGFEALTGTEFDPAAGFTIEAGTMGKHMRVIQVLKTAIHCYDGDFGLNQIVPMLDEETGAEPRVESASIADPYILLVRDDASIFVAKMDNNLELEELEKEDSALSSTKWITGSLYEDKLGIFSTTNDDKGTATKDNIVMLLLSKSGALYVRHGALSPPSTRAILMRVKIYALPDLSTPLYVAEGLSFLPPILSADYAARRGTSRETLKEIVFADLGDKTSSYPYLITRNSYDDITIYEPYRIPVSTTELSKALHFQKLPNPCIARGAELTTEDDVEVHRKYPMRRCDEVAGYKTIFLPGDSPSFIIKSSKTQPKVIELQGSGVRGMSSFHTEGCERGFIYTDANGIARVSQLSANNTTYAETGMPLKKLPLHVDTHAVTFHPPSGTVAVGCGILEPFELPKDDDYHKEWQLEKDLSLKPLVERGLIKLINPVTWTVIDTIEMEPCEIVMCVETLHLEVSEATNERKYLIVVGTAIARGEDLPVRGRVLVYDVVAVIPEPGKPETDKKLKLIAKEDIPRGAITALSEIGTQGLMLVAQGQKCMVRGLKEDGSLLPVAFMDMSCYVTAVRELRGTGLCLMGDAVKGLWFTGYTEEPYRMILFGKSSTKLEVLTTEFLPDGNELSIVACDSDGGIHILEFDPEHPKSMQGHLLLHRTSFATGAHVPTRSRLLPRTLPATSDYLAQHHSTNGNSPTTTAASTILFTSPTGVLATLSPLSEPQYRRLNFLSGQLVSSLPQHYAGLNPKDYRAPASTGAVGRFPPGVDAGMGRNIVDGALLARWNELGAGRRSEIAGRAGFSGADEVREVLREVLGTNGLGYL

SEQ ID NO: 21037 - DNA, 5824 bp, Muscodor strobelii; identical to SEQ ID NO: 21034
  misc_feature: SGI EST ID NO. CUFF.49543.0
  misc_feature: Variant of the nucleotide sequence at SEQ ID NO 21035

SEQ ID NO: 21038 - DNA, 531 bp, Muscodor strobelii
  misc_feature: SGI cDNA ID NO. 567113
  misc_feature: Reduced expression when VOC is produced
  misc_feature: Encodes the peptide sequence at SEQ ID NO 21039
atgtcgtcctccaaaaccccaagccccctacagcaaatccggcaagaaaccaaagccgcccaacgcgcccaccacctccgcaagaacaaccagacgctcccagactccatcgacgcactagacaacatcgggatcacaggctcaatctaccaccacgacgggccctacgacgcagccctcgcctcacggaaccgctcgcccaaacacgcgcccctagccgcagtccaggactcaaaccgcgaggccctaaaagccacgcccgcagtaaacgtcaaggacgctctatcccgacacgtccctctgcagggaaccgcgaccgtcccgccgggagaggcagattggagcgatgagagtcgcatcatgcggtatgaggaaggtgctgatttgatgagggagcgggaggcgggcggtggtgcttatagacggtgggatcatgttcaatacgatcctgcggatctcaagggcaaaggcgagccatctttcacgattgagcgagatctcaagtctggcaccaagactaagggtgattaa

SEQ ID NO: 21039 - protein, 176 aa, Muscodor strobelii
  misc_feature: SGI Peptide ID NO. 567113
  misc_feature (35)..(74): Pfam Id: PF08316 Pfam Desc: Pal1 cell morphology protein
  misc_feature (9)..(175): NCBI GI: 46120522 Blast Desc: FG04908.1 [Gibberella zeae PH-1]
  misc_feature (9)..(168): NCBI GI: 154296376 Blast Desc: BC1G_13014 [Botryotinia fuckeliana B05.10] gi|150843375|gb|EDN18568.1| BC1G_13014 [Botryotinia fuckeliana B05.10]
  misc_feature (9)..(168): NCBI GI: 256735605 Blast Desc: NECHADRAFT_99025 [Nectria haematococca mpVI 77-13-4]
  misc_feature (9)..(168): NCBI GI: 156054664 Blast Desc: SS1G_06180 [Sclerotinia sclerotiorum 1980] gi|154703960|gb|EDO03699.1| SS1G_06180 [Sclerotinia sclerotiorum 1980]
  misc_feature (9)..(168): NCBI GI: 39974339 Blast Desc: MGG_00684 [Magnaporthe grisea 70-15] gi|145018387|gb|EDK02666.1| MGG_00684 [Magnaporthe grisea 70-15]
  misc_feature (9)..(162): NCBI GI: 116182168 Blast Desc: CHGG_01712 [Chaetomium globosum CBS 148.51] gi|88186009|gb|EAQ93477.1| CHGG_01712 [Chaetomium globosum CBS 148.51]
  misc_feature (5)..(168): NCBI GI: 189203523 Blast Desc: conserved [Pyrenophora tritici-repentis Pt-1C-BFP] gi|187985196|gb|EDU50684.1| conserved [Pyrenophora tritici-repentis Pt-1C-BFP]
  misc_feature (9)..(168): NCBI GI: 85113882 Blast Desc: NCU02071 [Neurospora crassa OR74A] gi|28926386|gb|EAA35362.1| [Neurospora crassa OR74A]
  misc_feature (9)..(174): NCBI GI: 169603269 Blast Desc: SNOG_04642 [Phaeosphaeria nodorum SN15] gi|160706360|gb|EAT88402.2| SNOG_04642 [Phaeosphaeria nodorum SN15]
  misc_feature (9)..(168): NCBI GI: 261358855 Blast Desc: conserved [Verticillium albo-atrum VaMs.102]
  misc_feature: Useful for introducing or modulating the production of volatile compounds
MSSSKTPSPLQQIRQETKAAQRAHHLRKNNQTLPDSIDALDNIGITGSIYHHDGPYDAALASRNRSPKHAPLAAVQDSNREALKATPAVNVKDALSRHVPLQGTATVPPGEADWSDESRIMRYEEGADLMREREAGGGAYRRWDHVQYDPADLKGKGEPSFTIERDLKSGTKTKGD

SEQ ID NO: 21040 - DNA, 5972 bp, Muscodor strobelii
  misc_feature: SGI EST ID NO. CUFF.49544.1
  misc_feature: Variant of the nucleotide sequence at SEQ ID NO 21038
cctgtcttcccgctacccaccagccggcgcaatcggcattacatcatagcctcaagatcattacgcatgttcatcgtcccatggcttgtttccagggcatcccgagttgttttcatttcttatcttccagggaaatggtcaattgagctgaatgttgttccgactcaaatattcatcccaaactctgctatctttacctacgaatcttccactagacaaaccaaccttccgtgactaccacccatcactttcacgcgaacagtcgagcgacctatacgagcccaacacgcaggggaaaaaaaaaccaacccattcacatcacacatcccttgcaacaaactaccttatattcaaaatgtcgtcctccaaaaccccaagccccctacagcaaatccggcaagaaaccaaagccgcccaacgcgcccaccacctccgcaagaacaaccagacgctcccagactccatcgacgcactagacaacatcgggatcacaggctcaatctaccaccacgacgggccctacgacgcagccctcgcctcacggaaccgctcgcccaaacacgcgcccctagccgcagtccaggactcaaaccgcgaggccctaaaagccacgcccgcagtaaacgtcaaggacgctctatcccgacacgtccctctgcagggaaccgcgaccgtcccgccgggagaggcagattggagcgatgagagtcgcatcatgcggtatgaggaaggtgctgatttgatgagggagcgggaggcgggcggtggtgcttatagacggtgggatcatgttcaatacgatcctgcggatctcaagggcaaaggcgagccatctttcacgattgagcgagatctcaagtctggcaccaagactaagggtgattaactgttcgctgggtacggagtgtcggggcggtatagagctaggtttaggcgttgggtggtcttctgatttcattacaagctgtatctgtcactcagtatacgtatagtattaggtcatacatgatagggtgatatgcatttccctagacttgattcttacacatccgttgttctctaagcgccttgatttttggtcctatagaatccgaaaacctctaaatcatatgatggtacaccatgagaatcgtgcttgtgtctcatgccaagatcgcctcattccgtgccatcgtatctaacccaaccttgctagtactttctatcgaatcatatcacgacgtgcagcttgttatataacgccaagcttaactagagatatcctagtccattggtccccagtacttctctaagaacctcgcgcacttcatccgcaccggagaagcctgcccgcccggcgatctcactacgtcgtccagcgccaagttcgttccaacgcgcaagtaaagctccatccacaatattacgtcccatccccgcatcgacgcccggcgggaatctcccaactgcacccgtcgatgccggtgcccggtagtccttaggattgagacctgcgtagtgctggggtaaggatgagacaagctgaccagataagaaattcaatcggcggtattgaggttcggagagtggcgagagggtggcgaggactccggtaggtgaagtgaagaggatagttgatgcggctgttgtggttggtgagtttccattcgtagaatggtgctgggcaaggtaatccgacgtggctggtaacgtgcgaggcagcagtctgctgcgggtcggcacatgggcaccggtggcaaatgaagtgcgatggaggagaagatgtccttgcatcgatttcggatctgtgttatgttagtgggggaaaaactggtcaagcgcgagattgtagacttacgctctgggtcaaattctaggatatgaataccaccatcagaatcacatgccacgatggaaagctcgttaccatcaggtaagaactcagtagtgaggacctccaacttcgttgaacttttgccgaagagaatcatcctatacggctcctccgtgtagccagtgaaccatagcccttttacagcatcgcccatcagacagagtccagttcctcgaagctcgcggactgctgtcacatagcaactcatgtccatgaaggcaacaggcaataaggatccatcttccttcaggcctctgaccatgcatttttgaccctgcgccacgagcatcaggccttgtgtgccgatctcagagagggccgtaattgcgcctcgggggatatcttccttcgctatgagcttcaacttcttatctgtctccggcttaccgggttcaggtatgacagcgacaacgtcatagacgagaacacgtcctctaaccggtagatcttctccgcgggcgatagcggtaccgacgacgatgaggtattttctttcatttgtagcctcagatacttcgagatggagggtctcaacgcacatgactatttcacatggctccatctcgattgtatctatcactgtccaggtaaccgggttaataagcttgatgagcccgcgctctacaagaggcttgagtgagaggtccttctccagctgccattccttatgatagtcgtcatcctttggtagttcaaacggctctaaaatgccacatccgacggctacagttcccgatgggggatgaaaagtgactgcatgagtatcgacatgcaaaggtagttttttgagaggcatgccggtctcggcataagtagtattgtttgcggaaagttgagagacacgtgcgatgccattagcatccgtatatataaagccacgttcacagccttctgtgtgaaacgagctcatgccgcgcactccactaccttgaagctctatgacttttggctgcgtttttgacgacttgatgatgaaacttggagagtcaccaggtagaaatatagttttgtagccagcgacctcgtcacatcgtctcattggatactttctgtgaacttccacatcatcttctgtcgtgagttccgcacctcttgctatgcaaggatttggtaatttctgaaaatggagagctttcgagagttctgttgttgacactgggatacggtacggctcatagatggtaatgtcatcataagagttcctagtctgagaggcgtaagtcggagctatcaaataagtgatcaagtccttacaatcaaatagggatatgaagatgttttatcgcctagatcggcaaagactatctcctttagagtctcacgagatgttccacgccgggccgcatagtctgcagagaggatagggggtaaaaatgacaatccctcagcgacatatagcggtgtcgataagtctggcagggcatagatcttcacacgcattagtatagcacgagtgctgggaggggaaagggctccatgacgtacgtagagggcaccacttttactgagtaacaacatgacgatattgtctttcgtcgcagtccctttatcatcatttgtcgttgagaatatgccgagtttatcttcgtacagagagccggttatccattttgtagagcttaaagcactgtcctctttttcgagctcctctaattccaaattattgtccatcttggcaacaaaaatgctggcatcgtctcgtacgaggagtatgtaagggtcagctatgctagcactctcaacacgaggctcggctcctgtttcttcgtcaagcatggggacaatttggttcagcccaaaatctagccattcatcagcatctggaatagcggattcgggcacaaagacatcttacctccgtcatagcagtggatcgccgtcttgagcacctggatcactctcatatgtttgcccatcgtaccagcctcaatagtgaacccggcagcagggtcaaattcggttcccgtcaatgcctcgaatccagcgcccgtcaatgcgtaaacatccgacgtctcatatccgtcaagatctacttttgacacaatcatgtacttatcatattgcgctgaaatatcgtattccgcaccgagggaggtcgcgccacggtcggcctgtaatgatttcggaatcggtttctgggcggccactgtccaaatacctcgagcttcgggaaactcgaaacgtccgataacagtaggttgaatggcgcggttcaaaatcgcaagagagccagacttaccgcctcctacggcacagatcaagctcaggtcgctggatacacctgcctggttcatcctttcctcatccgttgagggtggaagttgagacaacgtgaaatcacgtatcggcgcaatgctcacaagacggtcatgtatgcggaagatgacttcaccagactttacaccattactaccgccagtatgtgagagctgtttagcaggtgatgtgtcctcgccgtacaagtcatcatcgtctatcatgtcttccagatcttcttcatccatctcgaggtcgagggaggcgtcgtgaaatcgatgttttcgcttgcccacttgactttgtatgcgtgtccagccaagcaccaaggaatcagagtcttcgctgccgacaaacattgcacttttatggagcgggctgagagtggacacgcgggttggcacaatagaccctccggaggcagacgatactagctggatactcaatcccgacacggttctaccatcaatgcggaaagtgatcaaggcaaggctgccatcgttcaaaatcatcagcagttcgccgttttctgctgacaagacttcgaccttgcagccctcgagtctcaggtccagatcagattggtcgaccaagctaaaagctgtggcttgcttggagaaggggttcacaccgacaccatggggctttccagactgatcaatgtggattagttcgttagagccgattaggagggctccaccaataggggcaggcaaggcgagtacgtgggagaggtcgtcgggcaagccgttgacggagaggatggtggtggaggccctctgctcgagatcgagcgtgaagaccatgtacgacagctggtccttcctgccaaggacggcggacggcgaggacgtggaggagaggatgccaaacgtgggctctctatactcatgtaaaaaggcaacgtgcacgggatggacgagagtggggtcgagattgggcaggcggaggacgaacgaggccgagaagggagtatcttggccgctgccggctccattgaccgtggccgcggccggctccttgacggggcaagggccgtcgagctcctcgtcccagtcctgcatgtcgacgtcctcctccgccgatctgaactgcactatagctagattgcgcaggccgaacttaagcgcggcgcaccgactgcccgggtctgcggtgaggatgttggcatagtggctcagcgagggggcccaggcgctgccctgaagctcctcctgctcgtagtagtggatcgaggtggtggtgatggagtgtgtggcggggtgccactcgaccatgctgagctttgcatccttgaaggccagcagcagggcgtccccgccggcggcagacgaggggcacttgacgcgcgcgaggccggtgacggtgccggcaagagcgaactcggcaacgaggacgagcttggtgtagtgggagcggtcggagcggactagggcggcatcggcgaggaaagaggcctcgaggccgtcgtcgtcttgcagccccgcatcgtacggctggtgctggccggagggcgggtcctggaggcggtcgttctgggcgttgtcaagctcggcagagacagacttggtggcgaacacctggagcagcgaggccctggcgacgacgaggttgctgctttgcgccgagacgaagggcaggctcagcgagtgcgtgacggccgtcggaggcgtcaactccgcgtagcattgcatggcgcaaaccgctgctgcatctccagatgggttgagagtgcaggcacgatggcgactactgatggtcccaagttaattggcgtgtaatggtatagtcaggtgtttctgcaggttggaatgcgacgcgacttcttcaatgaagctgtttc

SEQ ID NO: 21041 - DNA, 966 bp, Muscodor strobelii
  misc_feature: SGI cDNA ID NO. 567114
  misc_feature: Encodes the peptide sequence at SEQ ID NO 21042
atggctctcgtagattactcctcagactcatcctcatcctcagacgaaatccagtcaaagaaacagaagatctaccatgagacatctgctataacgcaagaaaccgacttacctccactaccatcagctttccacgacttatacgcctcaacggttcgtgtcagcacaagcgatgacccgacgctacaccaaggccgcaagcgcgtgaaccctcataaagtcgggaattggccaagtcacttatatattgagtggcatcccaaaaccttagaacgaaatactctcatcggccttctcacctctctccaatctgccctctcatctctaccttcattatcaacaacaaccataacatcattcctaacctcagatctcaacacgcctctacctttacacataagtctctcgcgacccatcgtcctaagcacatctcaaaaagacgacttcctcaccgacctcgagtccagtatcaagacaagcaacatatcgccctttgaagtcacgccgctgggtctggtgtggcatcggacgcatgaatctgctcgctcttttcttgtactgaaggtcgggtccgtggatgggaagagtgctggtgaagggaggaaggggactgaagatgagaagactacggacaatcctaatccacagctcactgccttgttgaaacgcagtaatgatctggtgatgaagtatggacagccggctttgtacgcgggtacttcggcttcttcacaagggactaagtctaatgtgggaagttccttccatgtctcgattgcgtggtcctttgcggaaccgacgactgagttacgtgctgtgacgaacgaagtgttcgatgaagataagttacggcagatgcgtattcatgtcgatggcatcaaggccaagatcggcaatgtcgtttcacatatttcgttaccggatcgtaggagtcgggggactgaggcaagtttgtttggtatttga

SEQ ID NO: 21042 - protein, 321 aa, Muscodor strobelii
  misc_feature: SGI Peptide ID NO. 567114
  misc_feature (33)..(318): NCBI GI: 256734896 Blast Desc: NECHADRAFT_75622 [Nectria haematococca mpVI 77-13-4]
  misc_feature (1)..(319): NCBI GI: 46120524 Blast Desc: FG04909.1 [Gibberella zeae PH-1]
  misc_feature (1)..(319): NCBI GI: 145611044 Blast Desc: MGG_11511 [Magnaporthe grisea 70-15] gi|145018388|gb|EDK02667.1| MGG_11511 [Magnaporthe grisea 70-15]
  misc_feature (3)..(306): NCBI GI: 171695014 Blast Desc: protein product [Podospora anserina] gi|170947749|emb|CAP59912.1| protein product [Podospora anserina]
  misc_feature (1)..(306): NCBI GI: 156054662 Blast Desc: SS1G_06179 [Sclerotinia sclerotiorum 1980] gi|154703959|gb|EDO03698.1| SS1G_06179 [Sclerotinia sclerotiorum 1980]
  misc_feature (1)..(306): NCBI GI: 70983578 Blast Desc: conserved [Aspergillus fumigatus Af293] gi|66844942|gb|EAL85278.1| conserved [Aspergillus fumigatus Af293] gi|159123678|gb|EDP48797.1| conserved [Aspergillus A1163]
  misc_feature (1)..(306): NCBI GI: 212541056 Blast Desc: conserved [Penicillium marneffei ATCC 18224] gi|210067982|gb|EEA22074.1| conserved [Penicillium marneffei ATCC 18224]
  misc_feature (37)..(309): NCBI GI: 85113890 Blast Desc: NCU02073 [Neurospora crassa OR74A] gi|28926388|gb|EAA35364.1| [Neurospora crassa OR74A]
  misc_feature (44)..(321): NCBI GI: 154296374 Blast Desc: BC1G_13013 [Botryotinia fuckeliana B05.10] gi|150843374|gb|EDN18567.1| BC1G_13013 [Botryotinia fuckeliana B05.10]
  misc_feature (1)..(300): NCBI GI: 242799799 Blast Desc: conserved [Talaromyces stipitatus ATCC 10500] gi|242799803|ref|XP_002483455.1| conserved [Talaromyces stipitatus ATCC 10500] gi|218716799|gb|EED16220.1| conserved ATCC
MALVDYSSDSSSSSDEIQSKKQKIYHETSAITQETDLPPLPSAFHDLYASTVRVSTSDDPTLHQGRKRVNPHKVGNWPSHLYIEWHPKTLERNTLIGLLTSLQSALSSLPSLSTTTITSFLTSDLNTPLPLHISLSRPIVLSTSQKDDFLTDLESSIKTSNISPFEVTPLGLVWHRTHESARSFLVLKVGSVDGKSAGEGRKGTEDEKTTDNPNPQLTALLKRSNDLVMKYGQPALYAGTSASSQGTKSNVGSSFHVSIAWSFAEPTTELRAVTNEVFDEDKLRQMRIHVDGIKAKIGNVVSHISLPDRRSRGTEASLFGI

SEQ ID NO: 21043 - DNA, 1800 bp, Muscodor strobelii
  misc_feature: SGI cDNA ID NO. 567115
  misc_feature: Reduced expression when VOC is produced
  misc_feature: Encodes the peptide sequence at SEQ ID NO 21044
atgccgtcggccggcaagctgttcttcctgaccctcttcgccctctggggctctcctgcgcagtgccagaacaccagagaccggcaagatgagtcttgcgcaatatcccccaagtccatcgtcaacgacgcttgcgtctcctaccagaccctcgaaaccctcaacagcagggtgaagcctgtcgtggacgacctgacaagggagaccgacttcttctcctactaccgcctcaatcttttcaacaaagtgtgccccttctggagcgacgagaatggcatgtgtggcaacatcgcctgcgctgtgaacacgatagacaatgaggaagacatacccccgatctggagggccagtgagctagggaaactcgagggcccttcagcaaaacaccccgccaagaagatacagaaagaagcgcccaggcggccgctacagggtctattgggagagaatgtgggtgagagctgtgtggttgaatatgacgatgaaggagacgagcgggattattgtatccccgaggacgagagcacgagtgccaaaggcgactacgtcagcttagtccacaacccagagcgattcacaggattcggtggcgagggcgcaaagatggtttgggatgctatctatcgcgagaactgcttccagaagtcatctttccccaagtccgcatccctcgggctgcagtcatcagctcaggggccagctgcccgagacttccgcagtgtcatgcactcagctgagcgggcatcgatgctcgagcagcaccatcaggaccccaatatgatattcgcccagacgggcttggagaacgaagacgaatgcctcgagaagcgtgtcttctaccgcgtcatctcaggcatgcacgctagtatcagcacccatctgtgctgggacttcctcaaccagaccaccggcgagtggcagcccaacgtgaagtgctatacagagagacttcacacacatcctgaacgcatttcgaatctatactttaactatgccatggtcacccgggccatcgcaaagcttggcccttatttgcaggactacacgttctgcactggtgatcccgatcaggacagtgctaccaaagccaaggttctagctgtcacgcaagcgtcctcatctgtgccccagattttcgacgagagcctcatgttcaagaacggcgagggcccttccttgaaggaagacttccggaaccgattccgaaatgtgagccgcatcatggactgtgtcgggtgcgacaaatgtcgactctggggcaaagtacaagtctccggctacggcacggcgttgaaagttttgttcgaaacggataacgatagcggcgaagtccccgaacttaagagaacggagctcgtcgcattgttcaatacgtacgcgcgtctcagcagttccatgaatgcgcttcatcagttccgggacatggtcgatggccccacgaaacagtctagaccggcttccataattcctgatcgtgctaagaagcctcatgctgttagcttgccgccaaagacgactgagacagagtccagcgtgctggaggatgattgggaggaagaggagacgtcgagaaatcggtcaagcgaggaacccgagaccacgaccgacatattctgggatgagctaggcaaggtcatagatgctttcaaaattgtggttggccactggatcagcttcccgaaacaagtataccacattgccctcgcagagctcaatcgtggctggcaattatatatcgggctccccgtcacaccgaggacttggagcttcagaccctcgagaaatgctgaggaactatag

SEQ ID NO: 21044 - protein, 599 aa, Muscodor strobelii
  misc_feature: SGI Peptide ID NO. 567115
  misc_feature (56)..(470): Pfam Id: PF04137 Pfam Desc: Endoplasmic Reticulum Oxidoreductin 1 (ERO1)
  misc_feature (272)..(470): Pfam Id: PF04137 Pfam Desc: Endoplasmic Reticulum Oxidoreductin 1 (ERO1)
  misc_feature (56)..(217): Pfam Id: PF04137 Pfam Desc: Endoplasmic Reticulum Oxidoreductin 1 (ERO1)
  misc_feature (1)..(591): NCBI GI: 85113895 Blast Desc: NCU02074 [Neurospora crassa OR74A] gi|50400410|sp|Q7SEY9.1|ERO1_NEUCR RecName: Full=Endoplasmic oxidoreductin-1; Flags: Precursor gi|28926389|gb|EAA35365.1|
  misc_feature (1)..(590): NCBI GI: 171695016 Blast Desc: protein product [Podospora anserina] gi|170947750|emb|CAP59913.1| protein product [Podospora anserina]
  misc_feature (1)..(599): NCBI GI: 256734898 Blast Desc: [Nectria haematococca mpVI 77-13-4]
  misc_feature (35)..(560): NCBI GI: 145611046 Blast Desc: MGG_00683 [Magnaporthe grisea 70-15] gi|145018389|gb|EDK02668.1| MGG_00683 [Magnaporthe grisea 70-15]
  misc_feature (1)..(599): NCBI GI: 156053594 Blast Desc: SS1G_05644 [Sclerotinia sclerotiorum 1980] gi|154703425|gb|EDO03164.1| SS1G_05644 [Sclerotinia sclerotiorum 1980]
  misc_feature (35)..(590): NCBI GI: 46120528 Blast Desc: FG04911.1 [Gibberella zeae PH-1]
  misc_feature (1)..(590): NCBI GI: 154299923 Blast Desc: BC1G_10852 [Botryotinia fuckeliana B05.10] gi|150857132|gb|EDN32324.1| BC1G_10852 [Botryotinia fuckeliana B05.10]
  misc_feature (35)..(599): NCBI GI: 261358858 Blast Desc: endoplasmic oxidoreductin-1 [Verticillium albo-atrum VaMs.102]
  misc_feature (35)..(507): NCBI GI: 116182164 Blast Desc: CHGG_01710 [Chaetomium globosum CBS 148.51] gi|88186007|gb|EAQ93475.1| CHGG_01710 [Chaetomium globosum CBS 148.51]
  misc_feature (1)..(597): NCBI GI: 242799724 Blast Desc: oxidoreductin [Talaromyces stipitatus ATCC 10500] gi|218716784|gb|EED16205.1| oxidoreductin [Talaromyces stipitatus ATCC 10500]
  misc_feature: Useful for introducing or modulating the production of volatile compounds
MPSAGKLFFLTLFALWGSPAQCQNTRDRQDESCAISPKSIVNDACVSYQTLETLNSRVKPVVDDLTRETDFFSYYRLNLFNKVCPFWSDENGMCGNIACAVNTIDNEEDIPPIWRASELGKLEGPSAKHPAKKIQKEAPRRPLQGLLGENVGESCVVEYDDEGDERDYCIPEDESTSAKGDYVSLVHNPERFTGFGGEGAKMVWDAIYRENCFQKSSFPKSASLGLQSSAQGPAARDFRSVMHSAERASMLEQHHQDPNMIFAQTGLENEDECLEKRVFYRVISGMHASISTHLCWDFLNQTTGEWQPNVKCYTERLHTHPERISNLYFNYAMVTRAIAKLGPYLQDYTFCTGDPDQDSATKAKVLAVTQASSSVPQIFDESLMFKNGEGPSLKEDFRNRFRNVSRIMDCVGCDKCRLWGKVQVSGYGTALKVLFETDNDSGEVPELKRTELVALFNTYARLSSSMNALHQFRDMVDGPTKQSRPASIIPDRAKKPHAVSLPPKTTETESSVLEDDWEEEETSRNRSSEEPETTTDIFWDELGKVIDAFKIVVGHWISFPKQVYHIALAELNRGWQLYIGLPVTPRTWSFRPSRNAEEL

SEQ ID NO: 21045 - DNA, 3215 bp, Muscodor strobelii
  misc_feature: SGI EST ID NO. CUFF.49548.1
  misc_feature: Variant of the nucleotide sequence at SEQ ID NO 21043
aaagaacacgttgtgccaagttccatgcattcggttcatctacaaagagcccctcgatgatgaactcaatacagacacacggtcaaaatatgtctatctcatcatgctctgttatgttgctgtttaatcttgatgtaaatcttaaacgaaaagggaattcaatacaatatgtaatcgtagattattcggaaagaaattgcctttattattttgttcatgttgtgcaaaatggtagtgctatgccacagttttgacagaagcataagactaagattcgccacactgtcattgtcaaagagtgccacgtattgtaataaaatgggatgttctgattcaggccatgacaggcattggacatgggattattgtaacggagtatttcgagcattgcagcatgagcaatcgtttcttgtctttcttgtcctcggtgtagactataactcttttttcaccagttgataactttgatttttctttgctttggcgcacccaatcgaccacgttgcgatttgcgactacgaccatctaacaccatcgctattgtcgcgtgccgcccatccatccctcgattgcttgttctctccaaaggtacaatcccgcagcttggattccaagagtctacctaattctggctaaattgcataccacgtctgttttggacacctctccctctctctcgcgcgcacaccttcccgatcgcccagtcgtctgcggtctccagaactgccgaatgaagaaggagggtgccgttagtagctgtccgtcgtcgcagactgcgagcacctcgcacacccggtcgctggcaccctgtcgcatcgcttgaccaagtgtcccgtcccgtccagttgcccacgagcctcgctacgacatacacgccatgccgtcggccggcaagctgttcttcctgaccctcttcgccctctggggctctcctgcgcagtgccagaacaccagagaccggcaagatgagtcttgcgcaatatcccccaagtccatcgtcaacgacgcttgcgtctcctaccagaccctcgaaaccctcaacagcagggtgaagcctgtcgtggacgacctgacaagggagaccgacttcttctcctactaccgcctcaatcttttcaacaaagtgtgccccttctggagcgacgagaatggcatgtgtggcaacatcgcctgcgctgtgaacacgatagacaatgaggaagacatacccccgatctggagggccagtgagctagggaaactcgagggcccttcagcaaaacaccccgccaagaagatacagaaagaagcgcccaggcggccgctacagggtctattgggagagaatgtgggtgagagctgtgtggttgaatatgacgatgaaggagacgagcgggattattgtatccccgaggacgagagcacgagtgccaaaggcgactacgtcagcttagtccacaacccagagcgattcacaggattcggtggcgagggcgcaaagatggtttgggatgctatctatcgcgagaactgcttccagaagtcatctttccccaagtccgcatccctcgggctgcagtcatcagctcaggggccagctgcccgagacttccgcagtgtcatgcactcagctgagcgggcatcgatgctcgagcagcaccatcaggaccccaatatgatattcgcccagacgggcttggagaacgaagacgaatgcctcgagaagcgtgtcttctaccgcgtcatctcaggcatgcacgctagtatcagcacccatctgtgctgggacttcctcaaccagaccaccggcgagtggcagcccaacgtgaagtgctatacagagagacttcacacacatcctgaacgcatttcgaatctatactttaactatgccatggtcacccgggccatcgcaaagcttggcccttatttgcaggactacacgttctgcactggtgatcccgatcaggacagtgctaccaaagccaaggttctagctgtcacgcaagcgtcctcatctgtgccccagattttcgacgagagcctcatgttcaagaacggcgagggcccttccttgaaggaagacttccggaaccgattccgaaatgtgagccgcatcatggactgtgtcgggtgcgacaaatgtcgactctggggcaaagtacaagtctccggctacggcacggcgttgaaagttttgttcgaaacggataacgatagcggcgaagtccccgaacttaagagaacggagctcgtcgcattgttcaatacgtacgcgcgtctcagcagttccatgaatgcgcttcatcagttccgggacatggtcgatggccccacgaaacagtctagaccggcttccataattcctgatcgtgctaagaagcctcatgctgttagcttgccgccaaagacgactgagacagagtccagcgtgctggaggatgattgggaggaagaggagacgtcgagaaatcggtcaagcgaggaacccgagaccacgaccgacatattctgggatgagctaggcaaggtcatagatgctttcaaaattgtggttggccactggatcagcttcccgaaacaagtataccacattgccctcgcagagctcaatcgtggctggcaattatatatcgggctccccgtcacaccgaggacttggagcttcagaccctcgagaaatgctgaggaactatagcatttcctctatcgtgaatgaaagataaagcattaggcattggcatagcgagcgtgaaccttttctttaagagggtagttgtatataccttggtacatattgcatataagttctcgaggccttagggggccaaaatcagagtattggttcatatatcttccagccaagttatgtgaaccatcagcaattactaccaaaccagaactattagaattgcgcattgctgaagtgctgttgcatatttcaacatgatcgcaatgtaatagtcgggaatattgcactatggacatacttaaaggtgtttagaggctgtcgcctgagcgtcaaccagaaacatgatatagtctggagtcatcagcttgtagttcggaaacacattaagtaggcttttcggaatcaaagagactatttgtattcagggatcggtttaaaaaccatatttcgaacccctaatccggctagtttccattcgttcctaagattcgccagttggatgctcgactgtcattttacttattctgcttggattgcatgataa

SEQ ID NO: 21046 - DNA, 2469 bp, Muscodor strobelii
  misc_feature: SGI cDNA ID NO. 567116
  misc_feature: Reduced expression when VOC is produced
  misc_feature: Encodes the peptide sequence at SEQ ID NO 21047
atggttcggccccggatcttgttcatcgatgcctatgattcgttcagcaacaatattgtctcgctgttgacgactgtcttagaggctgatgtcgatgtactgcccattgaccccccgcacctcaatccagaggcaccggatttcaaagatgctttggaaaacgaggtgaggcattatgatgccgttgtttgtggcccaggtcccggtgcaccggatattgatagcgatgtcgggattatgcaacatatctggaatctggagggtgataacgcactcccagtacttggaatttgcctcggctttcagagtttgattgtgaactgtggtggagtcgtcagaagactacggacaggtcttcacggcatgatccgagacatcgaccattcgaagactgaacgagacgggaatatattcagaggtgtgcctgactttcgtgctacactgtatcacagtctacacgcggacatcaaccaagattccattcccaccgcggcctggcagcaatcgaaatggaactccccagtcgatctgccggatatcgtacctctggcgtggacctacgaagaccgcggagacatgactgagcgaattttgatgggcgtgagacatcggagaaaaccattctggggtctacaatatcatccagagtcgatatgtacggaacaaactgggcatcaagttatcaggaattggtttcgagaagctatgaggtggaatagcgcagctagccgaaagccagccccgagggctctcaacagtcataaagtaaaggaaaatccgagcgtagggattgtcaaagagactgtgaacagtacccgtccgctacctttcgctctaggcgccaaatatcgagcccagactttggagataccactacatctcgaggtacctgacgtcgtcgaggtgctgcagagcgagaagagcgaattcatcgtgcttgactctgccagcgccaagaccagaaggacaggatctgacgtgcgcggacgatacagtatcattgctctggacgtcgatgaatcattgaaattggagtacagaacaggcaatcggcatgtgacggttcgaactcctttaagtctcccatcaacacagaatgcgatagtggacgtggcactcaagtccaaccagacaatctggcaatttctttccgacttctggaattctcgtcgaatcgcagtcgaagatggtccaggtcccttctgtggaggctttatgggctacaccacatacgaacttggtctcgagggcatcggcgttgaactccaagaagagaagcaacacgaacggccagacctttgctttgtatgggtgaccaaaagcatagtgatagaccaccttgaaggcactctacgtatccagacactctccccaccaggatcaggaagcgagcaatggatgagtctcattgctgaccggctcacaaactcgttaatatggtccaatgctatcccagcagacttcagcaaaatccaacctaacagcgttcaactcacgccaccgcacacccctacctcaggccaagccaaagcacaaatctgcgtgccagacgcaaacgagtacgacaccaaagtcagtctctgccaagactacatcgcagcgggtgactcctacgagctctgcctcacccaacaaacaaccatcactcgaccacgcagtcgctacgagggacatatccgcacgaccccttgccaaagctcaaacaccgaaacctccccctcatcatggtccctctaccgctccctccgcacccgccaacccgcccccttcggatcatacattcgcctgagcggcgcaacgatgatctcctcctccccagagcgcttcgtaacattctcctcctcaggactctgcagcatgcggcccatgaaaggcacagtccgcaaatcaccaacctgctccacactcgcccaagccgagaagatcctccacatacctaaggaagaagcggagaatctcatgatcgtcgatctagtccgtcacgatctgcacagtatctgcggtcccggacaagttcaagtcccgcgattattggtagtcgaggagtatgccagtgtgttccagatgatcagtgtcgtcgagggacaattaccgaaacaggacgtagataccggaaagacgacaggtttagatgtcctgtctgctagtttaccaccaggaagcatgacgggtgcgccgaagaagcgaagctgtgaattactacagggtattgaggggaagaatagagagaggggtttgtactctggtgtagttggttatatggacgcagccgggcgcggagactggagcgtcacgattcgcactctgttccgctgggatgacgagagtacagttgtaggcggtagagaaatggagacgtggcgtataggagcagggggagccgtgacggcgctcagcacgccggagggagagacggaggagatgtttattaaactgaaggggccactaggtgttttcgaagaagcttga

SEQ ID NO: 21047 - protein, 822 aa, Muscodor strobelii
  misc_feature: SGI Peptide ID NO. 567116
  misc_feature (292)..(453): Pfam Id: PF04715 Pfam Desc: Anthranilate synthase component I, N terminal region
  misc_feature (517)..(819): Pfam Id: PF00425 Pfam Desc: chorismate binding enzyme
  misc_feature (7)..(235): Pfam Id: PF00117 Pfam Desc: Glutamine amidotransferase class-I
  misc_feature (576)..(819): Pfam Id: PF00425 Pfam Desc: chorismate binding enzyme
  misc_feature (7)..(162): Pfam Id: PF00117 Pfam Desc: Glutamine amidotransferase class-I
  misc_feature (175)..(235): Pfam Id: PF00117 Pfam Desc: Glutamine amidotransferase class-I
  misc_feature (3)..(821): NCBI GI: 171692799 Blast Desc: protein product [Podospora anserina] gi|170946348|emb|CAP73149.1| protein product [Podospora anserina]
  misc_feature (3)..(821): NCBI GI: 85100068 Blast Desc: NCU06714 [Neurospora crassa OR74A] gi|28922425|gb|EAA31658.1| conserved [Neurospora crassa OR74A] gi|28949954|emb|CAD70940.1| related to para-aminobenzoic acid
  misc_feature (5)..(822): NCBI GI: 46121633 Blast Desc: FG05195.1 [Gibberella zeae PH-1]
  misc_feature (5)..(822): NCBI GI: 256731501 Blast Desc: [Nectria haematococca mpVI 77-13-4]
  misc_feature (3)..(819): NCBI GI: 156048060 Blast Desc: SS1G_08761 [Sclerotinia sclerotiorum 1980] gi|154693158|gb|EDN92896.1| SS1G_08761 [Sclerotinia sclerotiorum 1980]
  misc_feature (3)..(819): NCBI GI: 154305890 Blast Desc: BC1G_08176 [Botryotinia fuckeliana B05.10] gi|150853061|gb|EDN28253.1| BC1G_08176 [Botryotinia fuckeliana B05.10]
  misc_feature (120)..(821): NCBI GI: 116199245 Blast Desc: CHGG_07778 [Chaetomium globosum CBS 148.51] gi|88179057|gb|EAQ86525.1| CHGG_07778 [Chaetomium globosum CBS 148.51]
  misc_feature (80)..(822): NCBI GI: 145607187 Blast Desc: MGG_04055 [Magnaporthe grisea 70-15] gi|145014781|gb|EDJ99349.1| MGG_04055 [Magnaporthe grisea 70-15]
  misc_feature (3)..(812): NCBI GI: 189195462 Blast Desc: para-aminobenzoate synthase component 1 [Pyrenophora tritici-repentis Pt-1C-BFP] gi|187979948|gb|EDU46574.1| para-aminobenzoate synthase component 1 [Pyrenophora Pt-1C-BFP]
  misc_feature (3)..(822): NCBI GI: 212526566 Blast Desc: para-aminobenzoate synthase PabaA [Penicillium marneffei ATCC 18224] gi|210072838|gb|EEA26925.1| para-aminobenzoate synthase PabaA [Penicillium marneffei ATCC
  misc_feature (5)..(819): SWISSPROT Homolog: EC 2.6.1.85 Aminodeoxychorismate synthase
  misc_feature: Useful for introducing or modulating the production of volatile compounds
MVRPRILFIDAYDSFSNNIVSLLTTVLEADVDVLPIDPPHLNPEAPDFKDALENEVRHYDAVVCGPGPGAPDIDSDVGIMQHIWNLEGDNALPVLGICLGFQSLIVNCGGVVRRLRTGLHGMIRDIDHSKTERDGNIFRGVPDFRATLYHSLHADINQDSIPTAAWQQSKWNSPVDLPDIVPLAWTYEDRGDMTERILMGVRHRRKPFWGLQYHPESICTEQTGHQVIRNWFREAMRWNSAASRKPAPRALNSHKVKENPSVGIVKETVNSTRPLPFALGAKYRAQTLEIPLHLEVPDVVEVLQSEKSEFIVLDSASAKTRRTGSDVRGRYSIIALDVDESLKLEYRTGNRHVTVRTPLSLPSTQNAIVDVALKSNQTIWQFLSDFWNSRRIAVEDGPGPFCGGFMGYTTYELGLEGIGVELQEEKQHERPDLCFVWVTKSIVIDHLEGTLRIQTLSPPGSGSEQWMSLIADRLTNSLIWSNAIPADFSKIQPNSVQLTPPHTPTSGQAKAQICVPDANEYDTKVSLCQDYIAAGDSYELCLTQQTTITRPRSRYEGHIRTTPCQSSNTETSPSSWSLYRSLRTRQPAPFGSYIRLSGATMISSSPERFVTFSSSGLCSMRPMKGTVRKSPTCSTLAQAEKILHIPKEEAENLMIVDLVRHDLHSICGPGQVQVPRLLVVEEYASVFQMISVVEGQLPKQDVDTGKTTGLDVLSASLPPGSMTGAPKKRSCELLQGIEGKNRERGLYSGVVGYMDAAGRGDWSVTIRTLFRWDDESTVVGGREMETWRIGAGGAVTALSTPEGETEEMFIKLKGPLGVFEEA

SEQ ID NO: 21048 - DNA, 8218 bp, Muscodor strobelii
  misc_feature: SGI EST ID NO. CUFF.49560.0
  misc_feature: Variant of the nucleotide sequence at SEQ ID NO 21046
cttgaagtacataagcgcagtggactacggtacgtttcgacaacggtgggtatcatcatcattatgcatgcattcggaacttcaaccgggcgcgtggtagagagaaaccggaggtcgggatttgacgcccacccaaatgcactgaagatgcagaagttcatgcaggattggcgtaatatcaaccacattttatcatattacacctagtatctccacatcaacttcagaaataggacacatagtaccaatctttattgactagaagatcgatggtgtgcatagtggcggcatgttttgattgtagtaagccccgtcatcctccgcggacacccgatggtcggaatctaccagccaagcaacattccccagagaaagatgaaaactctgatccactttggcccgtgacgccgttacatatcatggcacggtcccctaaatttacgacttcaaagtttattagataagattaaatttcttcggtatacatacattggacaagtttaaaattctgttatcagcgttttcgacggcttctaaacttacttgtggcaatggttcggccccggatcttgttcatcgatgcctatgattcgttcagcaacaatattgtctcgctgttgacgactgtcttagaggctgatgtcgatgtactgcccattgaccccccgcacctcaatccagaggcaccggatttcaaagatgctttggaaaacgaggtgaggcattatgatgccgttgtttgtggcccaggtcccggtgcaccggatattgatagcgatgtcgggattatgcaacatatctggaatctggagggtgataacgcactcccagtacttggaatttgcctcggctttcagagtttgattgtgaactgtggtggagtcgtcagaagactacggacaggtcttcacggcatgatccgagacatcgaccattcgaagactgaacgagacgggaatatattcagaggtgtgcctgactttcgtgctacactgtatcacagtctacacgcggacatcaaccaagattccattcccaccgcggcctggcagcaatcgaaatggaactccccagtcgatctgccggatatcgtacctctggcgtggacctacgaagaccgcggagacatgactgagcgaattttgatgggcgtgagacatcggagaaaaccattctggggtctacaatatcatccagagtcgatatgtacggaacaaactgggcatcaagttatcaggaattggtttcgagaagctatgaggtggaatagcgcagctagccgaaagccagccccgagggctctcaacagtcataaagtaaaggaaaatccgagcgtagggattgtcaaagagactgtgaacagtacccgtccgctacctttcgctctaggcgccaaatatcgagcccagactttggagataccactacatctcgaggtacctgacgtcgtcgaggtgctgcagagcgagaagagcgaattcatcgtgcttgactctgccagcgccaagaccagaaggacaggatctgacgtgcgcggacgatacagtatcattgctctggacgtcgatgaatcattgaaattggagtacagaacaggcaatcggcatgtgacggttcgaactcctttaagtctcccatcaacacagaatgcgatagtggacgtggcactcaagtccaaccagacaatctggcaatttctttccgacttctggaattctcgtcgaatcgcagtcgaagatggtccaggtcccttctgtggaggctttatgggctacaccacatacgaacttggtctcgagggcatcggcgttgaactccaagaagagaagcaacacgaacggccagacctttgctttgtatgggtgaccaaaagcatagtgatagaccaccttgaaggcactctacgtatccagacactctccccaccaggatcaggaagcgagcaatggatgagtctcattgctgaccggctcacaaactcgttaatatggtccaatgctatcccagcagacttcagcaaaatccaacctaacagcgttcaactcacgccaccgcacacccctacctcaggccaagccaaagcacaaatctgcgtgccagacgcaaacgagtacgacaccaaagtcagtctctgccaagactacatcgcagcgggtgactcctacgagctctgcctcacccaacaaacaaccatcactcgaccacgcagtcgctacgagggacatatccgcacgaccccttgccaaagctcaaacaccgaaacctccccctcatcatggtccctctaccgctccctccgcacccgccaacccgcccccttcggatcatacattcgcctgagcggcgcaacgatgatctcctcctccccagagcgcttcgtaacattctcctcctcaggactctgcagcatgcggcccatgaaaggcacagtccgcaaatcaccaacctgctccacactcgcccaagccgagaagatcctccacatacctaaggaagaagcggagaatctcatgatcgtcgatctagtccgtcacgatctgcacagtatctgcggtcccggacaagttcaagtcccgcgattattggtagtcgaggagtatgccagtgtgttccagatgatcagtgtcgtcgagggacaattaccgaaacaggacgtagataccggaaagacgacaggtttagatgtcctgtctgctagtttaccaccaggaagcatgacgggtgcgccgaagaagcgaagctgtgaattactacagggtattgaggggaagaatagagagaggggtttgtactctggtgtagttggttatatggacgcagccgggcgcggagactggagcgtcacgattcgcactctgttccgctgggatgacgagagtacagttgtaggcggtagagaaatggagacgtggcgtataggagcagggggagccgtgacggcgctcagcacgccggagggagagacggaggagatgtttattaaactgaaggggccactaggtgttttcgaagaagcttgatttgatgaggagtaaccaggttgctaccgaggcggtcagctaggtatggagataggcggtttcttgacatggagttggggcactggttcaacattgggtatgtatggttgcagagtggcgtttcaacaaaggcgtcgagcattttcaggcacggtggttcaacatctctgttcagacccggagttttgaaccagcattagacgcacgaggtctcaacgacctggggagcatgtccttaggtagcttttttccatctcgtcaaacaaaaagttggccatatcagagctgtataatgatttgacatcattatatcgtagctcgatagctattctaattaccgacgtactaggtatcgttaattatcacagtgcatctcatgacgtttcgacgatgaccttgagtcatttgtctcaattccctctattttgaaagcagcgctcatctcatcgtaactttcgttcgtttagtatacagatcctactctgaaactgctatatgagtcaaaggcttcacagctcgtctctaccgtggctgctgccgctctcgctcagttcttccatagccatgatcttcacaaccagactcgtccagcctgtaaagtgctgcgtgcgctgcccctcgccagtctctgggttgtactgctcccaagcgaagccagtctcctcccagctattgtacactgtctctactaggttgcgacgaaggcggttatacagatacctagcttttgcagcgtaaggaccggtttgaagcccgtagttctggacgcatgttagtaattgctggtagaatcatctttagaaggggcaaaccatactcggagctgtaccacggcaaggtagttcatgttgagccacacggggctcctccaatagttctcgtccgtgccgtagaatttcgactgcttgctcagacttcgaattccgtgagggctgaagagttcctcttcgtcgccgagtagatcaaggatctttccaagcttaacgtcctcagggtccaggagacccactaagaaggggaacaaagaaatataccccttgtggcaaacaagtgcatgctcctcgaagtcgtcaatggtggcatcgcagaagacgccttcttcctgagaccaatgaagatcaaccagattgtgtacaataccatctagagctttctgatattgctgggcatcttccggtagtcccacagcatcagcaatcttagccagtgtccgagtcatcatgcccatccaagacatcaaatccacatggagctcacctgggtgaggtggctggggtcgtggatagtcgtcgagaccactggtcaagcaatgctgaacagatcgaccgcgccagcggtaagcttccttattcgaatacgcctctcgatcatatgagttgatatccccaaattgtgtctttttgaaccataaatactggcgacggaggagaggatacaagttgcgcagatattcaaggcctaattccggattgtcgacatgggcactctcgaggaattcgcttgcagaaagcttttcggtagctgatctctggctaccattcgcactttgaagcttatccaagaaggactcgagtaccagaaacaaggtaggagggttagcataatgcgggtattggacctggaactcagggggaaccttggtccgcgcttcgtggccaaggatctgttcacgggcgatccagccctcttcatccattaagttgtaccaactcttgacaatctcaagagtcaggtctgtatcccagtcgacaatgggaaggaggtggaatccctcatcccagaggaatccacgggggaagaaaggacgggacggtatactagaataaagctcatagggaccctcgacctgctccgctttacgtccacgtgcttctgccgtctcctcccaaaatccttcattctcctcctcgtactcaggggcgtacgatcggtcgaccaaatgcgacccgtaaaaatatcctataccaccagccaaattagaaagcatactttttccaaatacctcatacttggaagccttgaatggcgcctggggagcgaggatttccttgaagcggtcattgaacgactcgctattagatctgatctcccgggtcaagtcttcgcttgtgagatccttgcccgcagaggcgctcgagaaaagaacatcgaattcgaagggaccctcaaatactttctgtacgatttgcatattcccagacttggcgctgttctgcatttggtacagcatgtagggtggaggaggattttcctggccataaatcccaagaagtgactcaatgctcgccttgagagcttggaacagaatgttctttccataccacaagtgctcggatggcaacgtcgtcgaaaacaagacagtcttctcagtgtctcggtcttttgatgattcatggttgctcgtaggatggttgccagtgcctttagtgactttgatattgtacgctcctagttgcgctgactttgaagtgaaagtgacatcgtcgtcgaaaccaccgtctgatgcaccctcaacaatatccaattgctcgcccgggtcttcggtagcgatggtgaagatgacagtggttggcaaatcgtctggtgcatcatcacgggggacgcctctgattctcacgccccagcttccgccatgactgccaccagggaccttgatgaaggtcgttgtcatatcaatcttgtttccacggtcatggatggtctgaacgccacctttccgggtgtcgtactcgtcccatccatagccggccataccctcattttgttcacatgtgtaacgaagatctatcacaggacaacttagcaacgggcttcattaaatggacgtggaataacactggtcatcatactctcttgaactccaggataatcgtcgactttcacccacatcaaactagtggatacgccgacaggtattcttggacgaacgccgaagtagagattgggacgatatgggccccatagtaagctctggttgttcaagcggccaatttcaccctggagtacggctccattatcagctgcagagaccgatgttaagagggaaagtgacaggcaagctgtcaatttggttagaagtcccatgataacatcggaatcaagaacagtaaaccattgatcaggtgctcctaacgaaagggtggaaaaaatgaaggtgtatggaaggagagtgtctcagattggcgccggttgaatagcaaaggaagctctttctgaggagctcctgcgattgttatgaacactacaaagtgaacacggttttgaattgaagcttaggtaccctaatgcgacaatgcggtgacagctcgtggggtctggtttgtggcatgctgtaggacaggtacgcaagctgagaagcaggggttcgttatcgattgcagtgtgcagtcgcttgacgtcagggcccctgacagcctagcttgtcccctgtaacggtccacggctgaggctaggtattgccccgcggtccagcttgccgcccggcgacgttttcagtccgcgccaaatcgagtcccactaaaattgatttagaccattgtctagactctagacctctaaagcttcgcagcctaacattgaccagtgtcgacaatctccagcatcatcagccaacgagcttcagcttcggggcgcgtccggtgcggaaactcctgatttcgcctcgtagttgactttgacttcgttgttcataacaccacacgacaaacatacacgataattcttcctgcgcgccgtaagaaacgctgaacatttaaccaagctggccttcaacatggcagactatccccggagtcgaaaccgcccagatagccgggccatgtgggatgagtccgaccggcgcaatcgtcgcgacgatggtacacaaggaaggagagtagatcgcgaccggtacaatgacagaagtgcccgagaccaggatcgagaccgagaccgagaccgagaccgtcgccaccgatccaggtcgcgatccccccagagagatcgccgcgatcgcgcagatagggacagagactacgatagagacaggcgaagacgttacgacgatcgcgacagaggagacgaccgccgcaactacagggacagagatgaccggcgcgaacgcgacagagatgaggacgatataccccgaggccctcgacgaggcagcccgcgtcgttcaagatctcctccaaagggcccccgagctatgaccgaacgagccaatgactcgccacactcacccctcccaacacggtccaagaaatcagacaagaacgggccatcatcattatcacgtgcccacgacgaagacgacgattcggaccataggagcgaagccaaaggcccttcaagccgcagatcacgagacaccccagagtatgaggaacgacggggcagaaagtcaaagcgcgacgagcaagacgaagatgctatggatgaagacgatgatgttgaggtggatgacgagatgagcgcaatgcaggccatgatgggcttcggtggattcgggacgaccaaaggcaccaaggtgcctggaaacaacgctggtggggtttacaaggcgaagaagaccgagtatcgccagtacatgaaccgtgtgggaggcttcaatagaccgctcagcccaggccggtagcggattaacacaggcttcttgactatggtgataggattctcagaggactatgggggggaacgctgtccaatatgcatcaattggatgagtgagatttaacttaggtcgcaaaggttctaacccagctaagagcatcagaagaatgctctagaggtgaattcttaccagacccttgattaccaaagctttgttataacttaatacatgacagacttggcccagcatcagtgattattcttgggctaggtaacttcgactcgtctgcgaagttgactaggacatactaaagtttgtctgatgaaaatttagatatattgagcagaataagccgtcgtgaccatcatacacagatgcgaagctaaatacagggaaatctattcaacatgctcgtcaaactttgtactaagtgtttctagttgttgagagtacatatttcacttcgtatctataaatctcccttgctaccactcgctcagcaagaaaaactccctaaatagtatcttccgacatttcgttgataatctctcgtcgtcataccgcgtacacctacgctctcagaacaaagaacacccccttgcacctc

SEQ ID NO: 21049 - DNA, 1011 bp, Muscodor strobelii
  misc_feature: SGI cDNA ID NO. 567117
  misc_feature: Encodes the peptide sequence at SEQ ID NO 21050
atggttcggccccggatcttgttcatcgatgcctatgattcgttcagcaacaatattgtctcgctgttgacgactgtcttagaggctgatgtcgatgtactgcccattgaccccccgcacctcaatccagaggcaccggatttcaaagatgctttggaaaacgaggtgaggcattatgatgccgttgtttgtggcccaggtcccggtgcaccggatattgatagcgatgtcgggattatgcaacatatctggaatctggagggtgataacgcactcccagtacttggaatttgcctcggctttcagagtttgattgtgaactgtggtggagtcgtcagaagactacggacaggtcttcacggcatgatccgagacatcgaccattcgaagactgaacgagacgggaatatattcagaggtgtgcctgactttcgtgctacactgtatcacagtctacacgcggacatcaaccaagattccattcccaccgcggcctggcagcaatcgaaatggaactccccagtcgatctgccggatatcgtacctctggcgtggacctacgaagaccgcggagacatgactgagcgaattttgatgggcgtgagacatcggagaaaaccattctggggtctacaatatcatccagagtcgatatgtacggaacaaactgggcatcaagttatcaggaattggtttcgagaagctatgaggtggaatagcgcagctagccgaaagccagccccgagggctctcaacagtcataaagtaaaggaaaatccgagcgtagggattgtcaaagagactgtgaacagtacccgtccgctacctttcgctctaggcgccaaatatcgagcccagactttggagataccactacatctcgaggtacctgacgtcgtcgaggtgctgcagagcgagaagagcgaattcatcgtgcttgactctgccagcgccaagaccagaaggacaggatctgacgtgcgcggacgatacagtatcattgctctggac

SEQ ID NO: 21050 - protein, 337 aa, Muscodor strobelii
  misc_feature: SGI Peptide ID NO. 567117
  misc_feature (7)..(235): Pfam Id: PF00117 Pfam Desc: Glutamine amidotransferase class-I
  misc_feature (7)..(162): Pfam Id: PF00117 Pfam Desc: Glutamine amidotransferase class-I
  misc_feature (175)..(235): Pfam Id: PF00117 Pfam Desc: Glutamine amidotransferase class-I
  misc_feature (3)..(335): NCBI GI: 171692799 Blast Desc: protein product [Podospora anserina] gi|170946348|emb|CAP73149.1| protein product [Podospora anserina]
  misc_feature (5)..(335): NCBI GI: 85100068 Blast Desc: NCU06714 [Neurospora crassa OR74A] gi|28922425|gb|EAA31658.1| conserved [Neurospora crassa OR74A] gi|28949954|emb|CAD70940.1| related to para-aminobenzoic acid
  misc_feature (3)..(337): NCBI GI: 154305890 Blast Desc: BC1G_08176 [Botryotinia fuckeliana B05.10] gi|150853061|gb|EDN28253.1| BC1G_08176 [Botryotinia fuckeliana B05.10]
  misc_feature (3)..(337): NCBI GI: 156048060 Blast Desc: SS1G_08761 [Sclerotinia sclerotiorum 1980] gi|154693158|gb|EDN92896.1| SS1G_08761 [Sclerotinia sclerotiorum 1980]
  misc_feature (5)..(337): NCBI GI: 256731501 Blast Desc: [Nectria haematococca mpVI 77-13-4]
  misc_feature (5)..(337): NCBI GI: 46121633 Blast Desc: FG05195.1 [Gibberella zeae PH-1]
  misc_feature (80)..(337): NCBI GI: 145607187 Blast Desc: MGG_04055 [Magnaporthe grisea 70-15] gi|145014781|gb|EDJ99349.1| MGG_04055 [Magnaporthe grisea 70-15]
  misc_feature (3)..(336): NCBI GI: 189195462 Blast Desc: para-aminobenzoate synthase component 1 [Pyrenophora tritici-repentis Pt-1C-BFP] gi|187979948|gb|EDU46574.1| para-aminobenzoate synthase component 1 [Pyrenophora Pt-1C-BFP]
  misc_feature (6)..(336): NCBI GI: 212526566 Blast Desc: para-aminobenzoate synthase PabaA [Penicillium marneffei ATCC 18224] gi|210072838|gb|EEA26925.1| para-aminobenzoate synthase PabaA [Penicillium marneffei ATCC
  misc_feature (3)..(336): NCBI GI: 169605183 Blast Desc: SNOG_05611 [Phaeosphaeria nodorum SN15] gi|160706721|gb|EAT86675.2| SNOG_05611 [Phaeosphaeria nodorum SN15]
  misc_feature (6)..(244): SWISSPROT Homolog: EC 2.6.1.85 Aminodeoxychorismate synthase
MVRPRILFIDAYDSFSNNIVSLLTTVLEADVDVLPIDPPHLNPEAPDFKDALENEVRHYDAVVCGPGPGAPDIDSDVGIMQHIWNLEGDNALPVLGICLGFQSLIVNCGGVVRRLRTGLHGMIRDIDHSKTERDGNIFRGVPDFRATLYHSLHADINQDSIPTAAWQQSKWNSPVDLPDIVPLAWTYEDRGDMTERILMGVRHRRKPFWGLQYHPESICTEQTGHQVIRNWFREAMRWNSAASRKPAPRALNSHKVKENPSVGIVKETVNSTRPLPFALGAKYRAQTLEIPLHLEVPDVVEVLQSEKSEFIVLDSASAKTRRTGSDVRGRYSIIALD

SEQ ID NO: 21051 - DNA, 8218 bp, Muscodor strobelii; identical to SEQ ID NO: 21048
  misc_feature: SGI EST ID NO. CUFF.49560.0
  misc_feature: Variant of the nucleotide sequence at SEQ ID NO 21049

SEQ ID NO: 21052 - DNA, 2454 bp, Muscodor strobelii
  misc_feature: SGI cDNA ID NO. 567118
  misc_feature: Encodes the peptide sequence at SEQ ID NO 21053
atgggacttctaaccaaattgacagcttgcctgtcactttccctcttaacatcggtctctgcagctgataatggagccgtactccagggtgaaattggccgcttgaacaaccagagcttactatggggcccatatcgtcccaatctctacttcggcgttcgtccaagaatacctgtcggcgtatccactagtttgatgtgggtgaaagtcgacgattatcctggagttcaagagaatcttcgttacacatgtgaacaaaatgagggtatggccggctatggatgggacgagtacgacacccggaaaggtggcgttcagaccatccatgaccgtggaaacaagattgatatgacaacgaccttcatcaaggtccctggtggcagtcatggcggaagctggggcgtgagaatcagaggcgtcccccgtgatgatgcaccagacgatttgccaaccactgtcatcttcaccatcgctaccgaagacccgggcgagcaattggatattgttgagggtgcatcagacggtggtttcgacgacgatgtcactttcacttcaaagtcagcgcaactaggagcgtacaatatcaaagtcactaaaggcactggcaaccatcctacgagcaaccatgaatcatcaaaagaccgagacactgagaagactgtcttgttttcgacgacgttgccatccgagcacttgtggtatggaaagaacattctgttccaagctctcaaggcgagcattgagtcacttcttgggatttatggccaggaaaatcctcctccaccctacatgctgtaccaaatgcagaacagcgccaagtctgggaatatgcaaatcgtacagaaagtatttgagggtcccttcgaattcgatgttcttttctcgagcgcctctgcgggcaaggatctcacaagcgaagacttgacccgggagatcagatctaatagcgagtcgttcaatgaccgcttcaaggaaatcctcgctccccaggcgccattcaaggcttccaagtatgaggtatttggaaaaagtatgctttctaatttggctggtggtataggatatttttacgggtcgcatttggtcgaccgatcgtacgcccctgagtacgaggaggagaatgaaggattttgggaggagacggcagaagcacgtggacgtaaagcggagcaggtcgagggtccctatgagctttattctagtataccgtcccgtcctttcttcccccgtggattcctctgggatgagggattccacctccttcccattgtcgactgggatacagacctgactcttgagattgtcaagagttggtacaacttaatggatgaagagggctggatcgcccgtgaacagatccttggccacgaagcgcggaccaaggttccccctgagttccaggtccaatacccgcattatgctaaccctcctaccttgtttctggtactcgagtccttcttggataagcttcaaagtgcgaatggtagccagagatcagctaccgaaaagctttctgcaagcgaattcctcgagagtgcccatgtcgacaatccggaattaggccttgaatatctgcgcaacttgtatcctctcctccgtcgccagtatttatggttcaaaaagacacaatttggggatatcaactcatatgatcgagaggcgtattcgaataaggaagcttaccgctggcgcggtcgatctgttcagcattgcttgaccagtggtctcgacgactatccacgaccccagccacctcacccaggtgagctccatgtggatttgatgtcttggatgggcatgatgactcggacactggctaagattgctgatgctgtgggactaccggaagatgcccagcaatatcagaaagctctagatggtattgtacacaatctggttgatcttcattggtctcaggaagaaggcgtcttctgcgatgccaccattgacgacttcgaggagcatgcacttgtttgccacaaggggtatatttctttgttccccttcttagtgggtctcctggaccctgaggacgttaagcttggaaagatccttgatctactcggcgacgaagaggaactcttcagccctcacggaattcgaagtctgagcaagcagtcgaaattctacggcacggacgagaactattggaggagccccgtgtggctcaacatgaactaccttgccgtggtacagctccgaaactacgggcttcaaaccggtccttacgctgcaaaagctaggtatctgtataaccgccttcgtcgcaacctagtagagacagtgtacaatagctgggaggagactggcttcgcttgggagcagtacaacccagagactggcgaggggcagcgcacgcagcactttacaggctggacgagtctggttgtgaagatcatggctatggaagaactgagcgagagcggcagcagccacggtagagacgagctgtga

SEQ ID NO: 21053 - protein, 817 aa, Muscodor strobelii
  misc_feature: SGI Peptide ID NO. 567118
  misc_feature (1)..(805): Pfam Id: PF03200 Pfam Desc: Mannosyl oligosaccharide glucosidase
  misc_feature (280)..(805): Pfam Id: PF03200 Pfam Desc: Mannosyl oligosaccharide glucosidase
  misc_feature (31)..(155): Pfam Id: PF03200 Pfam Desc: Mannosyl oligosaccharide glucosidase
  misc_feature (13)..(805): NCBI GI: 116198099 Blast Desc: CHGG_07205 [Chaetomium globosum CBS 148.51] gi|88178484|gb|EAQ85952.1| CHGG_07205 [Chaetomium globosum CBS 148.51]
  misc_feature (12)..(817): NCBI GI: 46121679 Blast Desc: FG05218.1 [Gibberella zeae PH-1]
  misc_feature (1)..(817): NCBI GI: 39944068 Blast Desc: MGG_04045 [Magnaporthe grisea 70-15] gi|145014770|gb|EDJ99338.1| MGG_04045 [Magnaporthe grisea 70-15]
  misc_feature (4)..(817): NCBI GI: 256731508 Blast Desc: glycoside hydrolase family 63 [Nectria haematococca mpVI 77-13-4]
  misc_feature (10)..(817): NCBI GI: 85099224 Blast Desc: NCU03657 [Neurospora crassa OR74A] gi|11595535|emb|CAC18158.1| related to ER glucosidase I [Neurospora crassa] gi|28922257|gb|EAA31501.1| NCU03657 crassa
  misc_feature (17)..(805): NCBI GI: 121703762 Blast Desc: mannosyl-oligosaccharide glucosidase, [Aspergillus clavatus NRRL 1] gi|119398289|gb|EAW08719.1| mannosyl-oligosaccharide glucosidase, [Aspergillus clavatus NRRL
  misc_feature (1)..(817): NCBI GI: 238494212 Blast Desc: mannosyl-oligosaccharide glucosidase, [Aspergillus flavus NRRL3357] gi|220694992|gb|EED51335.1| mannosyl-oligosaccharide glucosidase, [Aspergillus flavus
  misc_feature (4)..(817): NCBI GI: 145250337 Blast Desc: An15g01420 [Aspergillus niger] gi|134082201|emb|CAL00956.1| protein product [Aspergillus niger]
  misc_feature (19)..(817): NCBI GI: 119467638 Blast Desc: mannosyl-oligosaccharide glucosidase, [Neosartorya fischeri NRRL 181] gi|119405777|gb|EAW15728.1| mannosyl-oligosaccharide glucosidase, [Neosartorya fischeri NRRL
  misc_feature (4)..(806): NCBI GI: 154305952 Blast Desc: BC1G_08207 [Botryotinia fuckeliana B05.10] gi|150853092|gb|EDN28284.1| BC1G_08207 [Botryotinia fuckeliana B05.10]
  misc_feature (31)..(801): SWISSPROT Homolog: EC 3.2.1.106 Mannosyl-oligosaccharide glucosidase
MGLLTKLTACLSLSLLTSVSAADNGAVLQGEIGRLNNQSLLWGPYRPNLYFGVRPRIPVGVSTSLMWVKVDDYPGVQENLRYTCEQNEGMAGYGWDEYDTRKGGVQTIHDRGNKIDMTTTFIKVPGGSHGGSWGVRIRGVPRDDAPDDLPTTVIFTIATEDPGEQLDIVEGASDGGFDDDVTFTSKSAQLGAYNIKVTKGTGNHPTSNHESSKDRDTEKTVLFSTTLPSEHLWYGKNILFQALKASIESLLGIYGQENPPPPYMLYQMQNSAKSGNMQIVQKVFEGPFEFDVLFSSASAGKDLTSEDLTREIRSNSESFNDRFKEILAPQAPFKASKYEVFGKSMLSNLAGGIGYFYGSHLVDRSYAPEYEEENEGFWEETAEARGRKAEQVEGPYELYSSIPSRPFFPRGFLWDEGFHLLPIVDWDTDLTLEIVKSWYNLMDEEGWIAREQILGHEARTKVPPEFQVQYPHYANPPTLFLVLESFLDKLQSANGSQRSATEKLSASEFLESAHVDNPELGLEYLRNLYPLLRRQYLWFKKTQFGDINSYDREAYSNKEAYRWRGRSVQHCLTSGLDDYPRPQPPHPGELHVDLMSWMGMMTRTLAKIADAVGLPEDAQQYQKALDGIVHNLVDLHWSQEEGVFCDATIDDFEEHALVCHKGYISLFPFLVGLLDPEDVKLGKILDLLGDEEELFSPHGIRSLSKQSKFYGTDENYWRSPVWLNMNYLAVVQLRNYGLQTGPYAAKARYLYNRLRRNLVETVYNSWEETGFAWEQYNPETGEGQRTQHFTGWTSLVVKIMAMEELSESGSSHGRDEL

SEQ ID NO: 21054 - DNA, 6248 bp, Muscodor strobelii
  misc_feature: SGI EST ID NO. CUFF.49561.1
  misc_feature: Variant of the nucleotide sequence at SEQ ID NO 21052
cttgcgtacctgtcctacagcatgccacaaaccagaccccacgagctgtcaccgcattgtcgcattagggtacctaagcttcaattcaaaaccgtgttcactttgtagtgttcataacaatcgcaggagctcctcagaaagagcttcctttgctattcaaccggcgccaatctgagacactctccttccatacaccttcattttttccaccctttcgttaggagcacctgatcaatggtttactgttcttgattccgatgttatcatgggacttctaaccaaattgacagcttgcctgtcactttccctcttaacatcggtctctgcagctgataatggagccgtactccagggtgaaattggccgcttgaacaaccagagcttactatggggcccatatcgtcccaatctctacttcggcgttcgtccaagaatacctgtcggcgtatccactagtttgatgtgggtgaaagtcgacgattatcctggagttcaagagaatcttcgttacacatgtgaacaaaatgagggtatggccggctatggatgggacgagtacgacacccggaaaggtggcgttcagaccatccatgaccgtggaaacaagattgatatgacaacgaccttcatcaaggtccctggtggcagtcatggcggaagctggggcgtgagaatcagaggcgtcccccgtgatgatgcaccagacgatttgccaaccactgtcatcttcaccatcgctaccgaagacccgggcgagcaattggatattgttgagggtgcatcagacggtggtttcgacgacgatgtcactttcacttcaaagtcagcgcaactaggagcgtacaatatcaaagtcactaaaggcactggcaaccatcctacgagcaaccatgaatcatcaaaagaccgagacactgagaagactgtcttgttttcgacgacgttgccatccgagcacttgtggtatggaaagaacattctgttccaagctctcaaggcgagcattgagtcacttcttgggatttatggccaggaaaatcctcctccaccctacatgctgtaccaaatgcagaacagcgccaagtctgggaatatgcaaatcgtacagaaagtatttgagggtcccttcgaattcgatgttcttttctcgagcgcctctgcgggcaaggatctcacaagcgaagacttgacccgggagatcagatctaatagcgagtcgttcaatgaccgcttcaaggaaatcctcgctccccaggcgccattcaaggcttccaagtatgaggtatttggaaaaagtatgctttctaatttggctggtggtataggatatttttacgggtcgcatttggtcgaccgatcgtacgcccctgagtacgaggaggagaatgaaggattttgggaggagacggcagaagcacgtggacgtaaagcggagcaggtcgagggtccctatgagctttattctagtataccgtcccgtcctttcttcccccgtggattcctctgggatgagggattccacctccttcccattgtcgactgggatacagacctgactcttgagattgtcaagagttggtacaacttaatggatgaagagggctggatcgcccgtgaacagatccttggccacgaagcgcggaccaaggttccccctgagttccaggtccaatacccgcattatgctaaccctcctaccttgtttctggtactcgagtccttcttggataagcttcaaagtgcgaatggtagccagagatcagctaccgaaaagctttctgcaagcgaattcctcgagagtgcccatgtcgacaatccggaattaggccttgaatatctgcgcaacttgtatcctctcctccgtcgccagtatttatggttcaaaaagacacaatttggggatatcaactcatatgatcgagaggcgtattcgaataaggaagcttaccgctggcgcggtcgatctgttcagcattgcttgaccagtggtctcgacgactatccacgaccccagccacctcacccaggtgagctccatgtggatttgatgtcttggatgggcatgatgactcggacactggctaagattgctgatgctgtgggactaccggaagatgcccagcaatatcagaaagctctagatggtattgtacacaatctggttgatcttcattggtctcaggaagaaggcgtcttctgcgatgccaccattgacgacttcgaggagcatgcacttgtttgccacaaggggtatatttctttgttccccttcttagtgggtctcctggaccctgaggacgttaagcttggaaagatccttgatctactcggcgacgaagaggaactcttcagccctcacggaattcgaagtctgagcaagcagtcgaaattctacggcacggacgagaactattggaggagccccgtgtggctcaacatgaactaccttgccgtggtacagctccgaaactacgggcttcaaaccggtccttacgctgcaaaagctaggtatctgtataaccgccttcgtcgcaacctagtagagacagtgtacaatagctgggaggagactggcttcgcttgggagcagtacaacccagagactggcgaggggcagcgcacgcagcactttacaggctggacgagtctggttgtgaagatcatggctatggaagaactgagcgagagcggcagcagccacggtagagacgagctgtgaagcctttgactcatatagcagtttcagagtaggatctgtatactaaacgaacgaaagttacgatgagatgagcgctgctttcaaaatagagggaattgagacaaatgactcaaggtcatcgtcgaaacgtcatgagatgcactgtgataattaacgatacctagtacgtcggtaattagaatagctatcgagctacgatataatgatgtcaaatcattatacagctctgatatggccaactttttgtttgacgagatggaaaaaagctacctaaggacatgctccccaggtcgttgagacctcgtgcgtctaatgctggttcaaaactccgggtctgaacagagatgttgaaccaccgtgcctgaaaatgctcgacgcctttgttgaaacgccactctgcaaccatacatacccaatgttgaaccagtgccccaactccatgtcaagaaaccgcctatctccatacctagctgaccgcctcggtagcaacctggttactcctcatcaaatcaagcttcttcgaaaacacctagtggccccttcagtttaataaacatctcctccgtctctccctccggcgtgctgagcgccgtcacggctccccctgctcctatacgccacgtctccatttctctaccgcctacaactgtactctcgtcatcccagcggaacagagtgcgaatcgtgacgctccagtctccgcgcccggctgcgtccatataaccaactacaccagagtacaaacccctctctctattcttcccctcaataccctgtagtaattcacagcttcgcttcttcggcgcacccgtcatgcttcctggtggtaaactagcagacaggacatctaaacctgtcgtctttccggtatctacgtcctgtttcggtaattgtccctcgacgacactgatcatctggaacacactggcatactcctcgactaccaataatcgcgggacttgaacttgtccgggaccgcagatactgtgcagatcgtgacggactagatcgacgatcatgagattctccgcttcttccttaggtatgtggaggatcttctcggcttgggcgagtgtggagcaggttggtgatttgcggactgtgcctttcatgggccgcatgctgcagagtcctgaggaggagaatgttacgaagcgctctggggaggaggagatcatcgttgcgccgctcaggcgaatgtatgatccgaagggggcgggttggcgggtgcggagggagcggtagagggaccatgatgagggggaggtttcggtgtttgagctttggcaaggggtcgtgcggatatgtccctcgtagcgactgcgtggtcgagtgatggttgtttgttgggtgaggcagagctcgtaggagtcacccgctgcgatgtagtcttggcagagactgactttggtgtcgtactcgtttgcgtctggcacgcagatttgtgctttggcttggcctgaggtaggggtgtgcggtggcgtgagttgaacgctgttaggttggattttgctgaagtctgctgggatagcattggaccatattaacgagtttgtgagccggtcagcaatgagactcatccattgctcgcttcctgatcctggtggggagagtgtctggatacgtagagtgccttcaaggtggtctatcactatgcttttggtcacccatacaaagcaaaggtctggccgttcgtgttgcttctcttcttggagttcaacgccgatgccctcgagaccaagttcgtatgtggtgtagcccataaagcctccacagaagggacctggaccatcttcgactgcgattcgacgagaattccagaagtcggaaagaaattgccagattgtctggttggacttgagtgccacgtccactatcgcattctgtgttgatgggagacttaaaggagttcgaaccgtcacatgccgattgcctgttctgtactccaatttcaatgattcatcgacgtccagagcaatgatactgtatcgtccgcgcacgtcagatcctgtccttctggtcttggcgctggcagagtcaagcacgatgaattcgctcttctcgctctgcagcacctcgacgacgtcaggtacctcgagatgtagtggtatctccaaagtctgggctcgatatttggcgcctagagcgaaaggtagcggacgggtactgttcacagtctctttgacaatccctacgctcggattttcctttactttatgactgttgagagccctcggggctggctttcggctagctgcgctattccacctcatagcttctcgaaaccaattcctgataacttgatgcccagtttgttccgtacatatcgactctggatgatattgtagaccccagaatggttttctccgatgtctcacgcccatcaaaattcgctcagtcatgtctccgcggtcttcgtaggtccacgccagaggtacgatatccggcagatcgactggggagttccatttcgattgctgccaggccgcggtgggaatggaatcttggttgatgtccgcgtgtagactgtgatacagtgtagcacgaaagtcaggcacacctctgaatatattcccgtctcgttcagtcttcgaatggtcgatgtctcggatcatgccgtgaagacctgtccgtagtcttctgacgactccaccacagttcacaatcaaactctgaaagccgaggcaaattccaagtactgggagtgcgttatcaccctccagattccagatatgttgcataatcccgacatcgctatcaatatccggtgcaccgggacctgggccacaaacaacggcatcataatgcctcacctcgttttccaaagcatctttgaaatccggtgcctctggattgaggtgcggggggtcaatgggcagtacatcgacatcagcctctaagacagtcgtcaacagcgagacaatattgttgctgaacgaatcataggcatcgatgaacaagatccggggccgaaccattgccacaagtaagtttagaagccgtcgaaaacgctgataacagaattttaaacttgtccaatgtatgtataccgaagaaatttaatcttatctaataaactttgaagtcgtaaatttaggggaccgtgccatgatatgtaacggcgtcacgggccaaagtggatcagagttttcatctttctctggggaatgttgcttggctggtagattccgaccatcgggtgtccgcggaggatgacggggcttactacaatcaaaacatgccgccactatgcacaccatcgatcttctagtcaataaagattggtactatgtgtcctatttctgaagttgatgtggagatactaggtgtaatatgataaaatgtggttgatattacgccaatcctgcatgaacttctgcatcttcagtgcatttgggtgggcgtcaaatcccgacctccggtttctctctaccacgcgcccggttgaagttccgaatgcatgcataatgatgatgatacccaccgttgtcgaaacgtaccgtagtccactgcgcttatgtacttcaag

SEQ ID NO: 21055 - DNA, 843 bp, Muscodor strobelii
  misc_feature: SGI cDNA ID NO. 567119
  misc_feature: Reduced expression when VOC is produced
  misc_feature: Encodes the peptide sequence at SEQ ID NO 21056
atggcagactatccccggagtcgaaaccgcccagatagccgggccatgtgggatgagtccgaccggcgcaatcgtcgcgacgatggtacacaaggaaggagagtagatcgcgaccggtacaatgacagaagtgcccgagaccaggatcgagaccgagaccgagaccgagaccgtcgccaccgatccaggtcgcgatccccccagagagatcgccgcgatcgcgcagatagggacagagactacgatagagacaggcgaagacgttacgacgatcgcgacagaggagacgaccgccgcaactacagggacagagatgaccggcgcgaacgcgacagagatgaggacgatataccccgaggccctcgacgaggcagcccgcgtcgttcaagatctcctccaaagggcccccgagctatgaccgaacgagccaatgactcgccacactcacccctcccaacacggtccaagaaatcagacaagaacgggccatcatcattatcacgtgcccacgacgaagacgacgattcggaccataggagcgaagccaaaggcccttcaagccgcagatcacgagacaccccagagtatgaggaacgacggggcagaaagtcaaagcgcgacgagcaagacgaagatgctatggatgaagacgatgatgttgaggtggatgacgagatgagcgcaatgcaggccatgatgggcttcggtggattcgggacgaccaaaggcaccaaggtgcctggaaacaacgctggtggggtttacaaggcgaagaagaccgagtatcgccagtacatgaaccgtgtgggaggcttcaatagaccgctcagcccaggccggtag

SEQ ID NO: 21056 - protein, 280 aa, Muscodor strobelii
  misc_feature: SGI Peptide ID NO. 567119
  misc_feature (52)..(279): Pfam Id: PF08648 Pfam Desc: Domain of function (DUF1777)
  misc_feature (72)..(279): Pfam Id: PF08648 Pfam Desc: Domain of function (DUF1777)
  misc_feature (216)..(278): NCBI GI: 46121677 Blast Desc: FG05217.1 [Gibberella zeae PH-1]
  misc_feature (202)..(280): NCBI GI: 242781048 Blast Desc: conserved [Talaromyces stipitatus ATCC 10500] gi|218719869|gb|EED19288.1| conserved [Talaromyces stipitatus ATCC 10500]
  misc_feature (226)..(280): NCBI GI: 156048024 Blast Desc: SS1G_08743 [Sclerotinia sclerotiorum 1980] gi|154693140|gb|EDN92878.1| SS1G_08743 [Sclerotinia sclerotiorum 1980]
  misc_feature (226)..(280): NCBI GI: 154305950 Blast Desc: BC1G_08206 [Botryotinia fuckeliana B05.10] gi|150853091|gb|EDN28283.1| BC1G_08206 [Botryotinia fuckeliana B05.10]
  misc_feature (229)..(278): NCBI GI: 85100031 Blast Desc: NCU06705 [Neurospora crassa OR74A] gi|28922416|gb|EAA31649.1| [Neurospora crassa OR74A]
  misc_feature (229)..(280): NCBI GI: 28949945 Blast Desc: conserved [Neurospora crassa]
  misc_feature (204)..(280): NCBI GI: 212526490 Blast Desc: conserved [Penicillium marneffei ATCC 18224] gi|210072800|gb|EEA26887.1| conserved [Penicillium marneffei ATCC 18224]
  misc_feature (229)..(280): NCBI GI: 145607177 Blast Desc: MGG_04046 [Magnaporthe grisea 70-15] gi|145014771|gb|EDJ99339.1| MGG_04046 [Magnaporthe grisea 70-15]
  misc_feature (209)..(280): NCBI GI: 258570431 Blast Desc: [Uncinocarpus reesii 1704] gi|237904289|gb|EEP78690.1| [Uncinocarpus reesii 1704]
  misc_feature (208)..(278): NCBI GI: 121703758 Blast Desc: conserved [Aspergillus clavatus NRRL 1] gi|119398287|gb|EAW08717.1| conserved [Aspergillus clavatus NRRL 1]
  misc_feature: Useful for introducing or modulating the production of volatile compounds
MADYPRSRNRPDSRAMWDESDRRNRRDDGTQGRRVDRDRYNDRSARDQDRDRDRDRDRRHRSRSRSPQRDRRDRADRDRDYDRDRRRRYDDRDRGDDRRNYRDRDDRRERDRDEDDIPRGPRRGSPRRSRSPPKGPRAMTERANDSPHSPLPTRSKKSDKNGPSSLSRAHDEDDDSDHRSEAKGPSSRRSRDTPEYEERRGRKSKRDEQDEDAMDEDDDVEVDDEMSAMQAMMGFGGFGTTKGTKVPGNNAGGVYKAKKTEYRQYMNRVGGFNRPLSPGR

SEQ ID NO: 21057 - DNA, 8218 bp, Muscodor strobelii; identical to SEQ ID NO: 21048
  misc_feature: SGI EST ID NO. CUFF.49560.0
  misc_feature: Variant of the nucleotide sequence at SEQ ID NO 21055

SEQ ID NO: 21058 - DNA, 600 bp, Muscodor strobelii
  misc_feature: SGI cDNA ID NO. 567120
  misc_feature: Encodes the peptide sequence at SEQ ID NO 21059
atgctcgggttcttctctaatcgaccaccgctcatcgagagccagcttatgaatattcgtcagagaatacgtcgaaacaaatctacgcttagacacttccatcgcgtgcacaactcggcattagaagcacgacgactatacgatgagcgcctccgtgcatacggaaaggaccccgcagacgacctattatatgagtacagacaaggcaacgtaccaaataacttcgttcgtgagctagacgtcataatcaaacggctcaccggccttcaccacgtccaaagaaaggtctacgatcaactattggagctgcattcggaaggagcccgccgacagggtgactatgtgactgcgaaagtacaagagcagaacgcgctggagcgattcgtgttggaggaggtcaagcgtgtcgaagctgagagtgagcgtcgcctattagggatcggatgtggtagcagttacatcttgagacgcaagcagaagatactcgatgaagaggaaaggagacggaatgggtacgagtcgtcttgtgttatcgtcccgattgcgctgggcgctatgggtacgctgtgtttcctggcgaatcttatttttcgtcagtag

SEQ ID NO: 21059 - protein, 199 aa, Muscodor strobelii
  misc_feature: SGI Peptide ID NO. 567120
MLGFFSNRPPLIESQLMNIRQRIRRNKSTLRHFHRVHNSALEARRLYDERLRAYGKDPADDLLYEYRQGNVPNNFVRELDVIIKRLTGLHHVQRKVYDQLLELHSEGARRQGDYVTAKVQEQNALERFVLEEVKRVEAESERRLLGIGCGSSYILRRKQKILDEEERRRNGYESSCVIVPIALGAMGTLCFLANLIFRQ

SEQ ID NO: 21060 - DNA, 799 bp, Muscodor strobelii
  misc_feature: SGI EST ID NO. CUFF.49441.0
  misc_feature: Variant of the nucleotide sequence at SEQ ID NO 21058
agaaaggtctacgatcaactattggagctgcattcggaaggagcccgccgacagggtgactatgtgactgcgaaagtacaagagcagaacgcgctggagcgattcgtgttggaggaggtcaagcgtgtcgaagctgagagtgagcgtcgcctattagggatcggatgtggtagcagttacatcttgagacgcaagcagaagatactcgatgaagaggaaaggagacggaatgggtacgagtcgtcttgtgttatcgtcccgattgcgctgggcgctatgggtacgctgtgtttcctggcgaatcttatttttcgtcagtagactgtttatcactaagatggacgacttcctgccttcggggagggtagcttcatccactttcacagcaacttatcttgttcagcatcactccgcatcattatcaccccgtacgatccaattggttgctcatctacccttagaccaacatttccatacataccccgggcagaactatattaggtggaaaacatctgcctggacttccacagaagctgtgtaaccaactcgttcaaatcaaaaacagctggatttactctagaaggaaaggcgtaactattgacaagaatccgtatacgtaaaacaatccattttatccacgcatataatatcaccctttagtcaagtcgttgcgcaaacttcagctccatcttctcagagacatcgaaaaccgcaacaatctcctgcatgaacgtgtcacccaagataaatgatcccggctgtcccgctccaatccctgagatacaacgcccagagccgc

SEQ ID NO: 21061 - DNA, 1329 bp, Muscodor strobelii
  misc_feature: SGI cDNA ID NO. 567121
  misc_feature: Encodes the peptide sequence at SEQ ID NO 21062
atgcctcgtctaacctcctatgctctgttgagcactctagcattcactcttgctaccgcggtaccagtagaaatcaatcacttactagaaactcaacgtcatgcagcgaaagctggtctggccattacggacaacttccaccccttaactaggatccggagagagccaggagtttcacgaacaatagacattcttcgccaaaagtatcgaaagatacatagaaacaatgctagccctgaagatgatccgattggtatcgatcacattattgcacaacaaaaccagatcgagtacatcatgcaagtcggcattggtaatgaaacgtactacatgatacccgatacgggaagcagcgacacatggatcgtccaagaaggattccattgtatagatccattctttgctcaggaggttccgccggaagactgccagtttggtcctgtgttcaagggacctttccctgatgggaagatcgataacgagaatctgaatattgcgtatttgagcggtgattatctgacgggcagtatgggatatgcgaacatcacggtggcgaacataacagtgcccaaacagcaattcgcattagtagacatggcagctttcaccggtgaccagatctcgagcggaatccttggtttggggctgcgaggtttgacagcagcgttcacgggaaataacccatcgaatgacagcatctccaatatgttgaactacgcgcctctcatggaaaccatgggaacgagcaaagctgcgagtccggttctcagcttcgccatgtcacgcgatgatgagagatctttcattgcgtttggtggtgttccgcctgtcaaggctggagagtacacttcggttcctattgaaaagggtactctatatgataataaaacagactattattactacgacatcaaaatcgacgcaatatcatggaacagcaagaccgctaacaaatcagtttcgaatttgccacatatgctagtagactccggaacgacaatcaaccttttcccgtccgaaatcgcaacggccatcaacgctgcttattcgcctcccggacaacaggaaacaaccgaagtctggactgttccgtgtaattctacaccgccggtgcttgatattgttatcggtggaaagccaatccggactcatccgacctctatgatccttccccagacagaggatggcggctctgggcgttgtatctcagggattggagcgggacagccgggatcatttatcttgggtgacacgttcatgcaggagattgttgcggttttcgatgtctctgagaagatggagctgaagtttgcgcaacgacttgactaa

SEQ ID NO: 21062 - protein, 442 aa, Muscodor strobelii
  misc_feature: SGI Peptide ID NO. 567121
  misc_feature (97)..(440): Pfam Id: PF00026 Pfam Desc: Eukaryotic aspartyl protease
  misc_feature (299)..(440): Pfam Id: PF00026 Pfam Desc: Eukaryotic aspartyl protease
  misc_feature (159)..(221): Pfam Id: PF00026 Pfam Desc: Eukaryotic aspartyl protease
  misc_feature (85)..(438): NCBI GI: 159128420 Blast Desc: aspartic-type endopeptidase, [Aspergillus fumigatus A1163]
  misc_feature (85)..(438): NCBI GI: 146323147 Blast Desc: aspartic-type endopeptidase [Aspergillus fumigatus Af293] gi|129556488|gb|EAL86405.2| aspartic-type endopeptidase, [Aspergillus fumigatus Af293]
  misc_feature (85)..(438): NCBI GI: 119473775 Blast Desc: aspartic-type endopeptidase, [Neosartorya fischeri NRRL 181] gi|119406916|gb|EAW16866.1| aspartic-type endopeptidase, [Neosartorya fischeri NRRL 181]
  misc_feature (97)..(440): NCBI GI: 145246316 Blast Desc: An12g03300 [Aspergillus niger] gi|134080122|emb|CAK46103.1| protein product [Aspergillus niger]
  misc_feature (97)..(442): NCBI GI: 212538193 Blast Desc: aspartic-type endopeptidase, [Penicillium marneffei ATCC 18224] gi|210068994|gb|EEA23085.1| aspartic-type endopeptidase, [Penicillium marneffei ATCC 18224]
  misc_feature (97)..(440): NCBI GI: 154320644 Blast Desc: BC1G_01794 [Botryotinia fuckeliana B05.10] gi|150853483|gb|EDN28675.1| BC1G_01794 [Botryotinia fuckeliana B05.10]
  misc_feature (97)..(440): NCBI GI: 119887994 Blast Desc: PEPAc [Aspergillus niger]
  misc_feature (97)..(440): NCBI GI: 39748721 Blast Desc: aspartic proteinase precursor [Botryotinia fuckeliana]
  misc_feature (18)..(421): NCBI GI: 145607181 Blast Desc: MGG_04048 [Magnaporthe grisea 70-15] gi|145014773|gb|EDJ99341.1| MGG_04048 [Magnaporthe grisea 70-15]
  misc_feature (54)..(440): NCBI GI: 154322405 Blast Desc: BC1G_00545 [Botryotinia fuckeliana B05.10] gi|150847879|gb|EDN23072.1| BC1G_00545 [Botryotinia fuckeliana B05.10]
  misc_feature (39)..(430): SWISSPROT Homolog: EC 3.4.23.3 Gastricsin
MPRLTSYALLSTLAFTLATAVPVEINHLLETQRHAAKAGLAITDNFHPLTRIRREPGVSRTIDILRQKYRKIHRNNASPEDDPIGIDHIIAQQNQIEYIMQVGIGNETYYMIPDTGSSDTWIVQEGFHCIDPFFAQEVPPEDCQFGPVFKGPFPDGKIDNENLNIAYLSGDYLTGSMGYANITVANITVPKQQFALVDMAAFTGDQISSGILGLGLRGLTAAFTGNNPSNDSISNMLNYAPLMETMGTSKAASPVLSFAMSRDDERSFIAFGGVPPVKAGEYTSVPIEKGTLYDNKTDYYYYDIKIDAISWNSKTANKSVSNLPHMLVDSGTTINLFPSEIATAINAAYSPPGQQETTEVWTVPCNSTPPVLDIVIGGKPIRTHPTSMILPQTEDGGSGRCISGIGAGQPGSFILGDTFMQEIVAVFDVSEKMELKFAQRLD

SEQ ID NO: 21063 - DNA, 735 bp, Muscodor strobelii
  misc_feature: SGI cDNA ID NO. 567122
  misc_feature: Encodes the peptide sequence at SEQ ID NO 21064
atggcagctttcaccggtgaccagatctcgagcggaatccttggtttggggctgcgaggtttgacagcagcgttcacgggaaataacccatcgaatgacagcatctccaatatgttgaactacgcgcctctcatggaaaccatgggaacgagcaaagctgcgagtccggttctcagcttcgccatgtcacgcgatgatgagagatctttcattgcgtttggtggtgttccgcctgtcaaggctggagagtacacttcggttcctattgaaaagggtactctatatgataataaaacagactattattactacgacatcaaaatcgacgcaatatcatggaacagcaagaccgctaacaaatcagtttcgaatttgccacatatgctagtagactccggaacgacaatcaaccttttcccgtccgaaatcgcaacggccatcaacgctgcttattcgcctcccggacaacaggaaacaaccgaagtctggactgttccgtgtaattctacaccgccggtgcttgatattgttatcggtggaaagccaatccggactcatccgacctctatgatccttccccagacagaggatggcggctctgggcgttgtatctcagggattggagcgggacagccgggatcatttatcttgggtgacacgttcatgcaggagattgttgcggttttcgatgtctctgagaagatggagctgaagtttgcgcaacgacttgactaa

SEQ ID NO: 21064 - protein, 244 aa, Muscodor strobelii
  misc_feature: SGI Peptide ID NO. 567122
  misc_feature (1)..(242): Pfam Id: PF00026 Pfam Desc: Eukaryotic aspartyl protease
  misc_feature (101)..(242): Pfam Id: PF00026 Pfam Desc: Eukaryotic aspartyl protease
  misc_feature (2)..(240): NCBI GI: 159128420 Blast Desc: aspartic-type endopeptidase, [Aspergillus fumigatus A1163]
  misc_feature (2)..(242): NCBI GI: 154320644 Blast Desc: BC1G_01794 [Botryotinia fuckeliana B05.10] gi|150853483|gb|EDN28675.1| BC1G_01794 [Botryotinia fuckeliana B05.10]
  misc_feature (2)..(240): NCBI GI: 146323147 Blast Desc: aspartic-type endopeptidase [Aspergillus fumigatus Af293] gi|129556488|gb|EAL86405.2| aspartic-type endopeptidase, [Aspergillus fumigatus Af293]
  misc_feature (2)..(242): NCBI GI: 145246316 Blast Desc: An12g03300 [Aspergillus niger] gi|134080122|emb|CAK46103.1| protein product [Aspergillus niger]
  misc_feature (2)..(242): NCBI GI: 39748721 Blast Desc: aspartic proteinase precursor [Botryotinia fuckeliana]
  misc_feature (2)..(240): NCBI GI: 119473775 Blast Desc: aspartic-type endopeptidase, [Neosartorya fischeri NRRL 181] gi|119406916|gb|EAW16866.1| aspartic-type endopeptidase, [Neosartorya fischeri NRRL 181]
  misc_feature (2)..(242): NCBI GI: 119887994 Blast Desc: PEPAc [Aspergillus niger]
  misc_feature (2)..(244): NCBI GI: 212538193 Blast Desc: aspartic-type endopeptidase, [Penicillium marneffei ATCC 18224] gi|210068994|gb|EEA23085.1| aspartic-type endopeptidase, [Penicillium marneffei ATCC 18224]
  misc_feature (2)..(242): NCBI GI: 154322405 Blast Desc: BC1G_00545 [Botryotinia fuckeliana B05.10] gi|150847879|gb|EDN23072.1| BC1G_00545 [Botryotinia fuckeliana B05.10]
  misc_feature (6)..(244): NCBI GI: 242807275 Blast Desc: aspartic-type endopeptidase, [Talaromyces stipitatus ATCC 10500] gi|218715546|gb|EED14968.1| aspartic-type endopeptidase, [Talaromyces stipitatus ATCC 10500]
MAAFTGDQISSGILGLGLRGLTAAFTGNNPSNDSISNMLNYAPLMETMGTSKAASPVLSFAMSRDDERSFIAFGGVPPVKAGEYTSVPIEKGTLYDNKTDYYYYDIKIDAISWNSKTANKSVSNLPHMLVDSGTTINLFPSEIATAINAAYSPPGQQETTEVWTVPCNSTPPVLDIVIGGKPIRTHPTSMILPQTEDGGSGRCISGIGAGQPGSFILGDTFMQEIVAVFDVSEKMELKFAQRLD

SEQ ID NO: 21065 - DNA, 1023 bp, Muscodor strobelii
  misc_feature: SGI cDNA ID NO. 567123
  misc_feature: Reduced expression when VOC is produced
  misc_feature: Encodes the peptide sequence at SEQ ID NO 21066
atgccgccctcatcaacaacggcgcatgcacgctcgcacgcgcttttgttggctcaaaaactcctcaacctacgagacagcgcaagccccttgacacttgtcctcgatacgcttgagcagagcggaaagcccatccttcgggaatttatgaatcgggcagctatatcaaaaagcaagataatatacatatcctatgccacgctaaagagtccacctcatgcttcaactttcatccgagcaagagggaaatcgcccgagtccctacgttcagaaatcacatctcattaccctcaaggccatgcaaccaaaaccctcctaataatcgacgagctcaacactctcgccgcctctttaccaaacgacataacactcttcctaacctcactcataacatcaccatccatctctctcataaccctctaccacgccgacatcccactctcccttcccccaagcaccatgtacacaccccaccccctaacagtcctcacccacttcgcaaccgccgttctccggaccacgaatctatctcacaccatctcacgccaacgagctctaaacaggagccaaccggaacccgaattcgggctagacgaggggaaagaaggcatcctgatcggtctcagaaataacaacacgagagacgagctatcatcaggcctagttctagaaatggagctccgccgtcgcagtggccgatccgtggccgaaaagttcattctcatcccaccacccctcaccaccactttactaaatgctacacccacaaaggcagatatcgcaaaattatatctcctctcagaccatccagtctaccagaccaccgatcccggggcggaaggcgaagaagaaccagagtcgacgtttaacttgagtcttactgagaagcaaaggcgtgatagagagggaatcgttttaccgtatttcgatgctcagactgatgtgggcgcgggtgagggggggagaatcttgtatgagatggggagggaagatgattttgatgaggaggaggatgagatataa

SEQ ID NO: 21066 - protein, 340 aa, Muscodor strobelii
  misc_feature: SGI Peptide ID NO. 567123
  misc_feature (1)..(329): NCBI GI: 46121697 Blast Desc: FG05227.1 [Gibberella zeae PH-1]
  misc_feature (1)..(329): NCBI GI: 256731109 Blast Desc: [Nectria haematococca mpVI 77-13-4]
  misc_feature (1)..(329): NCBI GI: 85100035 Blast Desc: NCU06706 [Neurospora crassa OR74A] gi|28922417|gb|EAA31650.1| conserved [Neurospora crassa OR74A] gi|28949946|emb|CAD70932.1| related to protein conferring to
  misc_feature (11)..(328): NCBI GI: 156048000 Blast Desc: SS1G_08731 [Sclerotinia sclerotiorum 1980] gi|154693128|gb|EDN92866.1| SS1G_08731 [Sclerotinia sclerotiorum 1980]
  misc_feature (11)..(328): NCBI GI: 154305928 Blast Desc: BC1G_08195 [Botryotinia fuckeliana B05.10] gi|150853080|gb|EDN28272.1| BC1G_08195 [Botryotinia fuckeliana B05.10]
  misc_feature (3)..(329): NCBI GI: 226277988 Blast Desc: conserved [Paracoccidioides brasiliensis Pb01]
  misc_feature (73)..(329): NCBI GI: 145607179 Blast Desc: MGG_04047 [Magnaporthe grisea 70-15] gi|145014772|gb|EDJ99340.1| MGG_04047 [Magnaporthe grisea 70-15]
  misc_feature (1)..(328): NCBI GI: 239614600 Blast Desc: killer toxin sensitivity protein [Ajellomyces dermatitidis ER-3]
  misc_feature (8)..(328): NCBI GI: 115386376 Blast Desc: conserved [Aspergillus terreus NIH2624] gi|114190727|gb|EAU32427.1| conserved [Aspergillus terreus NIH2624]
  misc_feature (1)..(328): NCBI GI: 119173453 Blast Desc: CIMG_10196 [Coccidioides immitis RS]
  misc_feature: Useful for introducing or modulating the production of volatile compounds
MPPSSTTAHARSHALLLAQKLLNLRDSASPLTLVLDTLEQSGKPILREFMNRAAISKSKIIYISYATLKSPPHASTFIRARGKSPESLRSEITSHYPQGHATKTLLIIDELNTLAASLPNDITLFLTSLITSPSISLITLYHADIPLSLPPSTMYTPHPLTVLTHFATAVLRTTNLSHTISRQRALNRSQPEPEFGLDEGKEGILIGLRNNNTRDELSSGLVLEMELRRRSGRSVAEKFILIPPPLTTTLLNATPTKADIAKLYLLSDHPVYQTTDPGAEGEEEPESTFNLSLTEKQRRDREGIVLPYFDAQTDVGAGEGGRILYEMGREDDFDEEEDEI

SEQ ID NO: 21067 - DNA, 2303 bp, Muscodor strobelii
  misc_feature: SGI EST ID NO. CUFF.50017.0
  misc_feature: Variant of the nucleotide sequence at SEQ ID NO 21065
aaaaagcaagataatatacatatcctatgccacgctaaagagtccacctcatgcttcaactttcatccgagcaagagggaaatcgcccgagtccctacgttcagaaatcacatctcattaccctcaaggccatgcaaccaaaaccctcctaataatcgacgagctcaacactctcgccgcctctttaccaaacgacataacactcttcctaacctcactcataacatcaccatccatctctctcataaccctctaccacgccgacatcccactctcccttcccccaagcaccatgtacacaccccaccccctaacagtcctcacccacttcgcaaccgccgttctccggaccacgaatctatctcacaccatctcacgccaacgagctctaaacaggagccaaccggaacccgaattcgggctagacgaggggaaagaaggcatcctgatcggtctcagaaataacaacacgagagacgagctatcatcaggcctagttctagaaatggagctccgccgtcgcagtggccgatccgtggccgaaaagttcattctcatcccaccacccctcaccaccactttactaaatgctacacccacaaaggcagatatcgcaaaattatatctcctctcagaccatccagtctaccagaccaccgatcccggggcggaaggcgaagaagaaccagagtcgacgtttaacttgagtcttactgagaagcaaaggcgtgatagagagggaatcgttttaccgtatttcgatgctcagactgatgtgggcgcgggtgagggggggagaatcttgtatgagatggggagggaagatgattttgatgaggaggaggatgagatataaagtattacgctaatgatattaggatcacatttgcaatatctcggcacgtggtgacttgatcgattagagggtacatctttatcttcgtagagcatctacccctattgtacaactttttttttgtaaatcgttgcgtttcgtctcaagatcacgattggaagaacgcaccccagctgtctatctatcatagcaatcgtactttgcgatagctatgtataataacgcagatgcctaattctttccatgacataggcataatacggtctaggcgggacttcttgttgaatcgttttgtcgaattgttcctgctcctcgaggaacttcgtgaactcgtcatcccatcgttcattctataagtcaacaaactccgagtcctaatcgtcatcagatattgagtcctactcatcaaccgccatgccctcattctcgcctccctctccctcttcggcagccaggctattgatccagtccttgacctcagcaccatcgtggaccttgaatgcctctagatccctcttgccctcctccttcaggccgactacacccacactcgtgttatcgaccgtcagttccttatcctggacaagtgtctccctcagggccttcagtccgtgctcgatcaactgctcgcggtcgcagtctgggaatttgtcgaggttcttctcgaggtatgtgcgggccatctgggagcgggcaccgatggcgcaggcgagcatctcttgcgtcagaccggagggctggaattcgaacaagtgcgggccggagtcgtcgatgccggccacgaggagaccgacaccgtatggccgcttgccgtagtgctgtgtgttgagctgtgctttgtcgccgatgagggagacgagggtctcgaggggcatggcgcggtcgtaggtgaggcgttgggacaggcattgctgcttcatgaagttggagaggacacgagcgtcggatgtgagaccggcaatagcgagaccgacatgctcgtctacagcgaatagcttcttttggtaggatgatagttcttcggcatttctctggaggaaaggtcagaggggcgttgggagggaacaaggtgggggtctggtggtttaccttgatggcaaccaggacggcatgtgtcttgcttgtcaggcccacgacgactgagccttgcttaacggcctcggcagcatattccacctggaatattcttccctgcggagagctggaaaaagtgtaagtacgggcagacacgaggtacctctggtgtgtgctcacaatgtgacggagtcgttgtcgtagttgtttctgaacattgtgacgatatgatcagatcaagtacgacggcaggagagtaaaatatacggtgtgttgtatgtgttaggagggagagaaaagaagtgttgttgcggatcggcggtaggtggtgggatgtttgtatgacggatgttcagaagtggtggacggttac

SEQ ID NO: 21068 - DNA, 783 bp, Muscodor strobelii
  misc_feature: SGI cDNA ID NO. 567124
  misc_feature: Encodes the peptide sequence at SEQ ID NO 21069
atgttcagaaacaactacgacaacgactccgtcacattctctccgcagggaagaatattccaggtggaatatgctgccgaggccgttaagcaaggctcagtcgtcgtgggcctgacaagcaagacacatgccgtcctggttgccatcaagagaaatgccgaagaactatcatcctaccaaaagaagctattcgctgtagacgagcatgtcggtctcgctattgccggtctcacatccgacgctcgtgtcctctccaacttcatgaagcagcaatgcctgtcccaacgcctcacctacgaccgcgccatgcccctcgagaccctcgtctccctcatcggcgacaaagcacagctcaacacacagcactacggcaagcggccatacggtgtcggtctcctcgtggccggcatcgacgactccggcccgcacttgttcgaattccagccctccggtctgacgcaagagatgctcgcctgcgccatcggtgcccgctcccagatggcccgcacatacctcgagaagaacctcgacaaattcccagactgcgaccgcgagcagttgatcgagcacggactgaaggccctgagggagacacttgtccaggataaggaactgacggtcgataacacgagtgtgggtgtagtcggcctgaaggaggagggcaagagggatctagaggcattcaaggtccacgatggtgctgaggtcaaggactggatcaatagcctggctgccgaagagggagagggaggcgagaatgagggcatggcggttgatgagtag

SEQ ID NO: 21069 - protein, 260 aa, Muscodor strobelii
  misc_feature: SGI Peptide ID NO. 567124
  misc_feature (29)..(215): Pfam Id: PF00227 Pfam Desc: Proteasome A-type and B-type
  misc_feature (1)..(253): NCBI GI: 39944084 Blast Desc: MGG_04053 [Magnaporthe grisea 70-15] gi|145014779|gb|EDJ99347.1| MGG_04053 [Magnaporthe grisea 70-15]
  misc_feature (1)..(259): NCBI GI: 116199241 Blast Desc: conserved [Chaetomium globosum CBS 148.51] gi|88179055|gb|EAQ86523.1| conserved [Chaetomium globosum CBS 148.51]
  misc_feature (1)..(244): NCBI GI: 156048056 Blast Desc: SS1G_08759 [Sclerotinia sclerotiorum 1980] gi|154693156|gb|EDN92894.1| SS1G_08759 [Sclerotinia sclerotiorum 1980]
  misc_feature (1)..(260): NCBI GI: 171692803 Blast Desc: protein product [Podospora anserina] gi|170946350|emb|CAP73151.1| protein product [Podospora anserina]
  misc_feature (1)..(243): NCBI GI: 225877968 Blast Desc: proteasome subunit alpha [Gibberella fujikuroi]
  misc_feature (1)..(257): NCBI GI: 46121687 Blast Desc: FG05222.1 [Gibberella zeae PH-1]
  misc_feature (1)..(242): NCBI GI: 256731507 Blast Desc: [Nectria haematococca mpVI 77-13-4]
  misc_feature (1)..(244): NCBI GI: 85100060 Blast Desc: proteasome component PRE5 [Neurospora crassa OR74A] gi|28922423|gb|EAA31656.1| proteasome component PRE5 [Neurospora crassa OR74A] gi|28949952|emb|CAD70938.1| PROTEASOME COMPONENT C2
  misc_feature (1)..(245): NCBI GI: 261351566 Blast Desc: proteasome subunit alpha type-1 [Verticillium albo-atrum VaMs.102]
  misc_feature (1)..(259): NCBI GI: 70984160 Blast Desc: proteasome component Pre5 [Aspergillus fumigatus Af293] gi|66845226|gb|EAL85561.1| proteasome component Pre5, [Aspergillus fumigatus Af293] gi|159122385|gb|EDP47506.1| Pre5,
  misc_feature (1)..(243): SWISSPROT Homolog: EC 3.4.25.1 Proteasome endopeptidase complex
MFRNNYDNDSVTFSPQGRIFQVEYAAEAVKQGSVVVGLTSKTHAVLVAIKRNAEELSSYQKKLFAVDEHVGLAIAGLTSDARVLSNFMKQQCLSQRLTYDRAMPLETLVSLIGDKAQLNTQHYGKRPYGVGLLVAGIDDSGPHLFEFQPSGLTQEMLACAIGARSQMARTYLEKNLDKFPDCDREQLIEHGLKALRETLVQDKELTVDNTSVGVVGLKEEGKRDLEAFKVHDGAEVKDWINSLAAEEGEGGENEGMAVDE

SEQ ID NO: 21070 - DNA, 2216 bp, Muscodor strobelii
  misc_feature: SGI EST ID NO. CUFF.50018.1
  misc_feature: Variant of the nucleotide sequence at SEQ ID NO 21068
gtaaccgtccaccacttctgaacatccgtcatacaaacatcccaccacctaccgccgatccgcaacaacacttcttttctctccctcctaacacatacaacacaccgtatattttactctcctgccgtcgtacttgatctgatcatatcgtcacaatgttcagaaacaactacgacaacgactccgtcacattctctccgcagggaagaatattccaggtggaatatgctgccgaggccgttaagcaaggctcagtcgtcgtgggcctgacaagcaagacacatgccgtcctggttgccatcaagagaaatgccgaagaactatcatcctaccaaaagaagctattcgctgtagacgagcatgtcggtctcgctattgccggtctcacatccgacgctcgtgtcctctccaacttcatgaagcagcaatgcctgtcccaacgcctcacctacgaccgcgccatgcccctcgagaccctcgtctccctcatcggcgacaaagcacagctcaacacacagcactacggcaagcggccatacggtgtcggtctcctcgtggccggcatcgacgactccggcccgcacttgttcgaattccagccctccggtctgacgcaagagatgctcgcctgcgccatcggtgcccgctcccagatggcccgcacatacctcgagaagaacctcgacaaattcccagactgcgaccgcgagcagttgatcgagcacggactgaaggccctgagggagacacttgtccaggataaggaactgacggtcgataacacgagtgtgggtgtagtcggcctgaaggaggagggcaagagggatctagaggcattcaaggtccacgatggtgctgaggtcaaggactggatcaatagcctggctgccgaagagggagagggaggcgagaatgagggcatggcggttgatgagtaggactcaatatctgatgacgattaggactcggagtttgttgacttatagaatgaacgatgggatgacgagttcacgaagttcctcgaggagcaggaacaattcgacaaaacgattcaacaagaagtcccgcctagaccgtattatgcctatgtcatggaaagaattaggcatctgcgttattatacatagctatcgcaaagtacgattgctatgatagatagacagctggggtgcgttcttccaatcgtgatcttgagacgaaacgcaacgatttacaaaaaaaaagttgtacaataggggtagatgctctacgaagataaagatgtaccctctaatcgatcaagtcaccacgtgccgagatattgcaaatgtgatcctaatatcattagcgtaatactttatatctcatcctcctcctcatcaaaatcatcttccctccccatctcatacaagattctccccccctcacccgcgcccacatcagtctgagcatcgaaatacggtaaaacgattccctctctatcacgcctttgcttctcagtaagactcaagttaaacgtcgactctggttcttcttcgccttccgccccgggatcggtggtctggtagactggatggtctgagaggagatataattttgcgatatctgcctttgtgggtgtagcatttagtaaagtggtggtgaggggtggtgggatgagaatgaacttttcggccacggatcggccactgcgacggcggagctccatttctagaactaggcctgatgatagctcgtctctcgtgttgttatttctgagaccgatcaggatgccttctttcccctcgtctagcccgaattcgggttccggttggctcctgtttagagctcgttggcgtgagatggtgtgagatagattcgtggtccggagaacggcggttgcgaagtgggtgaggactgttagggggtggggtgtgtacatggtgcttgggggaagggagagtgggatgtcggcgtggtagagggttatgagagagatggatggtgatgttatgagtgaggttaggaagagtgttatgtcgtttggtaaagaggcggcgagagtgttgagctcgtcgattattaggagggtttctgggtttggttaatatggtgagaagatgggacggtttggtgagtgaaggtgagacttactggttgcatggccttgagggtaatgagatgtgatttctgaacgtagggactcgggcgatttccctcttgctcggatgaaagttgaagcatgaggtggactcttt

SEQ ID NO: 21071 - DNA, 390 bp, Muscodor strobelii
  misc_feature: SGI cDNA ID NO. 567125
  misc_feature: Encodes the peptide sequence at SEQ ID NO 21072
atgccaaccgccggcctaaaaacaataatcgcactatccttcgtactagccgtcggcttcctactcgtcatcttatcctgcgcgctatggaaagcctactacccgctgctcgtcgtcgccacatacgtgatcgcgcccctgccgaacttcatatgcggtcgcgtttcgaacccagatgatttcgtcgagagctcaggaaatgccgtcttagacctgggccgcttttgcacgggattcttggtcgttatgggaattgcactgccaattctcctcgcacattccggcttgatggaggtacccgcaatgataatgtgcatcgctggcggtctgcttatctacggcaccatcatcagcttcggcatgttcttccaggaagagcaggagttttaa

SEQ ID NO: 21072 - protein, 129 aa, Muscodor strobelii
  misc_feature: SGI Peptide ID NO. 567125
  misc_feature (9)..(129): Pfam Id: PF04133 Pfam Desc: Vacuolar protein sorting 55
  misc_feature (1)..(129): NCBI GI: 116199243 Blast Desc: CHGG_07777 [Chaetomium globosum CBS 148.51] gi|88179056|gb|EAQ86524.1| CHGG_07777 [Chaetomium globosum CBS 148.51]
  misc_feature (3)..(129): NCBI GI: 46121631 Blast Desc: FG05194.1 [Gibberella zeae PH-1]
  misc_feature (4)..(129): NCBI GI: 85100064 Blast Desc: NCU06713 [Neurospora crassa OR74A] gi|28922424|gb|EAA31657.1| NCU06713 [Neurospora crassa OR74A] gi|28949953|emb|CAD70939.1| conserved [Neurospora crassa]
  misc_feature (1)..(129): NCBI GI: 171692801 Blast Desc: protein product [Podospora anserina] gi|170946349|emb|CAP73150.1| protein product [Podospora anserina]
  misc_feature (1)..(129): NCBI GI: 39944086 Blast Desc: conserved [Magnaporthe grisea 70-15] gi|145014780|gb|EDJ99348.1| conserved [Magnaporthe grisea 70-15]
  misc_feature (4)..(129): NCBI GI: 261191021 Blast Desc: vacuolar protein sorting 55 superfamily [Ajellomyces dermatitidis SLH14081] gi|239590963|gb|EEQ73544.1| vacuolar protein sorting 55 superfamily [Ajellomyces dermatitidis vacuolar
  misc_feature (3)..(129): NCBI GI: 154272505 Blast Desc: conserved [Ajellomyces capsulatus NAm1] gi|150409092|gb|EDN04548.1| conserved [Ajellomyces capsulatus NAm1]
  misc_feature (3)..(129): NCBI GI: 115386228 Blast Desc: conserved [Aspergillus terreus NIH2624] gi|114190653|gb|EAU32353.1| conserved [Aspergillus terreus NIH2624]
  misc_feature (3)..(129): NCBI GI: 67540752 Blast Desc: AN6546.2 [Aspergillus nidulans FGSC A4] gi|40738696|gb|EAA57886.1| AN6546.2 [Aspergillus nidulans FGSC A4] gi|259480119|tpe|CBF70960.1| TPA: Vacuolar protein sorting 55
  misc_feature (4)..(129): NCBI GI: 225678500 Blast Desc: conserved [Paracoccidioides brasiliensis Pb03] gi|226294792|gb|EEH50212.1| vacuolar protein sorting 55 superfamily protein [Paracoccidioides brasiliensis Pb18]
MPTAGLKTIIALSFVLAVGFLLVILSCALWKAYYPLLVVATYVIAPLPNFICGRVSNPDDFVESSGNAVLDLGRFCTGFLVVMGIALPILLAHSGLMEVPAMIMCIAGGLLIYGTIISFGMFFQEEQEF

SEQ ID NO: 21073 - DNA, 1140 bp, Muscodor strobelii
  misc_feature: SGI EST ID NO. CUFF.50111.0
  misc_feature: Variant of the nucleotide sequence at SEQ ID NO 21071
ttctgttcggcactattctaagatgattgattcatggttaatatgactttccggcttggtctaaatacatgagatgcgaggtgaagaataatcgggcaataatggaaatagctactttccttctaccccaccagcctttaggccgcatgagccactgctccgacctccgacttgtggctcaagctctctccagccgacctgctcagcgacctgaccggtcaccttagctcactaccttagcgacccaagcctcgtcaaccctcgccaggtacaacgacggtagccttacgacatcatcacacgacaaactgcaactcttccaatccacatcaaccacgtaacgaccgccgatctcgatatctcatctctcgatcttgatttccggtcgtgggaccatcagcgcagctgccttcaacttccgacgacaacccagccaactcctcacaacaccgtcaaaccatcgcccacgatgccaaccgccggcctaaaaacaataatcgcactatccttcgtactagccgtcggcttcctactcgtcatcttatcctgcgcgctatggaaagcctactacccgctgctcgtcgtcgccacatacgtgatcgcgcccctgccgaacttcatatgcggtcgcgtttcgaacccagatgatttcgtcgagagctcaggaaatgccgtcttagacctgggccgcttttgcacgggattcttggtcgttatgggaattgcactgccaattctcctcgcacattccggcttgatggaggtacccgcaatgataatgtgcatcgctggcggtctgcttatctacggcaccatcatcagcttcggcatgttcttccaggaagagcaggagttttaattccagattttcaatattatttttgtttggcgtacagcattcttccaccatccacatttgtctatacagttgagctggagaggagtggcagatcggaacctggaatatgatggagggcatgattctggagtcggccggaggtattctacttgtactaaatctgtatgcagttttaagcagatgaaaagacacaaaatgagataattctccatggacgaatgtttgaactgcaagacctggtgtccctctatgttacaaacggacggaggccatgatcacac

SEQ ID NO: 21074 - DNA, 570 bp, Muscodor strobelii
  misc_feature: SGI cDNA ID NO. 567126
  misc_feature: Encodes the peptide sequence at SEQ ID NO 21075
atgaaggcctcgccgtcatatattttttttgttgcttcactggcatgtcttgcgacagcagcggtaccagctgccagagacaccgatgctgagtacgaagattaccagcagcgagtccgcgcactacccgtgcataaaaggggctactttcacctagccgacgacggtgtggctcgctcactgggtccaaacaacgaggttttgggattcgtcgcagcatctcctaaagtcctcgctcgcgtgattgccgaggcgtcagaggcaaacaaagcctatcttcaaaacgtgtggcaaggtgttgatggccgtgacgtcgctgacccgtgggttatcaagcgcgaacacatcaccaatgctcgcgatacaggcagcacggaacgccgcgatgttcttgatcaggctgatatcgtgctcagaagcctatcgacaccgctctggaagcgggattgtagcactgctggggatgtttgtaagagttcaaatgactgtattgatccgaacgtgcccgaagatcgatgttattgttggttccaggataagatgttagtaggggcgtgtgcagctgtttga

SEQ ID NO: 21075 - protein, 189 aa, Muscodor strobelii
  misc_feature: SGI Peptide ID NO. 567126
  misc_feature (5)..(104): NCBI GI: 242778776 Blast Desc: TSTA_095930 [Talaromyces stipitatus ATCC 10500] gi|218722926|gb|EED22344.1| TSTA_095930 [Talaromyces stipitatus ATCC 10500]
  misc_feature (6)..(107): NCBI GI: 145234949 Blast Desc: An03g02250 [Aspergillus niger] gi|134057799|emb|CAK38194.1| protein product [Aspergillus niger]
  misc_feature (9)..(163): NCBI GI: 68565400 Blast Desc: An03g02250 [Aspergillus niger] gi|134057799|emb|CAK38194.1| protein product [Aspergillus niger]
  misc_feature (10)..(113): NCBI GI: 226280057 Blast Desc: [Paracoccidioides brasiliensis Pb01]
  misc_feature (5)..(129): NCBI GI: 212531333 Blast Desc: PMAA_063920 [Penicillium marneffei ATCC 18224] gi|210071187|gb|EEA25276.1| PMAA_063920 [Penicillium marneffei ATCC 18224]
  misc_feature (12)..(106): NCBI GI: 261205778 Blast Desc: conserved [Ajellomyces dermatitidis SLH14081] gi|239592685|gb|EEQ75266.1| conserved [Ajellomyces dermatitidis SLH14081]
  misc_feature (12)..(106): NCBI GI: 239611160 Blast Desc: conserved [Ajellomyces dermatitidis ER-3]
  misc_feature (7)..(107): NCBI GI: 119479949 Blast Desc: NFIA_080500 [Neosartorya fischeri NRRL 181] gi|119408157|gb|EAW18106.1| NFIA_080500 [Neosartorya fischeri NRRL 181]
  misc_feature (9)..(107): NCBI GI: 70983765 Blast Desc: AFUA_8G06070 [Aspergillus fumigatus Af293] gi|66845035|gb|EAL85371.1| AFUA_8G06070 [Aspergillus fumigatus Af293]
  misc_feature (9)..(107): NCBI GI: 159123585 Blast Desc: AFUB_081420 [Aspergillus fumigatus A1163]
MKASPSYIFFVASLACLATAAVPAARDTDAEYEDYQQRVRALPVHKRGYFHLADDGVARSLGPNNEVLGFVAASPKVLARVIAEASEANKAYLQNVWQGVDGRDVADPWVIKREHITNARDTGSTERRDVLDQADIVLRSLSTPLWKRDCSTAGDVCKSSNDCIDPNVPEDRCYCWFQDKMLVGACAAV

SEQ ID NO: 21076 - DNA, 2454 bp, Muscodor strobelii
  misc_feature: SGI cDNA ID NO. 567127
  misc_feature: Encodes the peptide sequence at SEQ ID NO 21077
atgacatcagacgcctcgccgggacgagctgcctcccctacaggcagtttctacgccatgagcgacgacgaagagggtgaatacaataccataacccatatgcagtccggccgcggcgtgaagctgctctactccaagagcaaggtctacattcatcccacaccgtctgcaaaagacaacataccgggctatatcgcccttttgcagcagaagagtcctgctggcgaacgacccacctcttcttcctccaacgcctctctatcgcctgcctcgtctgatctgctcctagcttggctcccggagtcttcgctgggtgatgcagccagcatatatgtgaaagtcgatctcaccgagggtgattctcccccgaaacaaagctatctcgtgccgcctcctccgactgtgaccacgcataaaggctcgatcggtcattacgcttttgctatccctgtgactgctatatattctttacaagtccgcccaccaagcctcgggtggtggttcggctcagtggtcatcaacacacgggccggcgatagctttcccgcactcttcttccacgacagcgaatgtcagtccactattctgcagaagaagaaacttgccagagagaacttcgacccttttggggaacatggccaagtctactggggaggcgacgaggtattgcgatggcttcgacgatatgtccgtgtcgagaggagcggggccgagcccacgtcttatttagttgagcctagcaaagaagatagtgaaggcttcggtgccaagggaggctccagcacgtcgtctgcgattggtcgacgtgatagttcgcgaggattatccatgaagggcgctgccggtgccgccccaggtggttctaaggacgcccacgatgcgggtatggatccagtgatgaagtttgtgaaagagacgggttggaatatcatggagaagttcagcaaagtgacgacgtttacgaggaagactgcacaagatatcatcgataatccaaaagttccgccacaggttaaacgactgatgggaaatccagaggtccagactattcagaatgaatttgacagtgcaaggatatatctcgctcgctgggcgatgggcatcgctgagcagagcgagaaagatcggactcagaggatatggactgcccgggacgtgctagagatggaagatacggatgtcggcgagtttgaacttctggagacaagttccatgtctctcgaggaaaggagaaatcctgtctcacttaaggaatggaatggattttttgattctcggaccgggagattgacaatgacgatcgacgaagtcaaggaaaggatgtttcatggaggcctaaatccagatgacggtgttcgcaaagaagcttggctatttctcctcggtgtgtacgattggtacagtacatcggaagagcgaagggcccagttggcatcgctaagggacgaatatgtcaagctcaaggcctcgtggtgggaaagactagtcgacctcggcggcgaaggagaagaaggggagtggtggcgcgagcaacgaggacgtatcgagaaagatgttcatcgaactgacagaacagttcccattttcgcgggtgaggatatacctcacccagaccccgactcacccttcgcggaagtaggcaccaacgtccacatggagcaaatgaaagacatgctcctcacttataatgagtacaacaaagatctaggctatgtccaaggcatgtccgacttactcgcacccatatacgccgtcatgcaagacgatgcgatagcattctgggggttccagcgatttatggagcgcatggagcgcaactttcttcgagatcaatccggcatgcggaatcaactcttgactctcgatcacctggtccaatttatggacccaaaactgtacgcccacctacagaaagcagatagcaccaacttcttctttttcttccgaatgttgctcgtatggtacaagagagagttcaagtggatggatgttctgcatctgtgggaagtcttgtggacagactacttgagtagttcgttccatttgttcattgcgctggcgatattggaaaaacatcgggatgtaatcatggcgcacctagaacattttgacgaagttctgaaatacgtcaacgagctatctaataccatagatcttgagtccacactcatccgcgccgaggtcttattccgcagattccaacgtctggtggaggcaatcgacaagaaacaaaatttccctgcgccgagaaaagcaacaacttcaagctcttctgatcaacctgctcaaggtaccacgccgcctcctctgcctcagcgagacaatgggaaggctccagagaagaagtcaataagcccagagctcagaaaactattaagtagaaatgttgagatactgccgaggaaggtcgtgcataggaagggcgatgggtttacggccgagtcaaaccagtaa

SEQ ID NO: 21077 - protein, 817 aa, Muscodor strobelii
  misc_feature: SGI Peptide ID NO. 567127
  misc_feature (496)..(699): Pfam Id: PF00566 Pfam Desc: TBC domain
  misc_feature (14)..(810): NCBI GI: 259480197 Blast Desc: TPA: GTPase activating protein (Gyp7), (AFU_orthologue; AFUA_6G03940) [Aspergillus nidulans FGSC A4]
  misc_feature (14)..(796): NCBI GI: 70984336 Blast Desc: GTPase activating protein (Gyp7) [Aspergillus fumigatus Af293] gi|66845310|gb|EAL85645.1| GTPase activating protein (Gyp7), [Aspergillus fumigatus Af293] GTPase activating
  misc_feature (12)..(810): NCBI GI: 225561017 Blast Desc: GTPase activating protein GYP7 [Ajellomyces capsulatus G186AR]
  misc_feature (14)..(810): NCBI GI: 67540896 Blast Desc: AN6618.2 [Aspergillus nidulans FGSC A4] gi|40738957|gb|EAA58147.1| AN6618.2 [Aspergillus nidulans FGSC A4]
  misc_feature (15)..(794): NCBI GI: 212526478 Blast Desc: GTPase activating protein (Gyp7), [Penicillium marneffei ATCC 18224] gi|210072794|gb|EEA26881.1| GTPase activating protein (Gyp7), [Penicillium marneffei ATCC 18224]
  misc_feature (14)..(796): NCBI GI: 119467586 Blast Desc: GTPase activating protein (Gyp7), [Neosartorya fischeri NRRL 181] gi|119405751|gb|EAW15702.1| GTPase activating protein (Gyp7), [Neosartorya fischeri NRRL 181]
  misc_feature (14)..(796): NCBI GI: 145250365 Blast Desc: An15g01560 [Aspergillus niger] gi|134082215|emb|CAL00970.1| protein product [Aspergillus niger]
  misc_feature (15)..(796): NCBI GI: 255946047 Blast Desc: Pc20g13090 [Penicillium chrysogenum Wisconsin 54-1255] gi|211588526|emb|CAP86638.1| Pc20g13090 [Penicillium chrysogenum Wisconsin 54-1255]
  misc_feature (15)..(801): NCBI GI: 240111811 Blast Desc: GTPase-activating protein GYP7, [Coccidioides posadasii C735 delta SOWgp]
  misc_feature (17)..(794): NCBI GI: 242781020 Blast Desc: GTPase activating protein (Gyp7), [Talaromyces stipitatus ATCC 10500] gi|218719863|gb|EED19282.1| GTPase activating protein (Gyp7), [Talaromyces stipitatus ATCC 10500]
MTSDASPGRAASPTGSFYAMSDDEEGEYNTITHMQSGRGVKLLYSKSKVYIHPTPSAKDNIPGYIALLQQKSPAGERPTSSSSNASLSPASSDLLLAWLPESSLGDAASIYVKVDLTEGDSPPKQSYLVPPPPTVTTHKGSIGHYAFAIPVTAIYSLQVRPPSLGWWFGSVVINTRAGDSFPALFFHDSECQSTILQKKKLARENFDPFGEHGQVYWGGDEVLRWLRRYVRVERSGAEPTSYLVEPSKEDSEGFGAKGGSSTSSAIGRRDSSRGLSMKGAAGAAPGGSKDAHDAGMDPVMKFVKETGWNIMEKFSKVTTFTRKTAQDIIDNPKVPPQVKRLMGNPEVQTIQNEFDSARIYLARWAMGIAEQSEKDRTQRIWTARDVLEMEDTDVGEFELLETSSMSLEERRNPVSLKEWNGFFDSRTGRLTMTIDEVKERMFHGGLNPDDGVRKEAWLFLLGVYDWYSTSEERRAQLASLRDEYVKLKASWWERLVDLGGEGEEGEWWREQRGRIEKDVHRTDRTVPIFAGEDIPHPDPDSPFAEVGTNVHMEQMKDMLLTYNEYNKDLGYVQGMSDLLAPIYAVMQDDAIAFWGFQRFMERMERNFLRDQSGMRNQLLTLDHLVQFMDPKLYAHLQKADSTNFFFFFRMLLVWYKREFKWMDVLHLWEVLWTDYLSSSFHLFIALAILEKHRDVIMAHLEHFDEVLKYVNELSNTIDLESTLIRAEVLFRRFQRLVEAIDKKQNFPAPRKATTSSSSDQPAQGTTPPPLPQRDNGKAPEKKSISPELRKLLSRNVEILPRKVVHRKGDGFTAESNQ

SEQ ID NO: 21078 - DNA, 5756 bp, Muscodor strobelii
  misc_feature: SGI EST ID NO. CUFF.50133.0
  misc_feature: Variant of the nucleotide sequence at SEQ ID NO 21076
tttactggcccaaattcatgattcatagagccaagcagcgtcttaccagacttcaacaagtcagcatccggatgcgacgactcgcgaaagaagaagccaggcttggggagaagatggtccctaaattggctccgaaagtccgaagacgtgaggagacgcgagagcgaaaagctgaggcagcagccaaattagaacgcgctatcgagagagagctacttggacgacttcgcgaaggtgcttacggcgaccagccactaaatgtcagcgaacaaatctggaagaaggtattgacagccatggagcgcgagggcgaagctaccagagacaaggacatggataccggcattgacgacgaggacgaagaggaaagagaagaagagttcgaaatggaagacgaagaagatgacggagcagtcgagtatgtctctgatttcgaggagagtgaagacggcgatgaccttgaagatctcgaggattggctcgacagcgacgaggcagaagaagactccgaatcagaggacagcgaagatgagagtgaggaagaggctactaagaagaaatccgcaatggccgataagaagcgaaaagcgccagcgaaaagcgcaagacctaggaagattgctcggcgtggacgggagattgaggaagagcacgagatggagcaccagagacctgagcttgctttctgagcgccagcacaacccggaacattgtagacaggaacacaaggccattttgataccctatatgcttcaaacatcattgataggagttggcatggaaaatggggatcacattcaaaacgagatatctctagctgtcgtaatctgatgtggctcgcctcatccgctgcttgaacccggctcttcgtcagatgcacagcacacttgacacgttcgttttgaaaagctagatccttcgtttacgtatcgttgtcccttgtggcgtctgtattgccacggtcgactactgtcttcatatttaccatcaagatttagtatcaatgattcctacgtgcctttgtgctgcgacctgctgggggcgattagcaggctgggcagtggaggtggtattttccccaccttagcgcaaccactgcctcccaactgcccagacttgagacagataccaaacattgaaaccttcctagcttctgcaacattcctctcaaccaactacgcacaatcagtgcccattgaattcgacacctaatcagggtttctagtcaactttcgccgacccgcaacaacgcagtccaagcgaccattcctgaacaagagcactcatccaagctcaagagctacgtgccttgtggcagggcgattcccctccccgaccgatagacgacgccatgtcgggctggtacagcaacatcacctccaaggtctccaatctccagcgctcctactttggcggcgaggcggacggcgacacagaagacgacacgcatgtctgtcgggtgctgcgcaattactacaccgagaaaggcaagccatttccaggatggctgccacccgacccaaaggcgcccccgcccgtgaccgccgtctactcgcaaccatcgcaagtcggctcgcgatacggagggatgacgcagcagccacaaggaggcagtttgagctcgctgtgggataacaacaaccccgtgtcacagccacaagatacgcagagtctacgaaggggaagaggcgtgccgccgccgatgcggaatagcgatgcaagaaacagcccgttccgtaactcggatccgatggctgggcaggacatgctacaagcgcggccgctcccgtcgcaacgagcgggcagttatcaaaacgcggggtcttacggaaatacaccgacaccccctgcatcgagtgggacgtcggcgcaagacagactcaaacagcgactttttggaggaaacagaactacaagcccggcaaacagtggcccgtaccaacccccaccgcagggcggtagcagaggaggtagctccggggactacgaggagagattcgcgccgggtggtgcttatgatgccagccgaggagggggtggaagcgaccggcctattatgagcgcaaattccccttggtccagcaacgagcccgactactccggcggtagtagtagcgggagagccggaggtgggagaagacttggtggactaccgagcggacctcgaatgcgatgatctcttgcttttccactgacatttctcgctagcttgttgggagccatacagtcttctcatttggatggagttaggagtctgggaataccgtttacctgtcggtaaattggttggggaatcacgatgatcgttagaccaagaaattcaagcaagtttacgcgttgcattcgtcattcagatacccatctgttgttgaatgattggtttagacgacagtcagcttcggctcgcgtggggaagacttcacattataataatattaacaggcagctattttgtacattgctatcgcgacgtttgctgtgatgagatttggtgtttgagtgctgcctgaatttggattgcgcgtctgtggagcgttgtgacaaaggataaaagagagtagaaggggaggtcatgttgctcaaagagcgtctgatgaccttgaagtacaacttgaagctctagccctattgggcgttctatgtctcatcaactcctgttcttcctcccaggcattttcagctgcaaatataatgataagagagtttcacggcaaacgacccctccaacctgtcaccccaccacaagcggtctaacccggtagctgaagctacctacctacctactcaagtcagttgcggggcattgatgcgttgaatgcgcctcatacaacccgcgtaactcactcgccactaggcagatgacctgctaatcaagaccaccatcgcatcccttgacgctcacatgttcctaatgttcatatgcccctatctcccgaataatatgtgcatcgcatttcacatgtagatacgattttaattttgaacctactgttcccatccttccgacaccttgcaggctctttgccccgccatgacatcagacgcctcgccgggacgagctgcctcccctacaggcagtttctacgccatgagcgacgacgaagagggtgaatacaataccataacccatatgcagtccggccgcggcgtgaagctgctctactccaagagcaaggtctacattcatcccacaccgtctgcaaaagacaacataccgggctatatcgcccttttgcagcagaagagtcctgctggcgaacgacccacctcttcttcctccaacgcctctctatcgcctgcctcgtctgatctgctcctagcttggctcccggagtcttcgctgggtgatgcagccagcatatatgtgaaagtcgatctcaccgagggtgattctcccccgaaacaaagctatctcgtgccgcctcctccgactgtgaccacgcataaaggctcgatcggtcattacgcttttgctatccctgtgactgctatatattctttacaagtccgcccaccaagcctcgggtggtggttcggctcagtggtcatcaacacacgggccggcgatagctttcccgcactcttcttccacgacagcgaatgtcagtccactattctgcagaagaagaaacttgccagagagaacttcgacccttttggggaacatggccaagtctactggggaggcgacgaggtattgcgatggcttcgacgatatgtccgtgtcgagaggagcggggccgagcccacgtcttatttagttgagcctagcaaagaagatagtgaaggcttcggtgccaagggaggctccagcacgtcgtctgcgattggtcgacgtgatagttcgcgaggattatccatgaagggcgctgccggtgccgccccaggtggttctaaggacgcccacgatgcgggtatggatccagtgatgaagtttgtgaaagagacgggttggaatatcatggagaagttcagcaaagtgacgacgtttacgaggaagactgcacaagatatcatcgataatccaaaagttccgccacaggttaaacgactgatgggaaatccagaggtccagactattcagaatgaatttgacagtgcaaggatatatctcgctcgctgggcgatgggcatcgctgagcagagcgagaaagatcggactcagaggatatggactgcccgggacgtgctagagatggaagatacggatgtcggcgagtttgaacttctggagacaagttccatgtctctcgaggaaaggagaaatcctgtctcacttaaggaatggaatggattttttgattctcggaccgggagattgacaatgacgatcgacgaagtcaaggaaaggatgtttcatggaggcctaaatccagatgacggtgttcgcaaagaagcttggctatttctcctcggtgtgtacgattggtacagtacatcggaagagcgaagggcccagttggcatcgctaagggacgaatatgtcaagctcaaggcctcgtggtgggaaagactagtcgacctcggcggcgaaggagaagaaggggagtggtggcgcgagcaacgaggacgtatcgagaaagatgttcatcgaactgacagaacagttcccattttcgcgggtgaggatatacctcacccagaccccgactcacccttcgcggaagtaggcaccaacgtccacatggagcaaatgaaagacatgctcctcacttataatgagtacaacaaagatctaggctatgtccaaggcatgtccgacttactcgcacccatatacgccgtcatgcaagacgatgcgatagcattctgggggttccagcgatttatggagcgcatggagcgcaactttcttcgagatcaatccggcatgcggaatcaactcttgactctcgatcacctggtccaatttatggacccaaaactgtacgcccacctacagaaagcagatagcaccaacttcttctttttcttccgaatgttgctcgtatggtacaagagagagttcaagtggatggatgttctgcatctgtgggaagtcttgtggacagactacttgagtagttcgttccatttgttcattgcgctggcgatattggaaaaacatcgggatgtaatcatggcgcacctagaacattttgacgaagttctgaaatacgtcaacgagctatctaataccatagatcttgagtccacactcatccgcgccgaggtcttattccgcagattccaacgtctggtggaggcaatcgacaagaaacaaaatttccctgcgccgagaaaagcaacaacttcaagctcttctgatcaacctgctcaaggtaccacgccgcctcctctgcctcagcgagacaatgggaaggctccagagaagaagtcaataagcccagagctcagaaaactattaagtagaaatgttgagatactgccgaggaaggtcgtgcataggaagggcgatgggtttacggccgagtcaaaccagtaagaaattcgactagtgcctgttggtgtatgataggagcggatttgaaggaaggatacggaaaacgagtcacatctcggtggatgagcatgttagcgacacggcgcatcggttccttggttcctacacgggttgttatgattttacgacttcgcatgcgactgggtttatggtgtaatatattattatgcatcttttacgtgatttgacttatcgctcaagaaatcacggtcattgttatgcagtgaactgtacggcttgtattggtttcttt

SEQ ID NO: 21079 - DNA, 825 bp, Muscodor strobelii
  misc_feature: SGI cDNA ID NO. 567128
  misc_feature: Reduced expression when VOC is produced
  misc_feature: Encodes the peptide sequence at SEQ ID NO 21080
atgtcgggctggtacagcaacatcacctccaaggtctccaatctccagcgctcctactttggcggcgaggcggacggcgacacagaagacgacacgcatgtctgtcgggtgctgcgcaattactacaccgagaaaggcaagccatttccaggatggctgccacccgacccaaaggcgcccccgcccgtgaccgccgtctactcgcaaccatcgcaagtcggctcgcgatacggagggatgacgcagcagccacaaggaggcagtttgagctcgctgtgggataacaacaaccccgtgtcacagccacaagatacgcagagtctacgaaggggaagaggcgtgccgccgccgatgcggaatagcgatgcaagaaacagcccgttccgtaactcggatccgatggctgggcaggacatgctacaagcgcggccgctcccgtcgcaacgagcgggcagttatcaaaacgcggggtcttacggaaatacaccgacaccccctgcatcgagtgggacgtcggcgcaagacagactcaaacagcgactttttggaggaaacagaactacaagcccggcaaacagtggcccgtaccaacccccaccgcagggcggtagcagaggaggtagctccggggactacgaggagagattcgcgccgggtggtgcttatgatgccagccgaggagggggtggaagcgaccggcctattatgagcgcaaattccccttggtccagcaacgagcccgactactccggcggtagtagtagcgggagagccggaggtgggagaagacttggtggactaccgagcggacctcgaatgcgatga

SEQ ID NO: 21080 - protein, 274 aa, Muscodor strobelii
  misc_feature: SGI Peptide ID NO. 567128
  misc_feature (1)..(223): NCBI GI: 256731499 Blast Desc: NECHADRAFT_85011 [Nectria haematococca mpVI 77-13-4]
  misc_feature (1)..(220): NCBI GI: 46121627 Blast Desc: FG05192.1 [Gibberella zeae PH-1]
  misc_feature (1)..(243): NCBI GI: 171693861 Blast Desc: protein product [Podospora anserina] gi|170946879|emb|CAP73683.1| protein product [Podospora anserina]
  misc_feature (1)..(274): NCBI GI: 189195374 Blast Desc: conserved [Pyrenophora tritici-repentis Pt-1C-BFP] gi|187979904|gb|EDU46530.1| conserved [Pyrenophora tritici-repentis Pt-1C-BFP]
  misc_feature (1)..(203): NCBI GI: 169596987 Blast Desc: SNOG_01271 [Phaeosphaeria nodorum SN15] gi|160707417|gb|EAT90920.2| SNOG_01271 [Phaeosphaeria nodorum SN15]
  misc_feature (7)..(195): NCBI GI: 121703776 Blast Desc: ACLA_096590 [Aspergillus clavatus NRRL 1] gi|119398296|gb|EAW08726.1| ACLA_096590 [Aspergillus clavatus NRRL 1]
  misc_feature (2)..(256): NCBI GI: 156048100 Blast Desc: SS1G_08781 [Sclerotinia sclerotiorum 1980] gi|154693178|gb|EDN92916.1| SS1G_08781 [Sclerotinia sclerotiorum 1980]
  misc_feature (7)..(190): NCBI GI: 115386394 Blast Desc: conserved [Aspergillus terreus NIH2624] gi|114190736|gb|EAU32436.1| conserved [Aspergillus terreus NIH2624]
  misc_feature (1)..(95): NCBI GI: 85102279 Blast Desc: NCU04151 [Neurospora crassa OR74A] gi|12718210|emb|CAC28754.1| conserved [Neurospora crassa] gi|28922850|gb|EAA32071.1| [Neurospora crassa OR74A]
  misc_feature (2)..(190): NCBI GI: 255946027 Blast Desc: Pc20g12990 [Penicillium chrysogenum Wisconsin 54-1255] gi|211588516|emb|CAP86628.1| Pc20g12990 [Penicillium chrysogenum Wisconsin 54-1255]
  misc_feature: Useful for introducing or modulating the production of volatile compounds
MSGWYSNITSKVSNLQRSYFGGEADGDTEDDTHVCRVLRNYYTEKGKPFPGWLPPDPKAPPPVTAVYSQPSQVGSRYGGMTQQPQGGSLSSLWDNNNPVSQPQDTQSLRRGRGVPPPMRNSDARNSPFRNSDPMAGQDMLQARPLPSQRAGSYQNAGSYGNTPTPPASSGTSAQDRLKQRLFGGNRTTSPANSGPYQPPPQGGSRGGSSGDYEERFAPGGAYDASRGGGGSDRPIMSANSPWSSNEPDYSGGSSSGRAGGGRRLGGLPSGPRMR

SEQ ID NO: 21081 - DNA, 5756 bp, Muscodor strobelii; identical to SEQ ID NO: 21078
  misc_feature: SGI EST ID NO. CUFF.50133.0
  misc_feature: Variant of the nucleotide sequence at SEQ ID NO 21079

SEQ ID NO: 21082 - DNA, 1002 bp, Muscodor strobelii
  misc_feature: SGI cDNA ID NO. 567129
  misc_feature: Reduced expression when VOC is produced
  misc_feature: Encodes the peptide sequence at SEQ ID NO 21083
atgagtttggatcggcattttaacattacgcaggtcatcgataagcagttctgttcttacaaggtcaaggcgacccgtgaaaggacgttctgtcgcaatgaatacaacatctccggtttctgttcacgacagagttgtcccctcgcaaacagccgctatgcaaccattcggcctcacccagatccaacgaaggcaatcaactatctgtatatcaaaactccagagagggctcaccttccgtcaaaattatggcagcgaataaaactaagcgccaattacaagacagcacttgatcaaatagatgagcacctaatttactggcccaaattcatgattcatagagccaagcagcgtcttaccagacttcaacaagtcagcatccggatgcgacgactcgcgaaagaagaagccaggcttggggagaagatggtccctaaattggctccgaaagtccgaagacgtgaggagacgcgagagcgaaaagctgaggcagcagccaaattagaacgcgctatcgagagagagctacttggacgacttcgcgaaggtgcttacggcgaccagccactaaatgtcagcgaacaaatctggaagaaggtattgacagccatggagcgcgagggcgaagctaccagagacaaggacatggataccggcattgacgacgaggacgaagaggaaagagaagaagagttcgaaatggaagacgaagaagatgacggagcagtcgagtatgtctctgatttcgaggagagtgaagacggcgatgaccttgaagatctcgaggattggctcgacagcgacgaggcagaagaagactccgaatcagaggacagcgaagatgagagtgaggaagaggctactaagaagaaatccgcaatggccgataagaagcgaaaagcgccagcgaaaagcgcaagacctaggaagattgctcggcgtggacgggagattgaggaagagcacgagatggagcaccagagacctgagcttgctttctga

SEQ ID NO: 21083 - protein, 333 aa, Muscodor strobelii
  misc_feature: SGI Peptide ID NO. 567129
  misc_feature (11)..(263): Pfam Id: PF04874 Pfam Desc: Mak16 protein
  misc_feature (9)..(333): NCBI GI: 39944116 Blast Desc: MGG_04069 [Magnaporthe grisea 70-15] gi|145014794|gb|EDJ99362.1| MGG_04069 [Magnaporthe grisea 70-15]
  misc_feature (9)..(265): NCBI GI: 256731500 Blast Desc: NECHADRAFT_96366 [Nectria haematococca mpVI 77-13-4]
  misc_feature (9)..(333): NCBI GI: 156048102 Blast Desc: SS1G_08782 [Sclerotinia sclerotiorum 1980] gi|154693179|gb|EDN92917.1| SS1G_08782 [Sclerotinia sclerotiorum 1980]
  misc_feature (9)..(333): NCBI GI: 171693859 Blast Desc: protein product [Podospora anserina] gi|170946878|emb|CAP73682.1| protein product [Podospora anserina]
  misc_feature (9)..(333): NCBI GI: 85102274 Blast Desc: NCU04150 [Neurospora crassa OR74A] gi|28922849|gb|EAA32070.1| NCU04150 [Neurospora crassa OR74A]
  misc_feature (9)..(333): NCBI GI: 154305850 Blast Desc: BC1G_08156 [Botryotinia fuckeliana B05.10] gi|150853041|gb|EDN28233.1| BC1G_08156 [Botryotinia fuckeliana B05.10]
  misc_feature (9)..(333): NCBI GI: 119173385 Blast Desc: CIMG_10174 [Coccidioides immitis RS]
  misc_feature (9)..(217): NCBI GI: 240111817 Blast Desc: MAK16 protein, [Coccidioides posadasii C735 delta SOWgp]
  misc_feature (9)..(217): NCBI GI: 258570453 Blast Desc: protein MAK16 [Uncinocarpus reesii 1704] gi|237904300|gb|EEP78701.1| protein MAK16 [Uncinocarpus reesii 1704]
  misc_feature (9)..(333): NCBI GI: 12718211 Blast Desc: MAK16 protein [Neurospora crassa]
  misc_feature: Useful for introducing or modulating the production of volatile compounds
MSLDRHFNITQVIDKQFCSYKVKATRERTFCRNEYNISGFCSRQSCPLANSRYATIRPHPDPTKAINYLYIKTPERAHLPSKLWQRIKLSANYKTALDQIDEHLIYWPKFMIHRAKQRLTRLQQVSIRMRRLAKEEARLGEKMVPKLAPKVRRREETRERKAEAAAKLERAIERELLGRLREGAYGDQPLNVSEQIWKKVLTAMEREGEATRDKDMDTGIDDEDEEEREEEFEMEDEEDDGAVEYVSDFEESEDGDDLEDLEDWLDSDEAEEDSESEDSEDESEEEATKKKSAMADKKRKAPAKSARPRKIARRGREIEEEHEMEHQRPELAF

SEQ ID NO: 21084 - DNA, 1752 bp, Muscodor strobelii
  misc_feature: SGI cDNA ID NO. 567130
  misc_feature: Encodes the peptide sequence at SEQ ID NO 21085
atgcatcgtactgtcatcagacgtgcgctcgctcagaagcttagtaccggcttgaattcaaacccatcaagctttgtctttaatccatcgcccgtgttcgccagatcagtcagatattctcgaagatggatgtcatttgaaaggccatcatctataccgaatgcatttccctcgcaacatgacaccatatacgcactctcttcggctataggtaaagctggaatagccgtgatccgaatatcggggccttctgctctgcaaatttaccatgagctctgtcctcagaaaaaggccccaaaacctcgctatgctacagtacggtcattatatctcccaggatctgaaatggtggagatgctcgattcatctgccttagttctgtatttccccagtcccaagaccgtcactggagacgacatgctagaactacatgtccatggtggtagtgcgaccgtcaaagcagttttgtcggccatccctaaatgtgctagtaaaggacgcatccgatatgctgaacctggagagttcacgaaacgcgccttcttgaacgaccgacttgatcttgctcaagtggaagccttgagtgaaacccttgcggctgagaccgaacagcagcggcgggccgccgttcgaggtagctccggttctttgggacgaacatacgaagaatggcgccgaaatttgttgcaggcgcgggcagagatggaggctcttattgactttcaagaggatcagcacttcgacgagtctcccgcgtcactcgtaactaatgtcagcctacaagtcacccatattctccgcagcatagccaaccacgaaatggctagtcagcgcacggaactccttcgtaatggcatccaagttgctctactaggtccacccaatgtaggcaagagctctttgatgaaccaagtcgtgggccgagaagcatcaattgtctcaggagagtctggaactacgagggatatcatcgaggcgaacctagatattcgtggttatctgtgcacatttgctgacacagctgggttcagatccactctcgcggtagatcccaccaacgccacatatgctgataataataaagtaggggcagtcgaagaagagggtatccgccgggcaaggatcaaagcgactcaatctgatgtcatcgtggttcttgcctctgtggagaaggacacgactgagaagttagagattcgatacgatctcgaaacgctgaaactcgccgccgcttgtgaacagcgtcttgtattaatcaataaggtcgacgcagtctctgaggcagatcttcggcccattattcaggattttcaggataccgtgttgaagcaaattccgggtcttgaaactgccgtaccgataccgatatcatgtgaactagcccggagccaagattctgaccagcaagatcccggtggagtacgcctcgtggcagatatgctcgtctcagctttccaacgcatgacctcactgcccaccaccctacaggatctacacggtgttacagaacgccaaaggcagcttcttgtgctatgtcgacattgcctagaggaatacatggacgttgtcggcgatattccggaagaagatgtggaagcagcccacgatattgacttaatcatggcagctgaacatctgcgctacgccgctaattgtcttggacggattacgggccgaggcgaagcgggtgatgtcgaagaaatactcggcgttatctttgagaagtatgatgccacttgctctttccactga

SEQ ID NO: 21085 - protein, 583 aa, Muscodor strobelii
  misc_feature: SGI Peptide ID NO. 567130
  misc_feature (286)..(423): Pfam Id: PF01926 Pfam Desc: GTPase of function
  misc_feature (56)..(575): NCBI GI: 171693857 Blast Desc: protein product [Podospora anserina] gi|170946877|emb|CAP73681.1| protein product [Podospora anserina]
  misc_feature (72)..(576): NCBI GI: 145607203 Blast Desc: MGG_04070 [Magnaporthe grisea 70-15] gi|145014795|gb|EDJ99363.1| MGG_04070 [Magnaporthe grisea 70-15]
  misc_feature (75)..(576): NCBI GI: 156048568 Blast Desc: SS1G_09015 [Sclerotinia sclerotiorum 1980] gi|154693412|gb|EDN93150.1| SS1G_09015 [Sclerotinia sclerotiorum 1980]
  misc_feature (72)..(576): NCBI GI: 154300747 Blast Desc: BC1G_10673 [Botryotinia fuckeliana B05.10] gi|150856421|gb|EDN31613.1| BC1G_10673 [Botryotinia fuckeliana B05.10]
  misc_feature (87)..(575): NCBI GI: 116198089 Blast Desc: CHGG_07200 [Chaetomium globosum CBS 148.51] gi|88178479|gb|EAQ85947.1| CHGG_07200 [Chaetomium globosum CBS 148.51]
  misc_feature (75)..(576): NCBI GI: 85102270 Blast Desc: NCU04149 [Neurospora crassa OR74A] gi|16944409|emb|CAC28756.2| related to GTPase MSS1, mitochondrial [Neurospora crassa] gi|28922848|gb|EAA32069.1| NCU04149 crassa
  misc_feature (138)..(576): NCBI GI: 46121683 Blast Desc: FG05220.1 [Gibberella zeae PH-1]
  misc_feature (140)..(576): NCBI GI: 256731113 Blast Desc: [Nectria haematococca mpVI 77-13-4]
  misc_feature (41)..(576): NCBI GI: 225554700 Blast Desc: tRNA modification GTPase GTPBP3 [Ajellomyces capsulatus G186AR]
  misc_feature (22)..(576): NCBI GI: 239613201 Blast Desc: mitochondrial GTPase [Ajellomyces dermatitidis ER-3]
MHRTVIRRALAQKLSTGLNSNPSSFVFNPSPVFARSVRYSRRWMSFERPSSIPNAFPSQHDTIYALSSAIGKAGIAVIRISGPSALQIYHELCPQKKAPKPRYATVRSLYLPGSEMVEMLDSSALVLYFPSPKTVTGDDMLELHVHGGSATVKAVLSAIPKCASKGRIRYAEPGEFTKRAFLNDRLDLAQVEALSETLAAETEQQRRAAVRGSSGSLGRTYEEWRRNLLQARAEMEALIDFQEDQHFDESPASLVTNVSLQVTHILRSIANHEMASQRTELLRNGIQVALLGPPNVGKSSLMNQVVGREASIVSGESGTTRDIIEANLDIRGYLCTFADTAGFRSTLAVDPTNATYADNNKVGAVEEEGIRRARIKATQSDVIVVLASVEKDTTEKLEIRYDLETLKLAAACEQRLVLINKVDAVSEADLRPIIQDFQDTVLKQIPGLETAVPIPISCELARSQDSDQQDPGGVRLVADMLVSAFQRMTSLPTTLQDLHGVTERQRQLLVLCRHCLEEYMDVVGDIPEEDVEAAHDIDLIMAAEHLRYAANCLGRITGRGEAGDVEEILGVIFEKYDATCSFH

SEQ ID NO: 21086 - DNA, 1398 bp, Muscodor strobelii
  misc_feature: SGI cDNA ID NO. 567131
  misc_feature: Encodes the peptide sequence at SEQ ID NO 21087
atggtggagatgctcgattcatctgccttagttctgtatttccccagtcccaagaccgtcactggagacgacatgctagaactacatgtccatggtggtagtgcgaccgtcaaagcagttttgtcggccatccctaaatgtgctagtaaaggacgcatccgatatgctgaacctggagagttcacgaaacgcgccttcttgaacgaccgacttgatcttgctcaagtggaagccttgagtgaaacccttgcggctgagaccgaacagcagcggcgggccgccgttcgaggtagctccggttctttgggacgaacatacgaagaatggcgccgaaatttgttgcaggcgcgggcagagatggaggctcttattgactttcaagaggatcagcacttcgacgagtctcccgcgtcactcgtaactaatgtcagcctacaagtcacccatattctccgcagcatagccaaccacgaaatggctagtcagcgcacggaactccttcgtaatggcatccaagttgctctactaggtccacccaatgtaggcaagagctctttgatgaaccaagtcgtgggccgagaagcatcaattgtctcaggagagtctggaactacgagggatatcatcgaggcgaacctagatattcgtggttatctgtgcacatttgctgacacagctgggttcagatccactctcgcggtagatcccaccaacgccacatatgctgataataataaagtaggggcagtcgaagaagagggtatccgccgggcaaggatcaaagcgactcaatctgatgtcatcgtggttcttgcctctgtggagaaggacacgactgagaagttagagattcgatacgatctcgaaacgctgaaactcgccgccgcttgtgaacagcgtcttgtattaatcaataaggtcgacgcagtctctgaggcagatcttcggcccattattcaggattttcaggataccgtgttgaagcaaattccgggtcttgaaactgccgtaccgataccgatatcatgtgaactagcccggagccaagattctgaccagcaagatcccggtggagtacgcctcgtggcagatatgctcgtctcagctttccaacgcatgacctcactgcccaccaccctacaggatctacacggtgttacagaacgccaaaggcagcttcttgtgctatgtcgacattgcctagaggaatacatggacgttgtcggcgatattccggaagaagatgtggaagcagcccacgatattgacttaatcatggcagctgaacatctgcgctacgccgctaattgtcttggacggattacgggccgaggcgaagcgggtgatgtcgaagaaatactcggcgttatctttgagaagttttgtgttggaaagtag

SEQ ID NO: 21087 - protein, 465 aa, Muscodor strobelii
  misc_feature: SGI Peptide ID NO. 567131
  misc_feature (171)..(308): Pfam Id: PF01926 Pfam Desc: GTPase of function
  misc_feature (23)..(465): NCBI GI: 46121683 Blast Desc: FG05220.1 [Gibberella zeae PH-1]
  misc_feature (4)..(465): NCBI GI: 156048568 Blast Desc: SS1G_09015 [Sclerotinia sclerotiorum 1980] gi|154693412|gb|EDN93150.1| SS1G_09015 [Sclerotinia sclerotiorum 1980]
  misc_feature (25)..(465): NCBI GI: 256731113 Blast Desc: [Nectria haematococca mpVI 77-13-4]
  misc_feature (4)..(460): NCBI GI: 171693857 Blast Desc: protein product [Podospora anserina] gi|170946877|emb|CAP73681.1| protein product [Podospora anserina]
  misc_feature (4)..(465): NCBI GI: 154300747 Blast Desc: BC1G_10673 [Botryotinia fuckeliana B05.10] gi|150856421|gb|EDN31613.1| BC1G_10673 [Botryotinia fuckeliana B05.10]
  misc_feature (3)..(465): NCBI GI: 145607203 Blast Desc: MGG_04070 [Magnaporthe grisea 70-15] gi|145014795|gb|EDJ99363.1| MGG_04070 [Magnaporthe grisea 70-15]
  misc_feature (4)..(465): NCBI GI: 85102270 Blast Desc: NCU04149 [Neurospora crassa OR74A] gi|16944409|emb|CAC28756.2| related to GTPase MSS1, mitochondrial [Neurospora crassa] gi|28922848|gb|EAA32069.1| NCU04149 crassa
  misc_feature (4)..(460): NCBI GI: 116198089 Blast Desc: CHGG_07200 [Chaetomium globosum CBS 148.51] gi|88178479|gb|EAQ85947.1| CHGG_07200 [Chaetomium globosum CBS 148.51]
  misc_feature (9)..(465): NCBI GI: 261190881 Blast Desc: mitochondrial GTPase [Ajellomyces dermatitidis SLH14081] gi|239590893|gb|EEQ73474.1| mitochondrial GTPase [Ajellomyces dermatitidis SLH14081]
  misc_feature (9)..(465): NCBI GI: 239613201 Blast Desc: mitochondrial GTPase [Ajellomyces dermatitidis ER-3]
MVEMLDSSALVLYFPSPKTVTGDDMLELHVHGGSATVKAVLSAIPKCASKGRIRYAEPGEFTKRAFLNDRLDLAQVEALSETLAAETEQQRRAAVRGSSGSLGRTYEEWRRNLLQARAEMEALIDFQEDQHFDESPASLVTNVSLQVTHILRSIANHEMASQRTELLRNGIQVALLGPPNVGKSSLMNQVVGREASIVSGESGTTRDIIEANLDIRGYLCTFADTAGFRSTLAVDPTNATYADNNKVGAVEEEGIRRARIKATQSDVIVVLASVEKDTTEKLEIRYDLETLKLAAACEQRLVLINKVDAVSEADLRPIIQDFQDTVLKQIPGLETAVPIPISCELARSQDSDQQDPGGVRLVADMLVSAFQRMTSLPTTLQDLHGVTERQRQLLVLCRHCLEEYMDVVGDIPEEDVEAAHDIDLIMAAEHLRYAANCLGRITGRGEAGDVEEILGVIFEKFCVGK

SEQ ID NO: 21088 - DNA, 2724 bp, Muscodor strobelii
  misc_feature: SGI EST ID NO. CUFF.50273.1
  misc_feature: Variant of the nucleotide sequence at SEQ ID NO 21086
ccaaaacctcgctatgctacagtacggtcattatatctcccaggatctgaaatggtggagatgctcgattcatctgccttagttctgtatttccccagtcccaagaccgtcactggagacgacatgctagaactacatgtccatggtggtagtgcgaccgtcaaagcagttttgtcggccatccctaaatgtgctagtaaaggacgcatccgatatgctgaacctggagagttcacgaaacgcgccttcttgaacgaccgacttgatcttgctcaagtggaagccttgagtgaaacccttgcggctgagaccgaacagcagcggcgggccgccgttcgaggtagctccggttctttgggacgaacatacgaagaatggcgccgaaatttgttgcaggcgcgggcagagatggaggctcttattgactttcaagaggatcagcacttcgacgagtctcccgcgtcactcgtaactaatgtcagcctacaagtcacccatattctccgcagcatagccaaccacgaaatggctagtcagcgcacggaactccttcgtaatggcatccaagttgctctactaggtccacccaatgtaggcaagagctctttgatgaaccaagtcgtgggccgagaagcatcaattgtctcaggagagtctggaactacgagggatatcatcgaggcgaacctagatattcgtggttatctgtgcacatttgctgacacagctgggttcagatccactctcgcggtagatcccaccaacgccacatatgctgataataataaagtaggggcagtcgaagaagagggtatccgccgggcaaggatcaaagcgactcaatctgatgtcatcgtggttcttgcctctgtggagaaggacacgactgagaagttagagattcgatacgatctcgaaacgctgaaactcgccgccgcttgtgaacagcgtcttgtattaatcaataaggtcgacgcagtctctgaggcagatcttcggcccattattcaggattttcaggataccgtgttgaagcaaattccgggtcttgaaactgccgtaccgataccgatatcatgtgaactagcccggagccaagattctgaccagcaagatcccggtggagtacgcctcgtggcagatatgctcgtctcagctttccaacgcatgacctcactgcccaccaccctacaggatctacacggtgttacagaacgccaaaggcagcttcttgtgctatgtcgacattgcctagaggaatacatggacgttgtcggcgatattccggaagaagatgtggaagcagcccacgatattgacttaatcatggcagctgaacatctgcgctacgccgctaattgtcttggacggattacgggccgaggcgaagcgggtgatgtcgaagaaatactcggcgttatctttgagaagttttgtgttggaaagtagatgaattcggtccccaagaataatagtgtacaaacaatgtataaagtcgaatcgaagagccaaacaccaaatgcccaccgcctccctcaaatgcccctatcccaatccgatgtaaatgctgttaataatacaatgtgctgtccgttgccggcgcaagtctaagtctagtgtctttttctcatattcatacattcccagtcgtacagtctgtgtccatatagccggtgtaaatgctcgaagaatgtggcaacgcccgtgtgatgatgcaagaacaaaggagatcgaaacgatgacagtttaatgttggtacagcgagaagccatcaaggcccgagagtgtaagccggtgctcctgtttgtggaggaggcttagttgtatccactgcggccgaagcagcgcttgtcgtcgtcatcgtcgccgtccttgttgtaaccagaacggccgaagcatcggttgttatcctcttcatcaccatctttgttgtagccagagcgaccaaaattgcgcttgtcatcctcgttgtcaccgtccttattgtagccagatcggccgaagttctgaggcgaagagacgaaagcgagggcagccattgcgaatgtttgctgtagcgtggtgttgatagatcgagagcttgtttgtagaaagatactgatcagaagatacttgattgttggtggtgaagagtagtcgctgttgaatagacgaagagacagaggaagctcgagtaatatgttgttgagtagtagtagtagttgttattgttattgtagatgttgtgagtgtgtgatgatggtagtgatgggataggattccaagatggatgccttaacaccttatatatatatcaaaatatcaaggagctatgggatataaggaccatcagtgtcatcatcccgttgcaagcccacagcaacgggtccggcaaggaagcctggccccctagggcaccatccgtcaacccccgggagcaatgacatcgaactagtgcaggctgtggttcacgccaagtgtgtgggtaccatcatcagcctcacaatgactttgtcaagtcaacctgggaggacggattcgtaccgaacttctcaggcccccatctaatttcgctgagagatacttggagatacatggtgactgacctcagatctctatacttcctacctaggtgcggtacaagggcagtcgagtatacatagacaacaaagtacatactatgttgaggtgagaaaggggagataacaacatacacgcgtggcgacgccgcaagctccgtcagca

SEQ ID NO: 21089 - DNA, 222 bp, Muscodor strobelii
  misc_feature: SGI cDNA ID NO. 567132
  misc_feature: Encodes the peptide sequence at SEQ ID NO 21090
atggctgccctcgctttcgtctcttcgcctcagaacttcggccgatctggctacaataaggacggtgacaacgaggatgacaagcgcaattttggtcgctctggctacaacaaagatggtgatgaagaggataacaaccgatgcttcggccgttctggttacaacaaggacggcgacgatgacgacgacaagcgctgcttcggccgcagtggatacaactaa

SEQ ID NO: 21090 - protein, 73 aa, Muscodor strobelii
  misc_feature: SGI Peptide ID NO. 567132
  misc_feature (1)..(64): NCBI GI: 85102266 Blast Desc: NCU04148 [Neurospora crassa OR74A] gi|12718213|emb|CAC28757.1| [Neurospora crassa] gi|28922847|gb|EAA32068.1| [Neurospora crassa OR74A]
  misc_feature (1)..(63): NCBI GI: 171693855 Blast Desc: protein product [Podospora anserina] gi|170946876|emb|CAP73680.1| protein product [Podospora anserina]
  misc_feature (1)..(73): NCBI GI: 46121681 Blast Desc: FG05219.1 [Gibberella zeae PH-1]
MAALAFVSSPQNFGRSGYNKDGDNEDDKRNFGRSGYNKDGDEEDNNRCFGRSGYNKDGDDDDDKRCFGRSGYN

SEQ ID NO: 21091 - DNA, 3499 bp, Muscodor strobelii
  misc_feature: SGI EST ID NO. CUFF.50273.0
  misc_feature: Variant of the nucleotide sequence at SEQ ID NO 21089
gctgtcttgcttgtccacttgtcttttcttcgatgcatcttcgatggataattccatgcagcccacaatgattgcccatgctgcagaatgtttcccgactgcgctttctcacgctgcaccgtagcgccaaggcgtgcaattattctgaccaccccacctctctgccctcacgcctcttacctatttgtagcaactggtcgcccatatgcagtaattctacaagcttacagccaaaattggcatgccccaaatttcgtagactcaatgtgctttgtttggaaacgtttcgtgctgacggagcttgcggcgtcgccacgcgtgtatgttgttatctcccctttctcacctcaacatagtatgtactttgttgtctatgtatactcgactgcccttgtaccgcacctaggtaggaagtatagagatctgaggtcagtcaccatgtatctccaagtatctctcagcgaaattagatgggggcctgagaagttcggtacgaatccgtcctcccaggttgacttgacaaagtcattgtgaggctgatgatggtacccacacacttggcgtgaaccacagcctgcactagttcgatgtcattgctcccgggggttgacggatggtgccctagggggccaggcttccttgccggacccgttgctgtgggcttgcaacgggatgatgacactgatggtccttatatcccatagctccttgatattttgatatatatataaggtgttaaggcatccatcttggaatcctatcccatcactaccatcatcacacactcacaacatctacaataacaataacaactactactactactcaacaacatattactcgagcttcctctgtctcttcgtctattcaacagcgactactcttcaccaccaacaatcaagtatcttctgatcagtatctttctacaaacaagctctcgatctatcaacaccacgctacagcaaacattcgcaatggctgccctcgctttcgtctcttcgcctcagaacttcggccgatctggctacaataaggacggtgacaacgaggatgacaagcgcaattttggtcgctctggctacaacaaagatggtgatgaagaggataacaaccgatgcttcggccgttctggttacaacaaggacggcgacgatgacgacgacaagcgctgcttcggccgcagtggatacaactaagcctcctccacaaacaggagcaccggcttacactctcgggccttgatggcttctcgctgtaccaacattaaactgtcatcgtttcgatctcctttgttcttgcatcatcacacgggcgttgccacattcttcgagcatttacaccggctatatggacacagactgtacgactgggaatgtatgaatatgagaaaaagacactagacttagacttgcgccggcaacggacagcacattgtattattaacagcatttacatcggattgggataggggcatttgagggaggcggtgggcatttggtgtttggctcttcgattcgactttatacattgtttgtacactattattcttggggaccgaattcatctactttccaacacaaaacctagttcgttattagtgaatcgacttctcagtggaaagagcaagtggcatcatacttctcaaagataacgccgagtatttcttcgacatcacccgcttcgcctcggcccgtaatccgtccaagacaattagcggcgtagcgcagatgttcagctgccatgattaagtcaatatcgtgggctgcttccacatcttcttccggaatatcgccgacaacgtccatgtattcctctaggcaatgtcgacatagcacaagaagctgcctttggcgttctgtaacaccgtgtagatcctgtagggtggtgggcagtgaggtcatgcgttggaaagctgagacgagcatatctgccacgaggcgtactccaccgggatcttgctggtcagaatcttggctccgggctagttcacatgatatcggtatcggtacggcagtttcaagacccggaatttgcttcaacacggtatcctgaaaatcctgaataatgggccgaagatctgcctcagagactgcgtcgaccttattgattaatacaagacgctgttcacaagcggcggcgagtttcagcgtttcgagatcgtatcgaatctctaacttctcagtcgtgtccttctccacagaggcaagaaccacgatgacatcagattgagtcgctttgatccttgcccggcggataccctcttcttcgactgcccctactttattattatcagcatatgtggcgttggtgggatctaccgcgagagtggatctgaacccagctgtgtcagcaaatgtgcacagataaccacgaatatctaggttcgcctcgatgatatccctcgtagttccagactctcctgagacaattgatgcttctcggcccacgacttggttcatcaaagagctcttgcctacattgggtggacctagtagagcaacttggatgccattacgaaggagttccgtgcgctgactagccatttcgtggttggctatgctgcggagaatatgggtgacttgtaggctgacattagttacgagtgacgcgggagactcgtcgaagtgctgatcctcttgaaagtcaataagagcctccatctctgcccgcgcctgcaacaaatttcggcgccattcttcgtatgttcgtcccaaagaaccggagctacctcgaacggcggcccgccgctgctgttcggtctcagccgcaagggtttcactcaaggcttccacttgagcaagatcaagtcggtcgttcaagaaggcgcgtttcgtgaactctccaggttcagcatatcggatgcgtcctttactagcacatttagggatggccgacaaaactgctttgacggtcgcactaccaccatggacatgtagttctagcatgtcgtctccagtgacggtcttgggactggggaaatacagaactaaggcagatgaatcgagcatctccaccatttcagatcctgggagatataatgaccgtactgtagcatagcgaggttttggggcctttttctgaggacagagctcatggtaaatcttttcaaaccgtttagccaaatcattactctacgcaagtcacatccttacatacttgcagagcagaaggccccgatattcggatcacggctattccagctttacctatagccgaagagagtgcgtatatggtgtcatgttgcgagggaaatgcattcggtatagatgatggcctttcaaatgacatccatcttcgagaatatctgactgatctggcgaacacgggcgatggattaaagacaaagcttgatgggtttgaattcaagccggtactaagcttctgagcgagcgcacgtctgatgacagtacgatgcatggactttgaatctgatggccgcgaggattgaaaaacgagtgtagtgtaattaaggagctctggctgtcgcgatgcgagtctg

SEQ ID NO: 21092 - DNA, 1785 bp, Muscodor strobelii
  misc_feature: SGI cDNA ID NO. 567133
  misc_feature: Encodes the peptide sequence at SEQ ID NO 21093
atgcaaatacagatgttcgacgtaatcattgtcggaggcggaacagcaggatgtgtgctagccaaccgcctcagcgcgaagtcgaacctcaagatcttgcttctcgaggctggggcaaacagaaacgatgacccaaaagtcttgactccgctctcaagcagacgaatgttcaaagaccctgaatatgattggtgttttacttcgatgcctcaggaacgatgcgatggacgtatctttgaacatacaagaggacgtatgctaggtgggagcagcggtatcaattcccatagtcttgtgtatcccaacaaagctatgcatgacgcctgggcgtccatctctggtgatgagagctgggcatggaagaatatggaacaatattatcacaagttccattcgactcaagtttcggatgggggacatgatgaagagggaaccgtgcaggcctcgttcccgcgccacatgcatcttttgcaaactgcatgggaagatgtcttcgactctctgggtgctaagtctccaaaagacggcgcttctggagaggtgatagggggcttcacgacgacgaattcaattgacggacgactaggaaagggggagcggagctttgctggcaacacgtatctcgttgaagctcttggaagagaaaacctggtagtcgagaccgacgcccttgttcataaaatcattttcgataaagtcggtgacgggtccgattcccaactaaaagctagcggcgtctcgtacgagaaagctggtcagatggtagtggcacatgcaaagggagaagtcgtactctgcgctggtgcttttggaagcccaaaaattcttgaactatctggtataggaggtcgaaaggtccttgaatcgaccggcatagagtgtcttctcgattcaccacttgtcggcgagaatctgcaggaccacctgaattacggtccaagcatagaagttcggccagaaatcgcaaccatggacattgcccttcgagaccaagcagtagccgcagcccaacgcgaagagtacgacaagcatagaactggccctctatccgagggagcagcgtacagttttgcccactggccattacagctcttcaatacaccagccgaggaggacgatctgcacaaactagtggcaaaactaggttcatcagcaccagacaaactctcgcaagagcaagataatttcatatctcggatgatattagaaaagaccgaagcctcagcaaccgtcttcatgacccgtctgcagcgatacacgggcccttcaaatcgcgcggacggcaactacatgacggtcgttgctatgctctcacatccctacagtcgcggatcggtacacatccaaagtactaacgttcatgagcaacctcgcatagacaatgcgtacctcactcatcccttagatgaagagatccttgcgaagcatgctttgcagattgagaagctcttgattcaagacacttattcttctatcctgcggcctagcggtaatcgtctaccgagagaattcaacaaagtattgaagaatgaagatgaggcaaaagaggctatcaagaaatatagcgctacgaattaccacccgtgcggcacttgcgtaatgaccaggtatgagctaggtggtgtcgtggacggacagttaaaggtacatgacacaactaatttacgggtttgcgacgcaagtatcttccctatcatcccgagagggaatattcttagtactgtttatgctacggctgaacggggtgcggacattgttcttgagtgtttggctggcaaacagtga

SEQ ID NO: 21093 - protein, 594 aa, Muscodor strobelii
  misc_feature: SGI Peptide ID NO. 567133
  misc_feature (433)..(582): Pfam Id: PF05199 Pfam Desc: GMC oxidoreductase
  misc_feature (6)..(323): Pfam Id: PF00732 Pfam Desc: GMC oxidoreductase
  misc_feature (7)..(38): Pfam Id: PF01266 Pfam Desc: FAD dependent oxidoreductase
  misc_feature (7)..(40): Pfam Id: PF00890 Pfam Desc: FAD binding domain
  misc_feature (511)..(582): Pfam Id: PF05199 Pfam Desc: GMC oxidoreductase
  misc_feature (197)..(309): Pfam Id: PF00732 Pfam Desc: GMC oxidoreductase
  misc_feature (6)..(129): Pfam Id: PF00732 Pfam Desc: GMC oxidoreductase
  misc_feature (7)..(39): Pfam Id: PF05834 Pfam Desc: Lycopene cyclase protein
  misc_feature (7)..(40): Pfam Id: PF07992 Pfam Desc: Pyridine nucleotide-disulphide oxidoreductase
  misc_feature (6)..(586): NCBI GI: 154303924 Blast Desc: BC1G_08846 [Botryotinia fuckeliana B05.10] gi|150854430|gb|EDN29622.1| BC1G_08846 [Botryotinia fuckeliana B05.10]
  misc_feature (5)..(592): NCBI GI: 169623265 Blast Desc: SNOG_14869 [Phaeosphaeria nodorum SN15] gi|160704949|gb|EAT77721.2| SNOG_14869 [Phaeosphaeria nodorum SN15]
  misc_feature (4)..(586): NCBI GI: 169771991 Blast Desc: [Aspergillus oryzae RIB40] gi|238485400|ref|XP_002373938.1| aryl-alcohol dehydrogenase, [Aspergillus flavus NRRL3357] gi|83768324|dbj|BAE58463.1| protein
  misc_feature (3)..(586): NCBI GI: 145231393 Blast Desc: An02g00400 [Aspergillus niger] gi|134056080|emb|CAK96255.1| protein product [Aspergillus niger]
  misc_feature (7)..(586): NCBI GI: 225560142 Blast Desc: glucose-methanol-choline oxidoreductase [Ajellomyces capsulatus G186AR]
  misc_feature (7)..(586): NCBI GI: 154288082 Blast Desc: [Ajellomyces capsulatus NAm1] gi|150408477|gb|EDN04018.1| [Ajellomyces capsulatus NAm1]
  misc_feature (6)..(587): NCBI GI: 119501657 Blast Desc: aryl-alcohol dehydrogenase, [Neosartorya fischeri NRRL 181] gi|119415751|gb|EAW25688.1| aryl-alcohol dehydrogenase, [Neosartorya fischeri NRRL 181]
  misc_feature (6)..(587): NCBI GI: 70981732 Blast Desc: aryl-alcohol dehydrogenase [Aspergillus fumigatus Af293] gi|66844017|gb|EAL84357.1| aryl-alcohol dehydrogenase, [Aspergillus fumigatus Af293] gi|159121998|gb|EDP47121.1| A1163]
  misc_feature (6)..(587): NCBI GI: 121704513 Blast Desc: aryl-alcohol dehydrogenase, [Aspergillus clavatus NRRL 1] gi|119398665|gb|EAW09094.1| aryl-alcohol dehydrogenase, [Aspergillus clavatus NRRL 1]
  misc_feature (7)..(586): NCBI GI: 145247064 Blast Desc: An12g07280 [Aspergillus niger] gi|134080508|emb|CAK46356.1| protein product [Aspergillus niger]
  misc_feature (6)..(586): SWISSPROT Homolog: EC 1.1.99.32 L-sorbose 1-dehydrogenase
MQIQMFDVIIVGGGTAGCVLANRLSAKSNLKILLLEAGANRNDDPKVLTPLSSRRMFKDPEYDWCFTSMPQERCDGRIFEHTRGRMLGGSSGINSHSLVYPNKAMHDAWASISGDESWAWKNMEQYYHKFHSTQVSDGGHDEEGTVQASFPRHMHLLQTAWEDVFDSLGAKSPKDGASGEVIGGFTTTNSIDGRLGKGERSFAGNTYLVEALGRENLVVETDALVHKIIFDKVGDGSDSQLKASGVSYEKAGQMVVAHAKGEVVLCAGAFGSPKILELSGIGGRKVLESTGIECLLDSPLVGENLQDHLNYGPSIEVRPEIATMDIALRDQAVAAAQREEYDKHRTGPLSEGAAYSFAHWPLQLFNTPAEEDDLHKLVAKLGSSAPDKLSQEQDNFISRMILEKTEASATVFMTRLQRYTGPSNRADGNYMTVVAMLSHPYSRGSVHIQSTNVHEQPRIDNAYLTHPLDEEILAKHALQIEKLLIQDTYSSILRPSGNRLPREFNKVLKNEDEAKEAIKKYSATNYHPCGTCVMTRYELGGVVDGQLKVHDTTNLRVCDASIFPIIPRGNILSTVYATAERGADIVLECLAGKQ

SEQ ID NO: 21094 - DNA, 1761 bp, Muscodor strobelii
  misc_feature: SGI cDNA ID NO. 567134
  misc_feature: Encodes the peptide sequence at SEQ ID NO 21095
atggctaaagtcattgtcaagagcgcccgaggtcttcaggccacctttttccgaaacgacattcaacattttcccgaccacaccctccgcgagatggctgcgcgcactcgcccggtcgtgatcccgccgagcatggccgagagtacccagaccgacgacgatgtggccttgactcccgacgataccacagcacagtcggtgtcgtcgtcgcccattgtgcatcctgtcgttgacggtgcctcacttgatgatgcatcgcagcagagtccccccatgtcgcgatcgcactctttctccggtaatagttcatatcacgaagattgggattcacttccgcccctcgaccgcctgaccgtgttggatcttcttgacaattttgcccttccacaacgactagagaagctgcagaggggtatttccgctcagacagagaagtacagaaagtcgcgcgctgcccttaagacgagaggtgccgaggcccgcgagcgcatggtagaggagtggcgacggagagttccctcggccgacgaacagcttgagaggtatcgaaagcgcatgaagcagaatgtcgagaggctcgggcaacaatggaatgacaccaaggccatcaccctacgcgagaagatctcgttcatttgcggtgtcatgaacatcttcatcagcggctacctcatcggcgcctggcccgagtggttccacatttggttcaccatccaggttctctacttcatgcccattcggttttacacataccaaaaacgcggctatcactacttcttagcagatctatgctactttgttaacttcctattgttcatcagcatctggttcttcccgacctccaagcgtctgttcatagctacgtactgtctggcctttggaaacaatgccgtagccatcatcatgtggcggaactcactagtattccacgacttcgacaaagtcacatctctgttcattcatattatgccctgcgcgaccctacattgtataacgcacttgtacgatcccgaagggcagcgagaacgattccctgcactatgggttgtcaaaacctcaccgcccggctcgccgactgcgtacagcaacgtcatctccatgattgcttggtctactattccctatgctctctggcagataagttactactacctcatcactgtgcgtcgccgcgagaagattgctgctggccgaccgacttcttttacgtggctacgaaagtcatattcgaagaacgcgctcggaaaattcgttctggctcttcctgcgagtctacaagaaccggccttcatgatgatacaatatctctacgcagtgtgcaccatgatcccatgtcctctatggttctacagtcgctgggcttcggcaggctttctcatgattgtctttacatggagtgtgtataacggctcgacgtactacatcgatgtatttggtaagcggttccaaaaggagctggagtcgatgaaggcagaggtctccaaatggcaatcgaaccctgaactcatgttgcactctccgatgatgacgcctgccatcagcaccaacgatgatttaaaacgcttgtcgtccagaagtgaggatgttgcgaaggagactgaggaggctgagaaggagatacgggtcacggacccagctagtgaacgacggttgagcgttgatgagattccactgttgagtgaggagcggactcatggaactagctctggggccgatggtggtgacagggaggctgccagagcgaggaaagttgcggcgtag

SEQ ID NO: 21095 - protein, 586 aa, Muscodor strobelii
  misc_feature: SGI Peptide ID NO. 567134
  misc_feature (35)..(586): NCBI GI: 116206610 Blast Desc: CHGG_02598 [Chaetomium globosum CBS 148.51] gi|88183195|gb|EAQ90663.1| CHGG_02598 [Chaetomium globosum CBS 148.51]
  misc_feature (46)..(583): NCBI GI: 256728657 Blast Desc: [Nectria haematococca mpVI 77-13-4]
  misc_feature (51)..(586): NCBI GI: 85102875 Blast Desc: NCU01324 [Neurospora crassa OR74A] gi|11595594|emb|CAC18214.1| conserved [Neurospora crassa] gi|28922955|gb|EAA32174.1| conserved [Neurospora crassa OR74A]
  misc_feature (37)..(583): NCBI GI: 39978017 Blast Desc: MGG_06893 [Magnaporthe grisea 70-15] gi|145013540|gb|EDJ98181.1| MGG_06893 [Magnaporthe grisea 70-15]
  misc_feature (46)..(584): NCBI GI: 46110054 Blast Desc: FG01909.1 [Gibberella zeae PH-1]
  misc_feature (47)..(583): NCBI GI: 171692191 Blast Desc: protein product [Podospora anserina] gi|170946044|emb|CAP72845.1| protein product [Podospora anserina]
  misc_feature (36)..(584): NCBI GI: 154301932 Blast Desc: BC1G_10203 [Botryotinia fuckeliana B05.10] gi|150855595|gb|EDN30787.1| BC1G_10203 [Botryotinia fuckeliana B05.10]
  misc_feature (36)..(586): NCBI GI: 156051448 Blast Desc: SS1G_07131 [Sclerotinia sclerotiorum 1980] gi|154704909|gb|EDO04648.1| SS1G_07131 [Sclerotinia sclerotiorum 1980]
  misc_feature (37)..(569): NCBI GI: 226292657 Blast Desc: conserved [Paracoccidioides brasiliensis Pb18]
  misc_feature (37)..(582): NCBI GI: 226282184 Blast Desc: conserved [Paracoccidioides brasiliensis Pb01]
MAKVIVKSARGLQATFFRNDIQHFPDHTLREMAARTRPVVIPPSMAESTQTDDDVALTPDDTTAQSVSSSPIVHPVVDGASLDDASQQSPPMSRSHSFSGNSSYHEDWDSLPPLDRLTVLDLLDNFALPQRLEKLQRGISAQTEKYRKSRAALKTRGAEARERMVEEWRRRVPSADEQLERYRKRMKQNVERLGQQWNDTKAITLREKISFICGVMNIFISGYLIGAWPEWFHIWFTIQVLYFMPIRFYTYQKRGYHYFLADLCYFVNFLLFISIWFFPTSKRLFIATYCLAFGNNAVAIIMWRNSLVFHDFDKVTSLFIHIMPCATLHCITHLYDPEGQRERFPALWVVKTSPPGSPTAYSNVISMIAWSTIPYALWQISYYYLITVRRREKIAAGRPTSFTWLRKSYSKNALGKFVLALPASLQEPAFMMIQYLYAVCTMIPCPLWFYSRWASAGFLMIVFTWSVYNGSTYYIDVFGKRFQKELESMKAEVSKWQSNPELMLHSPMMTPAISTNDDLKRLSSRSEDVAKETEEAEKEIRVTDPASERRLSVDEIPLLSEERTHGTSSGADGGDREAARARKVAA

SEQ ID NO: 21096 - DNA, 1990 bp, Muscodor strobelii
  misc_feature: SGI EST ID NO. CUFF.50315.0
  misc_feature: Variant of the nucleotide sequence at SEQ ID NO 21094
cttcaggccacctttttccgaaacgacattcaacattttcccgaccacaccctccgcgagatggctgcgcgcactcgcccggtcgtgatcccgccgagcatggccgagagtacccagaccgacgacgatgtggccttgactcccgacgataccacagcacagtcggtgtcgtcgtcgcccattgtgcatcctgtcgttgacggtgcctcacttgatgatgcatcgcagcagagtccccccatgtcgcgatcgcactctttctccggtaatagttcatatcacgaagattgggattcacttccgcccctcgaccgcctgaccgtgttggatcttcttgacaattttgcccttccacaacgactagagaagctgcagaggggtatttccgctcagacagagaagtacagaaagtcgcgcgctgcccttaagacgagaggtgccgaggcccgcgagcgcatggtagaggagtggcgacggagagttccctcggccgacgaacagcttgagaggtatcgaaagcgcatgaagcagaatgtcgagaggctcgggcaacaatggaatgacaccaaggccatcaccctacgcgagaagatctcgttcatttgcggtgtcatgaacatcttcatcagcggctacctcatcggcgcctggcccgagtggttccacatttggttcaccatccaggttctctacttcatgcccattcggttttacacataccaaaaacgcggctatcactacttcttagcagatctatgctactttgttaacttcctattgttcatcagcatctggttcttcccgacctccaagcgtctgttcatagctacgtactgtctggcctttggaaacaatgccgtagccatcatcatgtggcggaactcactagtattccacgacttcgacaaagtcacatctctgttcattcatattatgccctgcgcgaccctacattgtataacgcacttgtacgatcccgaagggcagcgagaacgattccctgcactatgggttgtcaaaacctcaccgcccggctcgccgactgcgtacagcaacgtcatctccatgattgcttggtctactattccctatgctctctggcagataagttactactacctcatcactgtgcgtcgccgcgagaagattgctgctggccgaccgacttcttttacgtggctacgaaagtcatattcgaagaacgcgctcggaaaattcgttctggctcttcctgcgagtctacaagaaccggccttcatgatgatacaatatctctacgcagtgtgcaccatgatcccatgtcctctatggttctacagtcgctgggcttcggcaggctttctcatgattgtctttacatggagtgtgtataacggctcgacgtactacatcgatgtatttggtaagcggttccaaaaggagctggagtcgatgaaggcagaggtctccaaatggcaatcgaaccctgaactcatgttgcactctccgatgatgacgcctgccatcagcaccaacgatgatttaaaacgcttgtcgtccagaagtgaggatgttgcgaaggagactgaggaggctgagaaggagatacgggtcacggacccagctagtgaacgacggttgagcgttgatgagattccactgttgagtgaggagcggactcatggaactagctctggggccgatggtggtgacagggaggctgccagagcgaggaaagttgcggcgtagcgggattgagatctgagatctgacggaaagtgtaaaggatgtgcagtttggcaccctaaacctggatataattatgagaggggcttcgccgcgcaacgatatgatggagtctcgtatttttagatgtttagaccttgtttattggacgggatggtagaatttgttctagcattttcttacctggtcaggcggagcgtgttaggtgttctgggagatcatagatacccttttccgttccttaatgagacaattgcatgacaat

SEQ ID NO: 21097 - DNA, 3774 bp, Muscodor strobelii
  misc_feature: SGI cDNA ID NO. 567135
  misc_feature: Encodes the peptide sequence at SEQ ID NO 21098
atggggaaactcgtgcgcctcgagctatttaacttcaagtcctacaagggccatcacaccctcttgttcggcgattcctatttcacctcgatcatcggccccaatggatccggcaagtccaattctatggacgcaatctccttcgtccttggtatcaggtcctcccaactccggtccgcccagctcaaagatttagtgtatcgcggtcgcgtgctcaagacctccaagatcaacgatgacggctccgctgtcgactccctggctaatggccagacgaatggacacgtaaatggagacgacgatgggccaaagcgtggcgaccccaagaccgcatgggttatggccgtttacgaggacgatgtgggggacgagcacaggtggaagcgcagcatcaccaaccagggttcgagcgagtatcgcatcaatgacaaggtggtcaccgcgcagcaatacaacgacgccctcgagatcgaaaacatcttgatcaaggccaagaacttcctagttttccagggcgatgtcgagcatattgcctcccagtctccccaggaactcacaaagatgatcgagcagatctccggcagtctcgaatacaaggacgagtacgagcgattgcaaaccgaggcagaccagtcggctgagaactctgccttccagctccaacggcgcagaggtatcaactcggagatcaggcagtaccaggaacagaagaaagaagcagatagtttccaggccaagactgctgagcgcgatactgccatcgtcactcacatcctctggaaattgtaccgatttcaacaggtcatggacgactccagtgctcaaatccaggaacaccaggaaaatctcaaggaattccgacgcaacgtgcaggctttcgaggtgaagcttgaagaggcccgaaaagagcaagtcgacgcggccaagaacgtccacaaggtcgagcgccaaattaagaggcagagaaacgaactcaacgagaaagagcagagtcttgttcccatagaggagaaggtccagcagacaactaaacaggcagagactctacgtcagcgcctagactctgtacaaaaggagtgtgataagcacgctgactcgttgaagaagaacgagaaggatctcgcgactgtacaaaaagcccagaagaaatttgaagacgaatggaaggaggccataaagaagcaaggcaaggaattgagcgaagccgatcgcaaagagtacaacacactgagggcgcaagccatggccaactccgccgacaaccaatcagagctggaagggcttgtccgtcagttgaagacggatgaggttactgtcagcagtatgaaaggcaaagtcgatgcctaccaagctgccgccgagaaactcgagggccaattagccacaatcaaagaacgacgcgatgcgaccaaagctaccatcacgcagttatcggaagagataacgacgaagaaaaaggatttcaacaacatgcaatcagagatgaagagaaattcgcagctgcgaaacgagcttcaagagaagaggattgcgttgcttcaacagaaaggagccgcagaagatggacgacgccaaaccaataaagagaggaacatgagagaaatggtcgcatcactcaagcgtctgtttccaggtgtaaaaggccaagtgggcgatctctgcaagccaaaacagaagaaatacgaagaagctgtcatcattgcgctcggccgcgacttcgattctgtcatcgtcgatagcgagagaacgggtattgcctgtgtgcaacatctgaaagaaaaccggttctccccgatgactttcatcccgcttgacaacatcaaggtcaatgcgcccaacagtgcgatcaagggtgtgaatggcgcgcggttgaccatcgataccatcgacttcgatgcgacgctcgagcgcgccatgtcatacgcgtgcggaagctccattgtttgcgacgatcttaagacggccaagcacatatgctacgaccggaagatccgggttaaagccgtgaccatagatgggaccgtcatccacaaggctggtcttatgacaggtggtcgtggtcctgatgctaagggtaaacgccgctttgaagatgcggatctccaaagcttggagaaggctctagataagaaccagcaagagttagacgctctaccgaagggcgatcgccgagcagctgaagaagcattacgcaacgagctcgctgatctcgaatacaggctggaccgcgctaagaccgagtacactggcttcgagcagaacttgaagagtaagactaatgaatttgaccacgtaaagaagcaacttaaagagtggcgacctaaatacgaggcaaagacaaaggaactgcaaaagtctcggtcgcttgttgataggtacaagaagtcgaatgccgagatagaagacaagatctttgctggtttctgcaagcgcctcggttactcagatattcgggcatatgaggctcagcagggcagctgggaacaagaggcagcagagaagcgcgcccagttcgaccggcaaattgataggctgaacacgaatagaacatgggaagaatctcaacacaaggaagtagaagccagacgtaagaagatggaaagccagctcaaggtgtactccgcagacgtcaaaggctacaaggctgaaaaggtgaagatcgagaaagcgatgggcactgatcaggataatctcgatgctctcgaagaacagctaggcgagttcaaggccgagctcgaggaacagaacgagaaggtcagcactgccaaggccgacgtacaaaagcgaagcaaagatatcgataccagactcaaggccatcggtgtcttagaaacagaggtccagaagaacagtgccgctaagtttggtcttttaaggaggtgtcgcctcgagcagatcaacataccactttcagaaggttccttggatgagttgccaaacgaggataatcttctgcagggcgacccggatgccatggacgtcgacgatggtgacgaagctgatatgatggaggatgccatgaacgatcacggcattgagatcaattttgacgaattagatgatgagctaaaggaatccgatgacgccgaaaaagtcgaggaggatctagagaccaagatttcctcgctcacagcagaactagagaagctaaatccgaatatgcgcgcgatggagcgtctagaggtcgtagaagccaggctcaaggcaacagacaaagactacgaggactcgaagacgaaattcagagcagcgaaagaagccttcgacgaagtgaaagccaagcgcttcgaactcttcgacaaggcattcacacacatccgcgagcaaatctcacaagtctacaaagacctaacgcgatccgatcagtacccactaggcggccaggcatatctcgacattgaggaagacacagataagccctacctatcgggcatcaaataccacgccatgccgccgctcaagcgcttccgtgacatggaacatctgtccggaggcgagaagacgatggcggcgcttgcgctggtgttcgcgatccatagtttccagccaagtcctttctttgtgctggatgaggttgatgctgcgctggataatgcgaatgtggagaagatcaaaaattatattaggaaccatgcaggtcctggtatgcagttcatcgtcatcagcttgaaggcgggactgttccaggatagtgagagcttggtcggtgtttatagggatcaggatgtcaattcgagtaagacgctgacgctggatttgcggaaatacgtctag

SEQ ID NO: 21098 - protein, 1257 aa, Muscodor strobelii
  misc_feature: SGI Peptide ID NO. 567135
  misc_feature (543)..(659): Pfam Id: PF06470 Pfam Desc: SMC proteins Flexible Hinge Domain
  misc_feature (3)..(1245): Pfam Id: PF02463 Pfam Desc: RecF/RecN/SMC N terminal domain
  misc_feature (1)..(1256): NCBI GI: 164426312 Blast Desc: NCU01323 [Neurospora crassa OR74A] gi|157071285|gb|EAA32173.2| NCU01323 [Neurospora crassa OR74A]
  misc_feature (1)..(1257): NCBI GI: 171692189 Blast Desc: protein product [Podospora anserina] gi|170946043|emb|CAP72844.1| protein product [Podospora anserina]
  misc_feature (1)..(1253): NCBI GI: 11595593 Blast Desc: related to SMC1 protein [Neurospora crassa]
  misc_feature (1)..(1252): NCBI GI: 46110056 Blast Desc: FG01910.1 [Gibberella zeae PH-1]
  misc_feature (1)..(1257): NCBI GI: 256728473 Blast Desc: condensin complex component SMC1 [Nectria haematococca mpVI 77-13-4]
  misc_feature (43)..(1257): NCBI GI: 116206612 Blast Desc: CHGG_02599 [Chaetomium globosum CBS 148.51] gi|88183196|gb|EAQ90664.1| CHGG_02599 [Chaetomium globosum CBS 148.51]
  misc_feature (1)..(1256): NCBI GI: 156051446 Blast Desc: SS1G_07130 [Sclerotinia sclerotiorum 1980] gi|154704908|gb|EDO04647.1| SS1G_07130 [Sclerotinia sclerotiorum 1980]
  misc_feature (43)..(1257): NCBI GI: 154301928 Blast Desc: BC1G_10201 [Botryotinia fuckeliana B05.10] gi|150855593|gb|EDN30785.1| BC1G_10201 [Botryotinia fuckeliana B05.10]
  misc_feature (42)..(1256): NCBI GI: 145605734 Blast Desc: MGG_06894 [Magnaporthe grisea 70-15] gi|145013539|gb|EDJ98180.1| MGG_06894 [Magnaporthe grisea 70-15]
  misc_feature (109)..(1252): NCBI GI: 261360799 Blast Desc: conserved [Verticillium albo-atrum VaMs.102]
MGKLVRLELFNFKSYKGHHTLLFGDSYFTSIIGPNGSGKSNSMDAISFVLGIRSSQLRSAQLKDLVYRGRVLKTSKINDDGSAVDSLANGQTNGHVNGDDDGPKRGDPKTAWVMAVYEDDVGDEHRWKRSITNQGSSEYRINDKVVTAQQYNDALEIENILIKAKNFLVFQGDVEHIASQSPQELTKMIEQISGSLEYKDEYERLQTEADQSAENSAFQLQRRRGINSEIRQYQEQKKEADSFQAKTAERDTAIVTHILWKLYRFQQVMDDSSAQIQEHQENLKEFRRNVQAFEVKLEEARKEQVDAAKNVHKVERQIKRQRNELNEKEQSLVPIEEKVQQTTKQAETLRQRLDSVQKECDKHADSLKKNEKDLATVQKAQKKFEDEWKEAIKKQGKELSEADRKEYNTLRAQAMANSADNQSELEGLVRQLKTDEVTVSSMKGKVDAYQAAAEKLEGQLATIKERRDATKATITQLSEEITTKKKDFNNMQSEMKRNSQLRNELQEKRIALLQQKGAAEDGRRQTNKERNMREMVASLKRLFPGVKGQVGDLCKPKQKKYEEAVIIALGRDFDSVIVDSERTGIACVQHLKENRFSPMTFIPLDNIKVNAPNSAIKGVNGARLTIDTIDFDATLERAMSYACGSSIVCDDLKTAKHICYDRKIRVKAVTIDGTVIHKAGLMTGGRGPDAKGKRRFEDADLQSLEKALDKNQQELDALPKGDRRAAEEALRNELADLEYRLDRAKTEYTGFEQNLKSKTNEFDHVKKQLKEWRPKYEAKTKELQKSRSLVDRYKKSNAEIEDKIFAGFCKRLGYSDIRAYEAQQGSWEQEAAEKRAQFDRQIDRLNTNRTWEESQHKEVEARRKKMESQLKVYSADVKGYKAEKVKIEKAMGTDQDNLDALEEQLGEFKAELEEQNEKVSTAKADVQKRSKDIDTRLKAIGVLETEVQKNSAAKFGLLRRCRLEQINIPLSEGSLDELPNEDNLLQGDPDAMDVDDGDEADMMEDAMNDHGIEINFDELDDELKESDDAEKVEEDLETKISSLTAELEKLNPNMRAMERLEVVEARLKATDKDYEDSKTKFRAAKEAFDEVKAKRFELFDKAFTHIREQISQVYKDLTRSDQYPLGGQAYLDIEEDTDKPYLSGIKYHAMPPLKRFRDMEHLSGGEKTMAALALVFAIHSFQPSPFFVLDEVDAALDNANVEKIKNYIRNHAGPGMQFIVISLKAGLFQDSESLVGVYRDQDVNSSKTLTLDLRKYV

SEQ ID NO: 21099 - DNA, 6022 bp, Muscodor strobelii
  misc_feature: SGI EST ID NO. CUFF.50450.0
  misc_feature: Variant of the nucleotide sequence at SEQ ID NO 21097
tcctacaagggccatcacaccctcttgttcggcgattcctatttcacctcgatcatcggccccaatggatccggcaagtccaattctatggacgcaatctccttcgtccttggtatcaggtcctcccaactccggtccgcccagctcaaagatttagtgtatcgcggtcgcgtgctcaagacctccaagatcaacgatgacggctccgctgtcgactccctggctaatggccagacgaatggacacgtaaatggagacgacgatgggccaaagcgtggcgaccccaagaccgcatgggttatggccgtttacgaggacgatgtgggggacgagcacaggtggaagcgcagcatcaccaaccagggttcgagcgagtatcgcatcaatgacaaggtggtcaccgcgcagcaatacaacgacgccctcgagatcgaaaacatcttgatcaaggccaagaacttcctagttttccagggcgatgtcgagcatattgcctcccagtctccccaggaactcacaaagatgatcgagcagatctccggcagtctcgaatacaaggacgagtacgagcgattgcaaaccgaggcagaccagtcggctgagaactctgccttccagctccaacggcgcagaggtatcaactcggagatcaggcagtaccaggaacagaagaaagaagcagatagtttccaggccaagactgctgagcgcgatactgccatcgtcactcacatcctctggaaattgtaccgatttcaacaggtcatggacgactccagtgctcaaatccaggaacaccaggaaaatctcaaggaattccgacgcaacgtgcaggctttcgaggtgaagcttgaagaggcccgaaaagagcaagtcgacgcggccaagaacgtccacaaggtcgagcgccaaattaagaggcagagaaacgaactcaacgagaaagagcagagtcttgttcccatagaggagaaggtccagcagacaactaaacaggcagagactctacgtcagcgcctagactctgtacaaaaggagtgtgataagcacgctgactcgttgaagaagaacgagaaggatctcgcgactgtacaaaaagcccagaagaaatttgaagacgaatggaaggaggccataaagaagcaaggcaaggaattgagcgaagccgatcgcaaagagtacaacacactgagggcgcaagccatggccaactccgccgacaaccaatcagagctggaagggcttgtccgtcagttgaagacggatgaggttactgtcagcagtatgaaaggcaaagtcgatgcctaccaagctgccgccgagaaactcgagggccaattagccacaatcaaagaacgacgcgatgcgaccaaagctaccatcacgcagttatcggaagagataacgacgaagaaaaaggatttcaacaacatgcaatcagagatgaagagaaattcgcagctgcgaaacgagcttcaagagaagaggattgcgttgcttcaacagaaaggagccgcagaagatggacgacgccaaaccaataaagagaggaacatgagagaaatggtcgcatcactcaagcgtctgtttccaggtgtaaaaggccaagtgggcgatctctgcaagccaaaacagaagaaatacgaagaagctgtcatcattgcgctcggccgcgacttcgattctgtcatcgtcgatagcgagagaacgggtattgcctgtgtgcaacatctgaaagaaaaccggttctccccgatgactttcatcccgcttgacaacatcaaggtcaatgcgcccaacagtgcgatcaagggtgtgaatggcgcgcggttgaccatcgataccatcgacttcgatgcgacgctcgagcgcgccatgtcatacgcgtgcggaagctccattgtttgcgacgatcttaagacggccaagcacatatgctacgaccggaagatccgggttaaagccgtgaccatagatgggaccgtcatccacaaggctggtcttatgacaggtggtcgtggtcctgatgctaagggtaaacgccgctttgaagatgcggatctccaaagcttggagaaggctctagataagaaccagcaagagttagacgctctaccgaagggcgatcgccgagcagctgaagaagcattacgcaacgagctcgctgatctcgaatacaggctggaccgcgctaagaccgagtacactggcttcgagcagaacttgaagagtaagactaatgaatttgaccacgtaaagaagcaacttaaagagtggcgacctaaatacgaggcaaagacaaaggaactgcaaaagtctcggtcgcttgttgataggtacaagaagtcgaatgccgagatagaagacaagatctttgctggtttctgcaagcgcctcggttactcagatattcgggcatatgaggctcagcagggcagctgggaacaagaggcagcagagaagcgcgcccagttcgaccggcaaattgataggctgaacacgaatagaacatgggaagaatctcaacacaaggaagtagaagccagacgtaagaagatggaaagccagctcaaggtgtactccgcagacgtcaaaggctacaaggctgaaaaggtgaagatcgagaaagcgatgggcactgatcaggataatctcgatgctctcgaagaacagctaggcgagttcaaggccgagctcgaggaacagaacgagaaggtcagcactgccaaggccgacgtacaaaagcgaagcaaagatatcgataccagactcaaggccatcggtgtcttagaaacagaggtccagaagaacagtgccgctaagtttggtcttttaaggaggtgtcgcctcgagcagatcaacataccactttcagaaggttccttggatgagttgccaaacgaggataatcttctgcagggcgacccggatgccatggacgtcgacgatggtgacgaagctgatatgatggaggatgccatgaacgatcacggcattgagatcaattttgacgaattagatgatgagctaaaggaatccgatgacgccgaaaaagtcgaggaggatctagagaccaagatttcctcgctcacagcagaactagagaagctaaatccgaatatgcgcgcgatggagcgtctagaggtcgtagaagccaggctcaaggcaacagacaaagactacgaggactcgaagacgaaattcagagcagcgaaagaagccttcgacgaagtgaaagccaagcgcttcgaactcttcgacaaggcattcacacacatccgcgagcaaatctcacaagtctacaaagacctaacgcgatccgatcagtacccactaggcggccaggcatatctcgacattgaggaagacacagataagccctacctatcgggcatcaaataccacgccatgccgccgctcaagcgcttccgtgacatggaacatctgtccggaggcgagaagacgatggcggcgcttgcgctggtgttcgcgatccatagtttccagccaagtcctttctttgtgctggatgaggttgatgctgcgctggataatgcgaatgtggagaagatcaaaaattatattaggaaccatgcaggtcctggtatgcagttcatcgtcatcagcttgaaggcgggactgttccaggatagtgagagcttggtcggtgtttatagggatcaggatgtcaattcgagtaagacgctgacgctggatttgcggaaatacgtctagatagactggcaacgactggaacgaggcaggatgcaacaacgtcttacttgtggtatatcacgatgcgtttcccacaacgaaccatttgcttgggcgttatccccgggagcgcagtctgatggcttggactaatattgcacttttaatacggcgcgcaatggacgctacatgctactaggaaacctatttctgtatgatactagagaaccagctcggcttctctttgttgctagcgagctgggctttgatgaggatgaagatggatgtatatggaatttgatgattttacttcctctactctccagagcatagatcggactagattcgggatgatgtgattctgtaatgtgtggtgtttactgccatctcagcagccaactttaaatttttcgtttccgaaaccaaacgccagtgtttttccctctttcgctttgaggccatgcggggcgcctattggcatttcccatgcaatatatgtacagaactatcgaaaatgccaaataaaagaaactccagggatcccaccccaagtcatccctaaacatcctcaaaagcaacatcctcctcatcactatcctcatcagccggctcctcaaccttgaccttcttagccggtctatcctcactcttgggcgtatccgcgacactcgtcgtcgcactactcgctctcttctcccctgcccctcctcctattcctcccagaccactcggtggtacactaccaccagcagcgatatcctcaaactcctcttcttcctcttcatcatcttcttcgtcctccgaatcaacggcctctgcttctttcctcctatctgcctcctgctgcgcagcgagcatctgaaacaagttggtcatttcttcgttctgcataccgtcgtccaccatatccgccaccttcgcatcgctgtcttcttctttcgttccattcgcagccgcatccttggtgctataactctggccgctcacagtagactgcgtatgccagctcggcagggcattcgccgcggcgatcttttctttcctctccttctcggcctctttttcggcatccgtggggccgtcgctatcggtaatactgatagcgatactctgcggtcccgtgttcgccatgcccttgactgccgtgggcttgctgatactctccaccacgacggattccgcaactaggttcgtgtctggtcgtattacgtcccgatgggccgccatggctgtgtcgaagtctatgtcgggtatgacgacactgtctaatttcggtaggagctcggtgatgaaacggagttggttattgagtttctttgacttctcgtggcctcctgcatcgcgctctggatcgaagatcaggactgagtcacaacgatgacataagaaaccacgcgctgggtccgccttgtcaaggacctccatagttgtccactcagcctgacatctcctacagaaatactccttcttctcggctgctggctttgcgtcaccctggacggccttgtcgagttggtaggtccgccattttatgacatcgatagctttgcggtagtcgatatagtagtatgtgcggtttgtgggccgctgctgccccgtcttgagttctggcctggtatggacttgcaggaagcgctcctcgcgcaacttgccgcagagcttgtgcaggtctttgaggttcatgttcatgaggaggccgagatcgtcgtcgcgcaaggcggagtggaagcagagggcgtcgatgatgaggattaggcgggtgtcggagttgggaggcccatagaaggtgcgcattactgagcggagaagctcctgggccatgtctagggccttggagttggggtttgtgtccatggtgaaaatgtgattaaggtactcaagatgacgatgatgcggtacggatgcgctcgatctcgtgccagactcaatggcgtcggtcgcgatcgtggcgcagagagtgcagaaaggcgccgagaggagagcgtattagacctgcagctacacaggtgccgcttaccctcctatttcaacaagatgccattcgtgatcgcgtgaaggatggattcgatgcggtgcgatgcgatgcagtggcgaagacaacagaggcggtcgaggccaggcggcgcatgcgacaaagccgttgtcgggtgcagatttccgagacttgagaactgcgaaagggagggcgcgcgcagagccgtgactaccttatggtgcaggtgatgtaggggcgaagagaaagagagagggcgagtcggagcgggcgaagtggttgctcgcctgaaggctcgcaaggctgaggtcgtcg

SEQ ID NO: 21100 - DNA, 3957 bp, Muscodor strobelii
  misc_feature: SGI cDNA ID NO. 567136
  misc_feature: Encodes the peptide sequence at SEQ ID NO 21101
atggggaaactcgtgcgcctcgagctatttaacttcaagtcctacaagggccatcacaccctcttgttcggcgattcctatttcacctcgatcatcggccccaatggatccggcaagtccaattctatggacgcaatctccttcgtccttggtatcaggtcctcccaactccggtccgcccagctcaaagatttagtgtatcgcggtcgcgtgctcaagacctccaagatcaacgatgacggctccgctgtcgactccctggctaatggccagacgaatggacacgtaaatggagacgacgatgggccaaagcgtggcgaccccaagaccgcatgggttatggccgtttacgaggacgatgtgggggacgagcacaggtggaagcgcagcatcaccaaccagggttcgagcgagtatcgcatcaatgacaaggtggtcaccgcgcagcaatacaacgacgccctcgagatcgaaaacatcttgatcaaggccaagaacttcctagttttccagggcgatgtcgagcatattgcctcccagtctccccaggaactcacaaagatgatcgagcagatctccggcagtctcgaatacaaggacgagtacgagcgattgcaaaccgaggcagaccagtcggctgagaactctgccttccagctccaacggcgcagaggtatcaactcggagatcaggcagtaccaggaacagaagaaagaagcagatagtttccaggccaagactgctgagcgcgatactgccatcgtcactcacatcctctggaaattgtaccgatttcaacaggtcatggacgactccagtgctcaaatccaggaacaccaggaaaatctcaaggaattccgacgcaacgtgcaggctttcgaggtgaagcttgaagaggcccgaaaagagcaagtcgacgcggccaagaacgtccacaaggtcgagcgccaaattaagaggcagagaaacgaactcaacgagaaagagcagagtcttgttcccatagaggagaaggtccagcagacaactaaacaggcagagactctacgtcagcgcctagactctgtacaaaaggagtgtgataagcacgctgactcgttgaagaagaacgagaaggatctcgcgactgtacaaaaagcccagaagaaatttgaagacgaatggaaggaggccataaagaagcaaggcaaggaattgagcgaagccgatcgcaaagagtacaacacactgagggcgcaagccatggccaactccgccgacaaccaatcagagctggaagggcttgtccgtcagttgaagacggatgaggttactgtcagcagtatgaaaggcaaagtcgatgcctaccaagctgccgccgagaaactcgagggccaattagccacaatcaaagaacgacgcgatgcgaccaaagctaccatcacgcagttatcggaagagataacgacgaagaaaaaggatttcaacaacatgcaatcagagatgaagagaaattcgcagctgcgaaacgagcttcaagagaagaggattgcgttgcttcaacagaaaggagccgcagaagatggacgacgccaaaccaataaagagaggaacatgagagaaatggtcgcatcactcaagcgtctgtttccaggtgtaaaaggccaagtgggcgatctctgcaagccaaaacagaagaaatacgaagaagctgtcatcattgcgctcggccgcgacttcgattctgtcatcgtcgatagcgagagaacgggtattgcctgtgtgcaacatctgaaagaaaaccggttctccccgatgactttcatcccgcttgacaacatcaaggtcaatgcgcccaacagtgcgatcaagggtgtgaatggcgcgcggttgaccatcgataccatcgacttcgatgcgacgctcgagcgcgccatgtcatacgcgtgcggaagctccattgtttgcgacgatcttaagacggccaagcacatatgctacgaccggaagatccgggttaaagccgtgaccatagatgggaccgtcatccacaaggctggtcttatgacaggtggtcgtggtcctgatgctaagggtaaacgccgctttgaagatgcggatctccaaagcttggagaaggctctagataagaaccagcaagagttagacgctctaccgaagggcgatcgccgagcagctgaagaagcattacgcaacgagctcgctgatctcgaatacaggctggaccgcgctaagaccgagtacactggcttcgagcagaacttgaagagtaagactaatgaatttgaccacgtaaagaagcaacttaaagagtggcgacctaaatacgaggcaaagacaaaggaactgcaaaagtctcggtcgcttgttgataggtacaagaagtcgaatgccgagatagaagacaagatctttgctggtttctgcaagcgcctcggttactcagatattcgggcatatgaggctcagcagggcagctgggaacaagaggcagcagagaagcgcgcccagttcgaccggcaaattgataggctgaacacgaatagaacatgggaagaatctcaacacaaggaagtagaagccagacgtaagaagatggaaagccagctcaaggtgtactccgcagacgtcaaaggctacaaggctgaaaaggtgaagatcgagaaagcgatgggcactgatcaggataatctcgatgctctcgaagaacagctaggcgagttcaaggccgagctcgaggaacagaacgagaaggtcagcactgccaaggccgacgtacaaaagcgaagcaaagatatcgataccagactcaaggccatcggtgtcttagaaacagaggtccagaagaacagtgccgctaagtttggtcttttaaggaggtgtcgcctcgagcagatcaacataccactttcagaaggttccttggatgagttgccaaacgaggataatcttctgcagggcgacccggatgccatggacgtcgacgatggtgacgaagctgatatgatggaggatgccatgaacgatcacggcattgagatcaattttgacgaattagatgatgagctaaaggaatccgatgacgccgaaaaagtcgaggaggatctagagaccaagatttcctcgctcacagcagaactagagaagctaaatccgaatatgcgcgcgatggagcgtctagaggtcgtagaagccaggctcaaggcaacagacaaagactacgaggactcgaagacgaaattcagagcagcgaaagaagccttcgacgaagtgaaagccaagcgcttcgaactcttcgacaaggcattcacacacatccgcgagcaaatctcacaagtctacaaagacctaacgcgatccgatcagtacccactaggcggccaggcatatctcgacattgaggaagacacagataagccctacctatcgggcatcaaataccacgccatgccgccgctcaagcgcttccgtgacatggaacatctgtccggaggcgagaagacgatggcggcgcttgcgctggtgttcgcgatccatagtttccagccaagtcctttctttgtgctggatgaggttgatgctgcgctggataatgcgaatgtggagaagatcaaaaattatattaggaaccatgcaggtcctggtatgcagttcatcgtcatcagcttgaaggcgggactgttccaggatagtgagagcttggtcggtgtttatagggatcaggatgtcaattcgagtaagacgctgacgctggatgtgagtctttcccctgaaattggagagtctgatttggttggccgtgtactgacttggggaatagttgcggaaatacgtctagatagactggcaacgactggaacgaggcaggatgcaacaacgtcttacttgtggtatatcacgatgcgtttcccacaacgaaccatttgcttgggcgttatccccgggagcgcagtctga

SEQ ID NO: 21101 - protein, 1318 aa, Muscodor strobelii
  misc_feature: SGI Peptide ID NO. 567136
  misc_feature (543)..(659): Pfam Id: PF06470 Pfam Desc: SMC proteins Flexible Hinge Domain
  misc_feature (3)..(1245): Pfam Id: PF02463 Pfam Desc: RecF/RecN/SMC N terminal domain
  misc_feature (1)..(1253): NCBI GI: 164426312 Blast Desc: NCU01323 [Neurospora crassa OR74A] gi|157071285|gb|EAA32173.2| NCU01323 [Neurospora crassa OR74A]
  misc_feature (1)..(1257): NCBI GI: 11595593 Blast Desc: related to SMC1 protein [Neurospora crassa]
  misc_feature (1)..(1252): NCBI GI: 46110056 Blast Desc: FG01910.1 [Gibberella zeae PH-1]
  misc_feature (1)..(1253): NCBI GI: 171692189 Blast Desc: protein product [Podospora anserina] gi|170946043|emb|CAP72844.1| protein product [Podospora anserina]
  misc_feature (1)..(1243): NCBI GI: 256728473 Blast Desc: condensin complex component SMC1 [Nectria haematococca mpVI 77-13-4]
  misc_feature (43)..(1253): NCBI GI: 116206612 Blast Desc: CHGG_02599 [Chaetomium globosum CBS 148.51] gi|88183196|gb|EAQ90664.1| CHGG_02599 [Chaetomium globosum CBS 148.51]
  misc_feature (1)..(1253): NCBI GI: 156051446 Blast Desc: SS1G_07130 [Sclerotinia sclerotiorum 1980] gi|154704908|gb|EDO04647.1| SS1G_07130 [Sclerotinia sclerotiorum 1980]
  misc_feature (43)..(1253): NCBI GI: 154301928 Blast Desc: BC1G_10201 [Botryotinia fuckeliana B05.10] gi|150855593|gb|EDN30785.1| BC1G_10201 [Botryotinia fuckeliana B05.10]
  misc_feature (42)..(1253): NCBI GI: 145605734 Blast Desc: MGG_06894 [Magnaporthe grisea 70-15] gi|145013539|gb|EDJ98180.1| MGG_06894 [Magnaporthe grisea 70-15]
  misc_feature (109)..(1252): NCBI GI: 261360799 Blast Desc: conserved [Verticillium albo-atrum VaMs.102]
MGKLVRLELFNFKSYKGHHTLLFGDSYFTSIIGPNGSGKSNSMDAISFVLGIRSSQLRSAQLKDLVYRGRVLKTSKINDDGSAVDSLANGQTNGHVNGDDDGPKRGDPKTAWVMAVYEDDVGDEHRWKRSITNQGSSEYRINDKVVTAQQYNDALEIENILIKAKNFLVFQGDVEHIASQSPQELTKMIEQISGSLEYKDEYERLQTEADQSAENSAFQLQRRRGINSEIRQYQEQKKEADSFQAKTAERDTAIVTHILWKLYRFQQVMDDSSAQIQEHQENLKEFRRNVQAFEVKLEEARKEQVDAAKNVHKVERQIKRQRNELNEKEQSLVPIEEKVQQTTKQAETLRQRLDSVQKECDKHADSLKKNEKDLATVQKAQKKFEDEWKEAIKKQGKELSEADRKEYNTLRAQAMANSADNQSELEGLVRQLKTDEVTVSSMKGKVDAYQAAAEKLEGQLATIKERRDATKATITQLSEEITTKKKDFNNMQSEMKRNSQLRNELQEKRIALLQQKGAAEDGRRQTNKERNMREMVASLKRLFPGVKGQVGDLCKPKQKKYEEAVIIALGRDFDSVIVDSERTGIACVQHLKENRFSPMTFIPLDNIKVNAPNSAIKGVNGARLTIDTIDFDATLERAMSYACGSSIVCDDLKTAKHICYDRKIRVKAVTIDGTVIHKAGLMTGGRGPDAKGKRRFEDADLQSLEKALDKNQQELDALPKGDRRAAEEALRNELADLEYRLDRAKTEYTGFEQNLKSKTNEFDHVKKQLKEWRPKYEAKTKELQKSRSLVDRYKKSNAEIEDKIFAGFCKRLGYSDIRAYEAQQGSWEQEAAEKRAQFDRQIDRLNTNRTWEESQHKEVEARRKKMESQLKVYSADVKGYKAEKVKIEKAMGTDQDNLDALEEQLGEFKAELEEQNEKVSTAKADVQKRSKDIDTRLKAIGVLETEVQKNSAAKFGLLRRCRLEQINIPLSEGSLDELPNEDNLLQGDPDAMDVDDGDEADMMEDAMNDHGIEINFDELDDELKESDDAEKVEEDLETKISSLTAELEKLNPNMRAMERLEVVEARLKATDKDYEDSKTKFRAAKEAFDEVKAKRFELFDKAFTHIREQISQVYKDLTRSDQYPLGGQAYLDIEEDTDKPYLSGIKYHAMPPLKRFRDMEHLSGGEKTMAALALVFAIHSFQPSPFFVLDEVDAALDNANVEKIKNYIRNHAGPGMQFIVISLKAGLFQDSESLVGVYRDQDVNSSKTLTLDVSLSPEIGESDLVGRVLTWGIVAEIRLDRLATTGTRQDATTSYLWYITMRFPQRTICLGVIPGSAV

SEQ ID NO: 21102 - DNA, 6022 bp, Muscodor strobelii; identical to SEQ ID NO: 21099
  misc_feature: SGI EST ID NO. CUFF.50450.0
  misc_feature: Variant of the nucleotide sequence at SEQ ID NO 21100

SEQ ID NO: 21103 - DNA, 1296 bp, Muscodor strobelii
  misc_feature: SGI cDNA ID NO. 567137
  misc_feature: Reduced expression when VOC is produced
  misc_feature: Encodes the peptide sequence at SEQ ID NO 21104
atggacacaaaccccaactccaaggccctagacatggcccaggagcttctccgctcagtaatgcgcaccttctatgggcctcccaactccgacacccgcctaatcctcatcatcgacgccctctgcttccactccgccttgcgcgacgacgatctcggcctcctcatgaacatgaacctcaaagacctgcacaagctctgcggcaagttgcgcgaggagcgcttcctgcaagtccataccaggccagaactcaagacggggcagcagcggcccacaaaccgcacatactactatatcgactaccgcaaagctatcgatgtcataaaatggcggacctaccaactcgacaaggccgtccagggtgacgcaaagccagcagccgagaagaaggagtatttctgtaggagatgtcaggctgagtggacaactatggaggtccttgacaaggcggacccagcgcgtggtttcttatgtcatcgttgtgactcagtcctgatcttcgatccagagcgcgatgcaggaggccacgagaagtcaaagaaactcaataaccaactccgtttcatcaccgagctcctaccgaaattagacagtgtcgtcatacccgacatagacttcgacacagccatggcggcccatcgggacgtaatacgaccagacacgaacctagttgcggaatccgtcgtggtggagagtatcagcaagcccacggcagtcaagggcatggcgaacacgggaccgcagagtatcgctatcagtattaccgatagcgacggccccacggatgccgaaaaagaggccgagaaggagaggaaagaaaagatcgccgcggcgaatgccctgccgagctggcatacgcagtctactgtgagcggccagagttatagcaccaaggatgcggctgcgaatggaacgaaagaagaagacagcgatgcgaaggtggcggatatggtggacgacggtatgcagaacgaagaaatgaccaacttgtttcagatgctcgctgcgcagcaggaggcagataggaggaaagaagcagaggccgttgattcggaggacgaagaagatgatgaagaggaagaagaggagtttgaggatatcgctgctggtggtagtgtaccaccgagtggtctgggaggaataggaggaggggcaggggagaagagagcgagtagtgcgacgacgagtgtcgcggatacgcccaagagtgaggatagaccggctaagaaggtcaaggttgaggagccggctgatgaggatagtgatgaggaggatgttgcttttgaggatgtttag

SEQ ID NO: 21104 - protein, 431 aa, Muscodor strobelii
  misc_feature: SGI Peptide ID NO. 567137
  misc_feature (19)..(201): Pfam Id: PF02002 Pfam Desc: TFIIE alpha subunit
  misc_feature (35)..(201): Pfam Id: PF02002 Pfam Desc: TFIIE alpha subunit
  misc_feature (10)..(417): NCBI GI: 156048368 Blast Desc: SS1G_08915 [Sclerotinia sclerotiorum 1980] gi|154693312|gb|EDN93050.1| SS1G_08915 [Sclerotinia sclerotiorum 1980]
  misc_feature (10)..(340): NCBI GI: 46110042 Blast Desc: FG01903.1 [Gibberella zeae PH-1]
  misc_feature (10)..(416): NCBI GI: 154300698 Blast Desc: BC1G_10937 [Botryotinia fuckeliana B05.10] gi|150856544|gb|EDN31736.1| BC1G_10937 [Botryotinia fuckeliana B05.10]
  misc_feature (10)..(342): NCBI GI: 256728474 Blast Desc: [Nectria haematococca mpVI 77-13-4]
  misc_feature (10)..(431): NCBI GI: 39978049 Blast Desc: MGG_06909 [Magnaporthe grisea 70-15] gi|145013522|gb|EDJ98163.1| MGG_06909 [Magnaporthe grisea 70-15]
  misc_feature (12)..(431): NCBI GI: 261360798 Blast Desc: transcription initiation factor IIE subunit alpha [Verticillium albo-atrum VaMs.102]
  misc_feature (10)..(290): NCBI GI: 85102867 Blast Desc: NCU01322 [Neurospora crassa OR74A] gi|11595592|emb|CAC18212.1| related to transcription initiation factor IIE chain TFA1 [Neurospora crassa] [Neurospora crassa
  misc_feature (10)..(304): NCBI GI: 116206614 Blast Desc: CHGG_02600 [Chaetomium globosum CBS 148.51] gi|88183197|gb|EAQ90665.1| CHGG_02600 [Chaetomium globosum CBS 148.51]
  misc_feature (12)..(292): NCBI GI: 171692187 Blast Desc: protein product [Podospora anserina] gi|170946042|emb|CAP72843.1| protein product [Podospora anserina]
  misc_feature (10)..(414): NCBI GI: 67539992 Blast Desc: AN6166.2 [Aspergillus nidulans FGSC A4] gi|40738762|gb|EAA57952.1| AN6166.2 [Aspergillus nidulans FGSC A4] gi|259479642|tpe|CBF70053.1| TPA: transcription factor TFIIE
  misc_feature: Useful for introducing or modulating the production of volatile compounds
MDTNPNSKALDMAQELLRSVMRTFYGPPNSDTRLILIIDALCFHSALRDDDLGLLMNMNLKDLHKLCGKLREERFLQVHTRPELKTGQQRPTNRTYYYIDYRKAIDVIKWRTYQLDKAVQGDAKPAAEKKEYFCRRCQAEWTTMEVLDKADPARGFLCHRCDSVLIFDPERDAGGHEKSKKLNNQLRFITELLPKLDSVVIPDIDFDTAMAAHRDVIRPDTNLVAESVVVESISKPTAVKGMANTGPQSIAISITDSDGPTDAEKEAEKERKEKIAAANALPSWHTQSTVSGQSYSTKDAAANGTKEEDSDAKVADMVDDGMQNEEMTNLFQMLAAQQEADRRKEAEAVDSEDEEDDEEEEEEFEDIAAGGSVPPSGLGGIGGGAGEKRASSATTSVADTPKSEDRPAKKVKVEEPADEDSDEEDVAFEDV

SEQ ID NO: 21105 - DNA, 4706 bp, Muscodor strobelii
  misc_feature: SGI EST ID NO. CUFF.50450.1
  misc_feature: Variant of the nucleotide sequence at SEQ ID NO 21103
cccttctcgtctattagtctctacaggtattaattgcctgtattaggctggatttgcttcttagcgctcaagagtatctggtcgtcgctagattcactgcataaccagatccagtatcttcatctaagcgtaggtgataacctcacgcggggaaaggggtatcaaaatgctcgtgctccattcctcataacgccctaaaatgcacaaccttcctgaaacgcctctaccaccttatagatcaagccaagcccttccacgagacctgcttcaccatgttctctttccccttgcccttcttcctcttcttccgagcagaaccttcggtctcatcctaagaggccgtcggagtctgcccggtcttgctcttcttccgcttcaacttggacgtgctgctctgcggcgtcttaggcgtcttctcacccgtcttagttcccgtcttcttggtacccgtagcagggctcttggttgaggtgttcaaagcgctcaaaccagacatctggaacttgtccttcctgcccgttgaagtgaggtgaaatgagcccggctgtccggtgatgggattctcgtccatgtagtcgccgccgtattgcatatgtacccacatggattgctctgccagacgcgcatcgacggcatctccgccctctaccttcttgagctccagggagttgccgttcttaggggcagctccttgggcttcgggcatgggcgtagcttctttggaccctgtgatggctcgtggcttagggttgtttgttgcaggcggcatgcggtaggtgtgtcctctggaggggtgccagatgcgcgcctcatcggctgctggaaagcattttgcgagggaggaagagatagtcgacatgcggaagctcaagagttgagccagagtaggcgccatgtagatattttcgcccacaatataataggtagagtggacggtgacatcatcttcggggtccctcttcctcctcgtctgcttcctgatgacccagacaccagttcccatgccggggccagtctcggcgggttcttgggcgacgatgaactcgagccccgacatctcgcgaagtcggccctcgaaggcctcgcgtgtttgcaccaggtacagcatggcggggttaaacagggcctggttggctatgacggcattgtttgaggtcgggtcgaagaagggcgactgggcgaagtagaaaagcaccgagttgctgtggattccctgcatctgctgcgcggcgaacggactacgccattgtatctcgtcgaggggcggttccttggtctgggatgccatggtgtggagaatacagatgaggagatgcaccagcagaacaaaggcggctgagagtcgaacagagcaagggtgacgctctggagttcgccaaagggtggtggtgatagtccaaaagtgaagttgcaagtcgaaagtcgaaagtgtaatggaaggtgcaagttcccatgcaattggaaagctgaggacgctgcagggcgcgcgctgaaagggacaaggattaggtgatgcgatgctgggtcagtttacgctagcaggcagccttagtggagtcccttcaggtaccttcgtcacctgtgaccttgggtgtgaccttggacggaagtttccattcaattattattcatcttcctttcattcatcctctcactccgacgacctcagccttgcgagccttcaggcgagcaaccacttcgcccgctccgactcgccctctctctttctcttcgcccctacatcacctgcaccataaggtagtcacggctctgcgcgcgccctccctttcgcagttctcaagtctcggaaatctgcacccgacaacggctttgtcgcatgcgccgcctggcctcgaccgcctctgttgtcttcgccactgcatcgcatcgcaccgcatcgaatccatccttcacgcgatcacgaatggcatcttgttgaaataggagggtaagcggcacctgtgtagctgcaggtctaatacgctctcctctcggcgcctttctgcactctctgcgccacgatcgcgaccgacgccattgagtctggcacgagatcgagcgcatccgtaccgcatcatcgtcatcttgagtaccttaatcacattttcaccatggacacaaaccccaactccaaggccctagacatggcccaggagcttctccgctcagtaatgcgcaccttctatgggcctcccaactccgacacccgcctaatcctcatcatcgacgccctctgcttccactccgccttgcgcgacgacgatctcggcctcctcatgaacatgaacctcaaagacctgcacaagctctgcggcaagttgcgcgaggagcgcttcctgcaagtccataccaggccagaactcaagacggggcagcagcggcccacaaaccgcacatactactatatcgactaccgcaaagctatcgatgtcataaaatggcggacctaccaactcgacaaggccgtccagggtgacgcaaagccagcagccgagaagaaggagtatttctgtaggagatgtcaggctgagtggacaactatggaggtccttgacaaggcggacccagcgcgtggtttcttatgtcatcgttgtgactcagtcctgatcttcgatccagagcgcgatgcaggaggccacgagaagtcaaagaaactcaataaccaactccgtttcatcaccgagctcctaccgaaattagacagtgtcgtcatacccgacatagacttcgacacagccatggcggcccatcgggacgtaatacgaccagacacgaacctagttgcggaatccgtcgtggtggagagtatcagcaagcccacggcagtcaagggcatggcgaacacgggaccgcagagtatcgctatcagtattaccgatagcgacggccccacggatgccgaaaaagaggccgagaaggagaggaaagaaaagatcgccgcggcgaatgccctgccgagctggcatacgcagtctactgtgagcggccagagttatagcaccaaggatgcggctgcgaatggaacgaaagaagaagacagcgatgcgaaggtggcggatatggtggacgacggtatgcagaacgaagaaatgaccaacttgtttcagatgctcgctgcgcagcaggaggcagataggaggaaagaagcagaggccgttgattcggaggacgaagaagatgatgaagaggaagaagaggagtttgaggatatcgctgctggtggtagtgtaccaccgagtggtctgggaggaataggaggaggggcaggggagaagagagcgagtagtgcgacgacgagtgtcgcggatacgcccaagagtgaggatagaccggctaagaaggtcaaggttgaggagccggctgatgaggatagtgatgaggaggatgttgcttttgaggatgtttagggatgacttggggtgggatccctggagtttcttttatttggcattttcgatagttctgtacatatattgcatgggaaatgccaataggcgccccgcatggcctcaaagcgaaagagggaaaaacactggcgtttggtttcggaaacgaaaaatttaaagttggctgctgagatggcagtaaacaccacacattacagaatcacatcatcccgaatctagtccgatctatgctctggagagtagaggaagtaaaatcatcaaattccatatacatccatcttcatcctcatcaaagcccagctcgctagcaacaaagagaagccgagctggttctctagtatcatacagaaataggtttcctagtagcatgtagcgtccattgcgcgccgtattaaaagtgcaatattagtccaagccatcagactgcgctcccggggataacgcccaagcaaatggttcgttgtgggaaacgcatcgtgatataccacaagtaagacgttgttgcatcctgcctcgttccagtcgttgccagtctatctagacgtatttccgcaactattccccaagtcagtacacggccaaccaaatcagactctccaatttcaggggaaagactcacatccagcgtcagcgtcttactcgaattgacatcctgatccctataaacaccgaccaagctctcactatcctggaacagtcccgccttcaagctgatgacgatgaactgcataccaggacctgcatggttcctaatataatttttgatcttctccacattcgcattatccagcgcagcatcaacctcatccagcacaaagaaaggacttggctggaaactatggatcgcgaacaccagcgcaagcgccgccatcgtcttctcgcctccggacagatgttccatgtcacggaagcgcttgagcggcggcatggcgtggtatttgatgcccgataggtagggcttatctgtgtcttcctcaatgtcgagatatgcctggccgcctagtgggtactgatcggatcgcgttaggtctttgtagacttgtgagatttgctcgcggatgtgtgtgaatgccttgtcgaagagttcgaagcgcttggctttcacttcgtcgaaggcttctttcgctgctctgaatttcgtcttcgagtcctcgtagtctttgtctgttgccttgagcctggcttctacgacctctagacgctccatcgcgcgcatattcggatttagcttctctagttctgctgtgagcgaggaaatcttggtctctagatcctcctcgactttttcggcgtcatcgg

SEQ ID NO: 21106 - DNA, 957 bp, Muscodor strobelii
  misc_feature: SGI cDNA ID NO. 567138
  misc_feature: Encodes the peptide sequence at SEQ ID NO 21107
atggcatcccagaccaaggaaccgcccctcgacgagatacaatggcgtagtccgttcgccgcgcagcagatgcagggaatccacagcaactcggtgcttttctacttcgcccagtcgcccttcttcgacccgacctcaaacaatgccgtcatagccaaccaggccctgtttaaccccgccatgctgtacctggtgcaaacacgcgaggccttcgagggccgacttcgcgagatgtcggggctcgagttcatcgtcgcccaagaacccgccgagactggccccggcatgggaactggtgtctgggtcatcaggaagcagacgaggaggaagagggaccccgaagatgatgtcaccgtccactctacctattatattgtgggcgaaaatatctacatggcgcctactctggctcaactcttgagcttccgcatgtcgactatctcttcctccctcgcaaaatgctttccagcagccgatgaggcgcgcatctggcacccctccagaggacacacctaccgcatgccgcctgcaacaaacaaccctaagccacgagccatcacagggtccaaagaagctacgcccatgcccgaagcccaaggagctgcccctaagaacggcaactccctggagctcaagaaggtagagggcggagatgccgtcgatgcgcgtctggcagagcaatccatgtgggtacatatgcaatacggcggcgactacatggacgagaatcccatcaccggacagccgggctcatttcacctcacttcaacgggcaggaaggacaagttccagatgtctggtttgagcgctttgaacacctcaaccaagagccctgctacgggtaccaagaagacgggaactaagacgggtgagaagacgcctaagacgccgcagagcagcacgtccaagttgaagcggaagaagagcaagaccgggcagactccgacggcctcttag

SEQ ID NO: 21107 - protein, 318 aa, Muscodor strobelii
  misc_feature: SGI Peptide ID NO. 567138
  misc_feature (53)..(176): Pfam Id: PF04934 Pfam Desc: MED6 mediator sub complex component
  misc_feature (3)..(318): NCBI GI: 46123445 Blast Desc: FG06100.1 [Gibberella zeae PH-1]
  misc_feature (7)..(260): NCBI GI: 256731034 Blast Desc: NECHADRAFT_84866 [Nectria haematococca mpVI 77-13-4]
  misc_feature (11)..(267): NCBI GI: 39944054 Blast Desc: MGG_04038 [Magnaporthe grisea 70-15] gi|145014761|gb|EDJ99329.1| MGG_04038 [Magnaporthe grisea 70-15]
  misc_feature (1)..(307): NCBI GI: 156048222 Blast Desc: SS1G_08842 [Sclerotinia sclerotiorum 1980] gi|154693239|gb|EDN92977.1| SS1G_08842 [Sclerotinia sclerotiorum 1980]
  misc_feature (8)..(286): NCBI GI: 85101700 Blast Desc: NCU03809 [Neurospora crassa OR74A] gi|74624530|sp|Q9HED8.1|MED6_NEUCR RecName: Full=Mediator of RNA polymerase II transcription subunit 6; AltName: Full=Mediator 6
  misc_feature (1)..(311): NCBI GI: 154302905 Blast Desc: BC1G_09196 [Botryotinia fuckeliana B05.10] gi|150855120|gb|EDN30312.1| BC1G_09196 [Botryotinia fuckeliana B05.10]
  misc_feature (3)..(316): NCBI GI: 171694111 Blast Desc: protein product [Podospora anserina] gi|170947004|emb|CAP73808.1| protein product [Podospora anserina]
  misc_feature (6)..(262): NCBI GI: 261351549 Blast Desc: mediator of RNA polymerase II transcription subunit 6 [Verticillium albo-atrum VaMs.102]
  misc_feature (10)..(312): NCBI GI: 169776971 Blast Desc: [Aspergillus oryzae RIB40] gi|238494050|ref|XP_002378261.1| RNA polymerase II transcription mediator complex subunit Med6 [Aspergillus flavus NRRL3357] of II
  misc_feature (10)..(312): NCBI GI: 119467764 Blast Desc: MED6 mediator sub complex component, [Neosartorya fischeri NRRL 181] gi|119405840|gb|EAW15791.1| MED6 mediator sub complex component, [Neosartorya fischeri NRRL 181]
MASQTKEPPLDEIQWRSPFAAQQMQGIHSNSVLFYFAQSPFFDPTSNNAVIANQALFNPAMLYLVQTREAFEGRLREMSGLEFIVAQEPAETGPGMGTGVWVIRKQTRRKRDPEDDVTVHSTYYIVGENIYMAPTLAQLLSFRMSTISSSLAKCFPAADEARIWHPSRGHTYRMPPATNNPKPRAITGSKEATPMPEAQGAAPKNGNSLELKKVEGGDAVDARLAEQSMWVHMQYGGDYMDENPITGQPGSFHLTSTGRKDKFQMSGLSALNTSTKSPATGTKKTGTKTGEKTPKTPQSSTSKLKRKKSKTGQTPTAS

SEQ ID NO: 21108 - DNA, 4706 bp, Muscodor strobelii
  misc_feature: SGI EST ID NO. CUFF.50450.1
  misc_feature: Variant of the nucleotide sequence at SEQ ID NO 21106
ccgatgacgccgaaaaagtcgaggaggatctagagaccaagatttcctcgctcacagcagaactagagaagctaaatccgaatatgcgcgcgatggagcgtctagaggtcgtagaagccaggctcaaggcaacagacaaagactacgaggactcgaagacgaaattcagagcagcgaaagaagccttcgacgaagtgaaagccaagcgcttcgaactcttcgacaaggcattcacacacatccgcgagcaaatctcacaagtctacaaagacctaacgcgatccgatcagtacccactaggcggccaggcatatctcgacattgaggaagacacagataagccctacctatcgggcatcaaataccacgccatgccgccgctcaagcgcttccgtgacatggaacatctgtccggaggcgagaagacgatggcggcgcttgcgctggtgttcgcgatccatagtttccagccaagtcctttctttgtgctggatgaggttgatgctgcgctggataatgcgaatgtggagaagatcaaaaattatattaggaaccatgcaggtcctggtatgcagttcatcgtcatcagcttgaaggcgggactgttccaggatagtgagagcttggtcggtgtttatagggatcaggatgtcaattcgagtaagacgctgacgctggatgtgagtctttcccctgaaattggagagtctgatttggttggccgtgtactgacttggggaatagttgcggaaatacgtctagatagactggcaacgactggaacgaggcaggatgcaacaacgtcttacttgtggtatatcacgatgcgtttcccacaacgaaccatttgcttgggcgttatccccgggagcgcagtctgatggcttggactaatattgcacttttaatacggcgcgcaatggacgctacatgctactaggaaacctatttctgtatgatactagagaaccagctcggcttctctttgttgctagcgagctgggctttgatgaggatgaagatggatgtatatggaatttgatgattttacttcctctactctccagagcatagatcggactagattcgggatgatgtgattctgtaatgtgtggtgtttactgccatctcagcagccaactttaaatttttcgtttccgaaaccaaacgccagtgtttttccctctttcgctttgaggccatgcggggcgcctattggcatttcccatgcaatatatgtacagaactatcgaaaatgccaaataaaagaaactccagggatcccaccccaagtcatccctaaacatcctcaaaagcaacatcctcctcatcactatcctcatcagccggctcctcaaccttgaccttcttagccggtctatcctcactcttgggcgtatccgcgacactcgtcgtcgcactactcgctctcttctcccctgcccctcctcctattcctcccagaccactcggtggtacactaccaccagcagcgatatcctcaaactcctcttcttcctcttcatcatcttcttcgtcctccgaatcaacggcctctgcttctttcctcctatctgcctcctgctgcgcagcgagcatctgaaacaagttggtcatttcttcgttctgcataccgtcgtccaccatatccgccaccttcgcatcgctgtcttcttctttcgttccattcgcagccgcatccttggtgctataactctggccgctcacagtagactgcgtatgccagctcggcagggcattcgccgcggcgatcttttctttcctctccttctcggcctctttttcggcatccgtggggccgtcgctatcggtaatactgatagcgatactctgcggtcccgtgttcgccatgcccttgactgccgtgggcttgctgatactctccaccacgacggattccgcaactaggttcgtgtctggtcgtattacgtcccgatgggccgccatggctgtgtcgaagtctatgtcgggtatgacgacactgtctaatttcggtaggagctcggtgatgaaacggagttggttattgagtttctttgacttctcgtggcctcctgcatcgcgctctggatcgaagatcaggactgagtcacaacgatgacataagaaaccacgcgctgggtccgccttgtcaaggacctccatagttgtccactcagcctgacatctcctacagaaatactccttcttctcggctgctggctttgcgtcaccctggacggccttgtcgagttggtaggtccgccattttatgacatcgatagctttgcggtagtcgatatagtagtatgtgcggtttgtgggccgctgctgccccgtcttgagttctggcctggtatggacttgcaggaagcgctcctcgcgcaacttgccgcagagcttgtgcaggtctttgaggttcatgttcatgaggaggccgagatcgtcgtcgcgcaaggcggagtggaagcagagggcgtcgatgatgaggattaggcgggtgtcggagttgggaggcccatagaaggtgcgcattactgagcggagaagctcctgggccatgtctagggccttggagttggggtttgtgtccatggtgaaaatgtgattaaggtactcaagatgacgatgatgcggtacggatgcgctcgatctcgtgccagactcaatggcgtcggtcgcgatcgtggcgcagagagtgcagaaaggcgccgagaggagagcgtattagacctgcagctacacaggtgccgcttaccctcctatttcaacaagatgccattcgtgatcgcgtgaaggatggattcgatgcggtgcgatgcgatgcagtggcgaagacaacagaggcggtcgaggccaggcggcgcatgcgacaaagccgttgtcgggtgcagatttccgagacttgagaactgcgaaagggagggcgcgcgcagagccgtgactaccttatggtgcaggtgatgtaggggcgaagagaaagagagagggcgagtcggagcgggcgaagtggttgctcgcctgaaggctcgcaaggctgaggtcgtcggagtgagaggatgaatgaaaggaagatgaataataattgaatggaaacttccgtccaaggtcacacccaaggtcacaggtgacgaaggtacctgaagggactccactaaggctgcctgctagcgtaaactgacccagcatcgcatcacctaatccttgtccctttcagcgcgcgccctgcagcgtcctcagctttccaattgcatgggaacttgcaccttccattacactttcgactttcgacttgcaacttcacttttggactatcaccaccaccctttggcgaactccagagcgtcacccttgctctgttcgactctcagccgcctttgttctgctggtgcatctcctcatctgtattctccacaccatggcatcccagaccaaggaaccgcccctcgacgagatacaatggcgtagtccgttcgccgcgcagcagatgcagggaatccacagcaactcggtgcttttctacttcgcccagtcgcccttcttcgacccgacctcaaacaatgccgtcatagccaaccaggccctgtttaaccccgccatgctgtacctggtgcaaacacgcgaggccttcgagggccgacttcgcgagatgtcggggctcgagttcatcgtcgcccaagaacccgccgagactggccccggcatgggaactggtgtctgggtcatcaggaagcagacgaggaggaagagggaccccgaagatgatgtcaccgtccactctacctattatattgtgggcgaaaatatctacatggcgcctactctggctcaactcttgagcttccgcatgtcgactatctcttcctccctcgcaaaatgctttccagcagccgatgaggcgcgcatctggcacccctccagaggacacacctaccgcatgccgcctgcaacaaacaaccctaagccacgagccatcacagggtccaaagaagctacgcccatgcccgaagcccaaggagctgcccctaagaacggcaactccctggagctcaagaaggtagagggcggagatgccgtcgatgcgcgtctggcagagcaatccatgtgggtacatatgcaatacggcggcgactacatggacgagaatcccatcaccggacagccgggctcatttcacctcacttcaacgggcaggaaggacaagttccagatgtctggtttgagcgctttgaacacctcaaccaagagccctgctacgggtaccaagaagacgggaactaagacgggtgagaagacgcctaagacgccgcagagcagcacgtccaagttgaagcggaagaagagcaagaccgggcagactccgacggcctcttaggatgagaccgaaggttctgctcggaagaagaggaagaagggcaaggggaaagagaacatggtgaagcaggtctcgtggaagggcttggcttgatctataaggtggtagaggcgtttcaggaaggttgtgcattttagggcgttatgaggaatggagcacgagcattttgatacccctttccccgcgtgaggttatcacctacgcttagatgaagatactggatctggttatgcagtgaatctagcgacgaccagatactcttgagcgctaagaagcaaatccagcctaatacaggcaattaatacctgtagagactaatagacgagaaggg

SEQ ID NO: 21109 - DNA, 1320 bp, Muscodor strobelii
  misc_feature: SGI cDNA ID NO. 567139
  misc_feature: Encodes the peptide sequence at SEQ ID NO 21110
atgaattcagattcttcacagccagtggagggtccgttgatgcctgctaccaacgacgtcgaactcgaaaccgggcaacgcaggtcttctgaacatatgcatgaacgaccaagatcaccgcgaaaggaagtgggcgaactctggctgaactcaagcaactggagattgattagctgcgcctacttattttttaagccgtttatattgatagcattgttgatcttcaagattgctagcttcctggagttcattttctgggttctccgcctcggtggcaacgtaagaaaggaggacgtgagagtttggaaagataagagtgtcgtatcaaaagggctgactagaatcgggtttcaatttgcgaagttggcatttttctactcagatcccgtcagtctggagcctttggctcctggagaatatacaagacgcaaaagcggactatactggacattcatgcttttcttaagggtattccaacgagactcgttcttctcagactacctcgatgcatggaggtatacgtgcccagcagattctgtgtcgatattcatcaaccacgcgtatagatttgactatcactgcgatgtgcgttcggacgctttgtttctaaatcaacttggcatgttctacgcatattgccgattcgatgctggtttcataagtcttttgacaccgaagtctcttcgaagagttgatgtagtaaagcgtcatgggcgatacccaggaagtgccaactgcactttgccgttggggttcatccaccatcgccaggtcgctaggctatatgggaagcacgaatccaacgacaatccaacacaaatagtgcagatgctgaccgaactgggtgtctttcggaaatcctatgaagcaccagggcggaatacaccatccacgagccaatactctgacgcaaccaacttcgaaacgcaattcgccctggattttgtagaggcttgggatagcacacctgtcctcatatcgatccttgcccccacaatcatcagtatagtgatatgtattgcatggccaattgtagctgtgcgcaacttcgaagccgacgtccagaccagcgtccagaccggggcatcggtggcgagctacattgtgacggccggtgctctgattattgctcttcttgcttggtacgagacccttgttaaggagaatgtgcccgatgcttttgaacggtcggccgctgccacaaatcagtcaaggtggtcctacgacaggagtgctataccacccaggcctcctggatctgtgaatagagcacacgaaaatgttccgcccacaacttctcggcaagttgcaacaccatag

SEQ ID NO: 21110 - protein, 439 aa, Muscodor strobelii
  misc_feature: SGI Peptide ID NO. 567139
MNSDSSQPVEGPLMPATNDVELETGQRRSSEHMHERPRSPRKEVGELWLNSSNWRLISCAYLFFKPFILIALLIFKIASFLEFIFWVLRLGGNVRKEDVRVWKDKSVVSKGLTRIGFQFAKLAFFYSDPVSLEPLAPGEYTRRKSGLYWTFMLFLRVFQRDSFFSDYLDAWRYTCPADSVSIFINHAYRFDYHCDVRSDALFLNQLGMFYAYCRFDAGFISLLTPKSLRRVDVVKRHGRYPGSANCTLPLGFIHHRQVARLYGKHESNDNPTQIVQMLTELGVFRKSYEAPGRNTPSTSQYSDATNFETQFALDFVEAWDSTPVLISILAPTIISIVICIAWPIVAVRNFEADVQTSVQTGASVASYIVTAGALIIALLAWYETLVKENVPDAFERSAAATNQSRWSYDRSAIPPRPPGSVNRAHENVPPTTSRQVATP

SEQ ID NO: 21111 - DNA, 465 bp, Muscodor strobelii
  misc_feature: SGI cDNA ID NO. 567140
  misc_feature: Encodes the peptide sequence at SEQ ID NO 21112
atgggtggtgcatacggttcatttttcctggtcgtctacgatgacaatggccctccagctggtgcgatcagagagctctacggcaagagcaatgactgtatggacggcgaagagggagaatatgtatacctagtcgccgaatggacagagaaccgagtcgaggctgtacgtagcctgcgcgtttgcgccgaagaattcaagcgattgcggcgtgaagacgacggccagccattcaaagatctggcggagggcgctggtggccgcttcgtgtaccttgagaattattacgacagggatcgcccacacggtgacaaaatcattgatgtggctttggcacgagtcgggaataactttgaggatgacggatacgtcaaaattggtgagacgacgtggtatgttgctggaatggatattcgaaagaagcgcggaggtgactttttgtacttggtttatcattgctggtga

SEQ ID NO: 21112 - protein, 154 aa, Muscodor strobelii
  misc_feature: SGI Peptide ID NO. 567140
  misc_feature (3)..(153): NCBI GI: 171684615 Blast Desc: protein product [Podospora anserina] gi|170942268|emb|CAP67920.1| protein product [Podospora anserina]
  misc_feature (11)..(153): NCBI GI: 169864150 Blast Desc: CC1G_11630 [Coprinopsis cinerea okayama7#130] gi|116500209|gb|EAU83104.1| CC1G_11630 [Coprinopsis cinerea okayama7#130]
  misc_feature (11)..(153): NCBI GI: 169864602 Blast Desc: CC1G_05461 [Coprinopsis cinerea okayama7#130] gi|116499944|gb|EAU82839.1| CC1G_05461 [Coprinopsis cinerea okayama7#130]
  misc_feature (14)..(151): NCBI GI: 259481436 Blast Desc: TPA: conserved [Aspergillus nidulans FGSC A4]
  misc_feature (11)..(153): NCBI GI: 169864190 Blast Desc: CC1G_11650 [Coprinopsis cinerea okayama7#130] gi|116500229|gb|EAU83124.1| CC1G_11650 [Coprinopsis cinerea okayama7#130]
  misc_feature (18)..(153): NCBI GI: 67527101 Blast Desc: AN3983.2 [Aspergillus nidulans FGSC A4] gi|40740264|gb|EAA59454.1| AN3983.2 [Aspergillus nidulans FGSC A4]
  misc_feature (36)..(151): NCBI GI: 171679030 Blast Desc: protein product [Podospora anserina] gi|170937586|emb|CAP62243.1| protein product [Podospora anserina]
  misc_feature (14)..(151): NCBI GI: 121712124 Blast Desc: ACLA_062140 [Aspergillus clavatus NRRL 1] gi|119401829|gb|EAW12251.1| ACLA_062140 [Aspergillus clavatus NRRL 1]
MGGAYGSFFLVVYDDNGPPAGAIRELYGKSNDCMDGEEGEYVYLVAEWTENRVEAVRSLRVCAEEFKRLRREDDGQPFKDLAEGAGGRFVYLENYYDRDRPHGDKIIDVALARVGNNFEDDGYVKIGETTWYVAGMDIRKKRGGDFLYLVYHCW

SEQ ID NO: 21113 - DNA, 1542 bp, Muscodor strobelii
  misc_feature: SGI cDNA ID NO. 567141
  misc_feature: Encodes the peptide sequence at SEQ ID NO 21114
atggcttcatcaatagagctcgtctctagtggtaatatcgcatacgctactcttttcatcgtgcttcttgggctctcctacgagctcctcctctcaccgctgaaggcattgcctggcccatttgttgctaaattcaccgacctctggagagccaccgtggccgcctcgggacatgtcgacgagataaacctgaaatggcatcgcaaatatggatctgcagttcgcattgggccgaacaccgtcagtatttctgacccaaacctgattaagaccatttattcgacaaaggaggattggatgaagtccaacatgtatagagtgaatgatgtcttgatcaatggtcagcgactatccaacctcttcaatactcaggatcatgcttggcataacaaattcgccaggcccattagaggcttttggacgatgaccaaggtggtagagatggaaccacttgtcgacgagactttggatctattcatggccaagttgagagaaaagtttattgagggacatccttgttcgatggatgagtggttgggctattttgcctgggatgtatcggccaatatcagctttgggcggcactatgggttcctagaacacgaaagggacgtcgataacctgattactgactcgactaaggggctatactactttgcgccggtctcccaaattccctggatggactctctcttggacaaaaacccacttgttcgaattggacccaagcccaccttcacgggggttcaatacgccttcaaggtcgtggcatcttaccagcaagaacttgcacgcaaaggcgaggggacaggcgatgtcgatcactacctatctcgctacgttaaactcaaagacagctacccagacctcgtcgacgacaaccagattgtcaactggctgatggtcaatatcctcgcgggcggagacacaacatcatcgataatgcgcgccgccgtgtattacctagccaagaaccccgacgcgcacgcgagactaacggcagagctggacacggctcaactgacgctgccggcacagtggagggatgtcaacaagcttccgtatctcgacgccgtcgtgcgcgagtccatgcgggtcaatccgggtcttgctatggttctcgagcgggtggtgcccgaaggcggcctcttgttgccggatggacgatttataccggccggtacggtcgtgggcgccaatccatacgtgactaatcgcgatgttgatgtcttcggcgacaaccccgatgagttcgacccgggaaggtggctgaagcatgatggagagaatgaggacatgtttgcgaagagattgaggcgtatgaaagaggttgtcgactttgtcttcggagctgcgaaccgagtatgcttggggcgattcatggcgcagttggagctgttcaagcttcttgcgacgttgtactctgtatacgatatcaaacttgttgatccatctcatcgatggcggtaccacaacgcgtggtttgtgtatcagtgggatatgccgatgattctgacacctaggattgcgtcttcgcgataa

SEQ ID NO: 21114 - protein, 513 aa, Muscodor strobelii
  misc_feature: SGI Peptide ID NO. 567141
  misc_feature (38)..(507): Pfam Id: PF00067 Pfam Desc: Cytochrome P450
  misc_feature (292)..(473): Pfam Id: PF00067 Pfam Desc: Cytochrome P450
  misc_feature (142)..(204): Pfam Id: PF00067 Pfam Desc: Cytochrome P450
  misc_feature (18)..(512): NCBI GI: 67538990 Blast Desc: AN5665.2 [Aspergillus nidulans FGSC A4] gi|40743568|gb|EAA62758.1| AN5665.2 [Aspergillus nidulans FGSC A4] gi|259484862|tpe|CBF81446.1| TPA: cytochrome P450, (Eurofung)
  misc_feature (19)..(508): NCBI GI: 255949784 Blast Desc: Pc22g17460 [Penicillium chrysogenum Wisconsin 54-1255] gi|211592676|emb|CAP99034.1| Pc22g17460 [Penicillium chrysogenum Wisconsin 54-1255]
  misc_feature (11)..(508): NCBI GI: 121720096 Blast Desc: benzoate 4-monooxygenase cytochrome P450 [Aspergillus clavatus NRRL 1] gi|119404958|gb|EAW15320.1| benzoate 4-monooxygenase cytochrome P450 [Aspergillus clavatus NRRL 1]
  misc_feature (20)..(508): NCBI GI: 256732857 Blast Desc: NECHADRAFT_92993 [Nectria haematococca mpVI 77-13-4]
  misc_feature (8)..(507): NCBI GI: 256725004 Blast Desc: NECHADRAFT_91479 [Nectria haematococca mpVI 77-13-4]
  misc_feature (8)..(508): NCBI GI: 46135657 Blast Desc: FG09351.1 [Gibberella zeae PH-1]
  misc_feature (59)..(482): NCBI GI: 154323352 Blast Desc: BC1G_00075 [Botryotinia fuckeliana B05.10] gi|150842304|gb|EDN17497.1| BC1G_00075 [Botryotinia fuckeliana B05.10]
  misc_feature (18)..(508): NCBI GI: 169780992 Blast Desc: [Aspergillus oryzae RIB40] gi|83773700|dbj|BAE63827.1| protein product [Aspergillus oryzae]
  misc_feature (18)..(508): NCBI GI: 238504782 Blast Desc: benzoate 4-monooxygenase cytochrome P450, [Aspergillus flavus NRRL3357] gi|220689734|gb|EED46084.1| benzoate 4-monooxygenase cytochrome P450, [Aspergillus flavus NRRL3357]
  misc_feature (18)..(489): NCBI GI: 255939798 Blast Desc: Pc16g02990 [Penicillium chrysogenum Wisconsin 54-1255] gi|211585291|emb|CAP92969.1| Pc16g02990 [Penicillium chrysogenum Wisconsin 54-1255]
  misc_feature (42)..(481): SWISSPROT Homolog: EC 1.14.13.12 Benzoate 4-monooxygenase
MASSIELVSSGNIAYATLFIVLLGLSYELLLSPLKALPGPFVAKFTDLWRATVAASGHVDEINLKWHRKYGSAVRIGPNTVSISDPNLIKTIYSTKEDWMKSNMYRVNDVLINGQRLSNLFNTQDHAWHNKFARPIRGFWTMTKVVEMEPLVDETLDLFMAKLREKFIEGHPCSMDEWLGYFAWDVSANISFGRHYGFLEHERDVDNLITDSTKGLYYFAPVSQIPWMDSLLDKNPLVRIGPKPTFTGVQYAFKVVASYQQELARKGEGTGDVDHYLSRYVKLKDSYPDLVDDNQIVNWLMVNILAGGDTTSSIMRAAVYYLAKNPDAHARLTAELDTAQLTLPAQWRDVNKLPYLDAVVRESMRVNPGLAMVLERVVPEGGLLLPDGRFIPAGTVVGANPYVTNRDVDVFGDNPDEFDPGRWLKHDGENEDMFAKRLRRMKEVVDFVFGAANRVCLGRFMAQLELFKLLATLYSVYDIKLVDPSHRWRYHNAWFVYQWDMPMILTPRIASSR

SEQ ID NO: 21115 - DNA, 216 bp, Muscodor strobelii
  misc_feature: SGI cDNA ID NO. 567142
  misc_feature: Encodes the peptide sequence at SEQ ID NO 21116
atggataacgtcaagaacgccgccaactacgtctctgacaccgtcaagagcgccacctccaccggctccaaggaggccaacaagcaggtcgccaaggactccgacgccagcattggcactcgtgcctccgctgccaaggatgccgtcggcgacaagttcgacgagcagaagcacgacaagtctgctgacgtccacaaggaggccgccaagcactaa

SEQ ID NO: 21116 - protein, 71 aa, Muscodor strobelii
  misc_feature: SGI Peptide ID NO. 567142
  misc_feature (1)..(71): NCBI GI: 261355701 Blast Desc: glucose-repressible gene protein [Verticillium albo-atrum VaMs.102]
  misc_feature (1)..(71): NCBI GI: 115433342 Blast Desc: conserved [Aspergillus terreus NIH2624] gi|114189660|gb|EAU31360.1| conserved [Aspergillus terreus NIH2624]
  misc_feature (1)..(71): NCBI GI: 154298876 Blast Desc: glucose-repressible gene protein [Botryotinia fuckeliana B05.10] gi|150857590|gb|EDN32782.1| glucose-repressible gene protein [Botryotinia fuckeliana B05.10]
  misc_feature (1)..(71): NCBI GI: 156064057 Blast Desc: Grg1 protein [Sclerotinia sclerotiorum 1980] gi|154690898|gb|EDN90636.1| Grg1 protein [Sclerotinia sclerotiorum 1980]
  misc_feature (1)..(71): NCBI GI: 39974277 Blast Desc: conserved [Magnaporthe grisea 70-15] gi|59803120|gb|AAX07712.1| glucose-repressible gene protein-like protein [Magnaporthe grisea] gi|145018352|gb|EDK02631.1| grisea
  misc_feature (1)..(71): NCBI GI: 259488119 Blast Desc: TPA: glucose repressible protein Grg1, (AFU_orthologue; AFUA_5G14210) [Aspergillus nidulans FGSC A4]
  misc_feature (1)..(71): NCBI GI: 255952490 Blast Desc: Pc17g00380 [Penicillium chrysogenum Wisconsin 54-1255] gi|211586501|emb|CAP79325.1| Pc17g00380 [Penicillium chrysogenum Wisconsin 54-1255]
  misc_feature (1)..(68): NCBI GI: 46128731 Blast Desc: FG08743.1 [Gibberella zeae PH-1]
  misc_feature (1)..(71): NCBI GI: 85101183 Blast Desc: NCU03753 [Neurospora crassa OR74A] gi|121613|sp|P22151.1|GRG1_NEUCR RecName: Full=Glucose-repressible gene protein gi|3014|emb|CAA32907.1|
  misc_feature (1)..(71): NCBI GI: 255948846 Blast Desc: Pc22g12460 [Penicillium chrysogenum Wisconsin 54-1255] gi|211592207|emb|CAP98534.1| Pc22g12460 [Penicillium chrysogenum Wisconsin 54-1255]
MDNVKNAANYVSDTVKSATSTGSKEANKQVAKDSDASIGTRASAAKDAVGDKFDEQKHDKSADVHKEAAKH

SEQ ID NO: 21117 - DNA, 1678 bp, Muscodor strobelii
  misc_feature: SGI EST ID NO. CUFF.51203.0
  misc_feature: Variant of the nucleotide sequence at SEQ ID NO 21115
ctaatgatgacgtcaggtactcagagcaaagcctcacgctgccttcgtttcactacagctaccaccgacaaatgcatgtttcccatatggcttgtcacttcctgctagtaaagtcactccgtagcgtattgaatgcccatagaatgtgggacaaagaagggacaaataggcaatgacgtacttgcgcttgttcacatgacgggttctagcctggtacctgcctctaaacctcagtttcactagaggcgggatgaacgctccaccaaatgagtctctgcggaagagaatgcccgtcatccattggtttgctcctgcttgtgtgctcattgaatcgcaaagataggcaggaacaacggatccccaaggcaaccaactcagcggtcattgtgtatataaaccttgcccgccctccatcttctacccctcctctcttcttcttcatccacaacaacaacctccagacccaacatcagctttcagcacaacttcacacacacacaatcaacaacccaacacaatcaatcaccatggataacgtcaagaacgccgccaactacgtctctgacaccgtcaagagcgccacctccaccggctccaaggaggccaacaagcaggtcgccaaggactccgacgccagcattggcactcgtgcctccgctgccaaggatgccgtcggcgacaagttcgacgagcagaagcacgacaagtctgctgacgtccacaaggaggccgccaagcactaaatttgtttccctcttcgacaaacaaattgccatgtacgatgacgaggcatgaataggcgtctgggacatggagcctttttctttgggtcggaaattgatggcacacactatggttctctcctaggagatgttctcatccaagcacgcttgcaatacccctaagatagttctaaatcagaattaagctgctttgccaatcatacaccacgatcttcttcaccttgtgacttctgtgacttgtttacttgcttggccttaccctactctgcgtccctcaaaaccatccgacacttccaatagctagcacaaattgtgatctgtaaagccagtcttgtagatcacggttgctatctcaaacagaactcaagagataaaatgactaccgaatgtaacatcatctgcggtaatccagttacgcctacaatcacgaatcaatcttgaccaagtctggtgaggatgtgaaaacagaccggtggtaagctgcgggcaggtaattgcccaaagtagcaagatacctctcacccctcactggcaatcaagtctggtatctctcgacgcgaccccaggtaaagtagaactgacattgccagtcttttctcgcagacttggggatggggaaccaatggcttcatcaatagagctcgtctctagtggtaatatcgcatacgctactcttttcatcgtgcttcttgggctctcctacgagctcctcctctcaccgctgaaggcattgcctggcccatttgttgctaaattcaccgacctctggagagccaccgtggccgcctcgggacatgtcgacgagataaacctgaaatggcatcgcaaatatggatctgcagttcgcattgggccgaacaccgtcagtatttctgacccaaacctgattaagaccatttattcgacaaaggaggattggatgaaggtagtttttt

SEQ ID NO: 21118 - DNA, 4935 bp, Muscodor strobelii
  misc_feature: SGI cDNA ID NO. 567143
  misc_feature: Reduced expression when VOC is produced
  misc_feature: Encodes the peptide sequence at SEQ ID NO 21119
atggccgaatccaccctctcagatccaggcaagccacttgaggctcttgcgccgacccccatcgccgaactttctcccgatctcgcagactcgacctccagagccgtccgcggtgttgtcaccatcacatggccgtacaattcggtcaaacacacctttgctttcatgctcgccgagcctgacttccgcctgcgcatgaacaagggccaggtgcgagtcgacttcaccggcagagctgctaagattgtaggagactctgcactggccagcaacgaccaagtattgctatccctggacggtgtcgcatggcaacagaaagaggcaaacaaaaggaagagcctacctggctccgagtccggctggggactgtccttttccgacaagctatcccttcaaatcacccgcgctgagaccggcaccgttgacgtcatccaaatcgaagaggcatctggccccgacagggagataactccaagcccaccgaccacggccaccgctgccgcagcctactcggactctcagatcacaccgtcttcacctcttcctcctccggctcctttgtcaccgccaatcagattcgcctcacccactcgcgatccaatacccaagaagctgaccgatggcgaattcgcgtcccctgcatttatcaagcgggcgaggatgtcctatggatcgctcttcgatgaagggttcgatatcttcgataaggacggaggtgtcgaagggagagctcggaagaggactaagtttgggcgggatagtggtgcctggcgttacgccagccactctccaagcccggagccaccaacagcatcggcggacggcgctgaccatgaagagatggatgaagtaccgacctcaccccttcagacagggatcaccgatggtaacgcatcaacctccctagtgctggaggcaaatgagaaacgggacgcctctcctagagcagagacaatagacgaggggtgccaaacaatggaggtggacttgccagtgcccgaaccattattgagtgccttacacacaaacgagcttgaagtacccagcaagactatcgagacgctacacaatggagaaccaactattgctcgacctgatgcagaggcatctgtggacgatactgttgtagaccatgtcactacggccgtgccagtgccagtcgtcgcagaagttgaggtatcacaaaatttagttgcagaaagctgggcatccgtgtccacagcgccagagccagctcatactattgttgtcagcgaccctccgcatccttctttcggttcttcggactacccaagcttcgaatttggatccctacgccctgattacgctgtgaatccgtggcattcaacggcatcatcttccgtccccgaacttctaaagtctcctcttgtatctttcccggcaacagaccccttttcttcctctgtctttggcgcatcaacatctattgggcagcctttacctttcagcacaacaggtgatttgagaacacatcatgaagctagtactgaaaccatagcgccggtgggcgacatggcaaacgatacaacccatcctgttcctcccgtatccgactatccagctccagatgatgccgggcacacagaggacgtttctatccatcatgatgctttgaacgactatcccgtcagctacttagaggctgcgcaagatagtgtgtcccaaccaattgatagcagcacggaacataatagtgattataatgtgcctcctgcaatgggctcatgggccgcaataaattctacgtctggaactcaagtgatggctgccacggaaagctatggcactagtaatggcacaacaccagagcaggcacttgttattgacgatagtgactctgatgatgggtctgtatctcagacggcagcagcgaaccaagtgcggtttcaagaacagggcgaaacccatgcaatgtacgaagaccaagaggccgaagccgacagggatcatgatgaactatattccgaggacgaggttgaggaggatgagtacgaagatggaatgggtggtgactacgatactagaatttatgaacggcccgcagacgacgaagacgatgaacgtgatgaagatcttcggccgcatagccccgagccggaatttggagaggaagaatattctgacgaagacgaggaggacgagctaggtgaagaagagctcgaagaagaggaagaagaggggtatgacgacgaggatgaaggcgaatatgagatgaactatgagccgccgcattccgcaccccaaccactctcacaatcacaacccgtggttattgatctcctttcatcgtctgaggatgagggagacgatgacgatgagaatgttgagccggaatccagagatcagcagtcgcgactatcgcctgagtttggagaacgggcaaatgatgcccaaatacactcacgacataggctaccagatcacaattcacctcaagcagaggtcgatgaacgagaagataaccaatcgaattcggatgccgagcgttcggaccaactatcggcggaagaagagagtggcggggacgatgatcctgaaccacaaacggatgatctgagagtacatgcaatggacaatgatgaagaggatgaagaggagtatgaagactatgatgaagaaggagacgagccagatgatccaacctctttcgatgatgaccggcgcactccctcagtaaagcaagctactcctgaacctgagaaaattcatgtcgacgtatcgggtacggtggcgtctgcccagcttttatcccagacagatgtgtctgagacggtcaatgtggagagcagtactgtaatccacgggcaagaaaaagaatatgtttccaatcccgtcactgcagctgatggcctggagatgcttacccgcatagttgagaacgaatccaatgcgaacagcccaagtacattcacccaacttgcaacgacgcaagtcattgtggaagtgaatgaagatcagccagtatcgccccagccaatacggggaaatgatgcggaattattccacccgaatcacgaacgggacgaacagcctcaggcaacagaagagaacggatctattgacactgaaatgagcaacaacgaggtgaacctggttgcaccttctcccagtcttgccgagcaccaacaaccgtcaatggctcaaaagttagaagctcccgcagttggcacgttttcgccacctccaagccaatctttccagtccctacttgaagaaaatagtagcatcacgccagcgcaagagaccactttcgacactgattcgcacgttgctgtcggacagctgccaacgccgcttgaaacacaaactaccggtgtcgcgccttctgttggctcaccatttgcttctcctacagatacacagcaagtcggccaacaaacgttcgagtcacaagacggcgagattgcgcaagagcctaccgatgaaatcttgcagcacgaggctctcatgagcatggacgttgatgtgactgataaatacgaggccatcccaatcgaaaagcagcaggaccaggagctctcgcttgggaaaggttccacatcaccagcactgggcgttgagactcaggtcgaaactgtccgactcgctattggtgccggacaaaacgatcagtctcatcagtcaatcgccgttggagaaagtcccagtgcgactacatcatacaattcaatgatggaaatggacgaagaactccaagctagtattttggaattttcccaggcggatgatgcctcagctgatgaagattcccaagagaaagattacagcattcagtctcaaatagacatcgatgaaacatttgaagatcctgtcacggaagacggcgaagaagacatgccagctgttgcatcgaccgaagagactaaccatactgtcgatagtcacgctcaacaagctgtagatggaactgacaatcaaatggttaaggagaatgttgaagcagatcaaatggcacaaactgggaacgatctgacaagcgctccagtcataccagagcaaggtcaaaggcttgaagttgaaataccaacaaacgcatcaacattgccagaggaatcgcaaaagctggaggttgagataccatcgagacatttatctaccacagtttctgcccagctgcagagaaattttattgaagaggaagatgacaatgcagagtcggagactctggaacaagacgatccgagtgtacatctggcacgagcgaccaatgtgtccaagagatcaactaaacccagcctctcgccagtcgaccaaaaccgtcctcatacgaaactgctgaatgcacatcgaagttccagtccggatattgaggactcaagcactgatcttgcaagggcctctttcaacagccaacccccgaaagaggaggatagttactctatgacagcggtgaaactgaatttgtttcgtcatcttcgcgacaaactcacggactgcatatctctcaaggttttacgacagcacctaaccaaatcattagacgtcgttgctgtcgctgtgatggaaccttcagagccccgacgcgctaagggcggtccgagggaattcattatgtctttcacagtcacagatcattcaattggcccgcatgctgtagtcgaagtacgaatttcccgtccgcatatcgagagcctgccagaagtcaaatgtggtgatgtcgtactcctgcgcaacttcaaagttatttctcttgcaaagaaagggtttgggctgcaaagcaacaaggagggttcgagctgggctgtcttcgaccgtgaaaatgagccggcgcaaatcaagggtgcgccagttgaatacggcaaactagagacggagtatgttgacctgctacgagagtggttcagtctactggatgagaaggctagagagaagctggacagggtcaaccggaagatggtagaaaagtctaagtag

SEQ ID NO: 21119 - protein, 1644 aa, Muscodor strobelii
  misc_feature: SGI Peptide ID NO. 567143
  misc_feature (13)..(329): NCBI GI: 116197991 Blast Desc: CHGG_07151 [Chaetomium globosum CBS 148.51] gi|88178430|gb|EAQ85898.1| CHGG_07151 [Chaetomium globosum CBS 148.51]
  misc_feature (13)..(270): NCBI GI: 85101187 Blast Desc: NCU03754 [Neurospora crassa OR74A] gi|12718319|emb|CAC28670.1| [Neurospora crassa] gi|28922640|gb|EAA31865.1| NCU03754 [Neurospora crassa OR74A]
  misc_feature (2)..(330): NCBI GI: 39946132 Blast Desc: MGG_08186 [Magnaporthe grisea 70-15] gi|145019443|gb|EDK03671.1| MGG_08186 [Magnaporthe grisea 70-15]
  misc_feature (19)..(342): NCBI GI: 171694001 Blast Desc: protein product [Podospora anserina] gi|170946949|emb|CAP73753.1| protein product [Podospora anserina]
  misc_feature (19)..(401): NCBI GI: 256730967 Blast Desc: NECHADRAFT_48928 [Nectria haematococca mpVI 77-13-4]
  misc_feature (1)..(268): NCBI GI: 156050483 Blast Desc: SS1G_07829 [Sclerotinia sclerotiorum 1980] gi|154692229|gb|EDN91967.1| SS1G_07829 [Sclerotinia sclerotiorum 1980]
  misc_feature (20)..(330): NCBI GI: 46125625 Blast Desc: FG07190.1 [Gibberella zeae PH-1]
  misc_feature (13)..(331): NCBI GI: 154293940 Blast Desc: BC1G_14149 [Botryotinia fuckeliana B05.10] gi|150845121|gb|EDN20314.1| BC1G_14149 [Botryotinia fuckeliana B05.10]
  misc_feature (1426)..(1641): NCBI GI: 171694001 Blast Desc: protein product [Podospora anserina] gi|170946949|emb|CAP73753.1| protein product [Podospora anserina]
  misc_feature (1418)..(1639): NCBI GI: 154293940 Blast Desc: BC1G_14149 [Botryotinia fuckeliana B05.10] gi|150845121|gb|EDN20314.1| BC1G_14149 [Botryotinia fuckeliana B05.10]
  misc_feature: Useful for introducing or modulating the production of volatile compounds
MAESTLSDPGKPLEALAPTPIAELSPDLADSTSRAVRGVVTITWPYNSVKHTFAFMLAEPDFRLRMNKGQVRVDFTGRAAKIVGDSALASNDQVLLSLDGVAWQQKEANKRKSLPGSESGWGLSFSDKLSLQITRAETGTVDVIQIEEASGPDREITPSPPTTATAAAAYSDSQITPSSPLPPPAPLSPPIRFASPTRDPIPKKLTDGEFASPAFIKRARMSYGSLFDEGFDIFDKDGGVEGRARKRTKFGRDSGAWRYASHSPSPEPPTASADGADHEEMDEVPTSPLQTGITDGNASTSLVLEANEKRDASPRAETIDEGCQTMEVDLPVPEPLLSALHTNELEVPSKTIETLHNGEPTIARPDAEASVDDTVVDHVTTAVPVPVVAEVEVSQNLVAESWASVSTAPEPAHTIVVSDPPHPSFGSSDYPSFEFGSLRPDYAVNPWHSTASSSVPELLKSPLVSFPATDPFSSSVFGASTSIGQPLPFSTTGDLRTHHEASTETIAPVGDMANDTTHPVPPVSDYPAPDDAGHTEDVSIHHDALNDYPVSYLEAAQDSVSQPIDSSTEHNSDYNVPPAMGSWAAINSTSGTQVMAATESYGTSNGTTPEQALVIDDSDSDDGSVSQTAAANQVRFQEQGETHAMYEDQEAEADRDHDELYSEDEVEEDEYEDGMGGDYDTRIYERPADDEDDERDEDLRPHSPEPEFGEEEYSDEDEEDELGEEELEEEEEEGYDDEDEGEYEMNYEPPHSAPQPLSQSQPVVIDLLSSSEDEGDDDDENVEPESRDQQSRLSPEFGERANDAQIHSRHRLPDHNSPQAEVDEREDNQSNSDAERSDQLSAEEESGGDDDPEPQTDDLRVHAMDNDEEDEEEYEDYDEEGDEPDDPTSFDDDRRTPSVKQATPEPEKIHVDVSGTVASAQLLSQTDVSETVNVESSTVIHGQEKEYVSNPVTAADGLEMLTRIVENESNANSPSTFTQLATTQVIVEVNEDQPVSPQPIRGNDAELFHPNHERDEQPQATEENGSIDTEMSNNEVNLVAPSPSLAEHQQPSMAQKLEAPAVGTFSPPPSQSFQSLLEENSSITPAQETTFDTDSHVAVGQLPTPLETQTTGVAPSVGSPFASPTDTQQVGQQTFESQDGEIAQEPTDEILQHEALMSMDVDVTDKYEAIPIEKQQDQELSLGKGSTSPALGVETQVETVRLAIGAGQNDQSHQSIAVGESPSATTSYNSMMEMDEELQASILEFSQADDASADEDSQEKDYSIQSQIDIDETFEDPVTEDGEEDMPAVASTEETNHTVDSHAQQAVDGTDNQMVKENVEADQMAQTGNDLTSAPVIPEQGQRLEVEIPTNASTLPEESQKLEVEIPSRHLSTTVSAQLQRNFIEEEDDNAESETLEQDDPSVHLARATNVSKRSTKPSLSPVDQNRPHTKLLNAHRSSSPDIEDSSTDLARASFNSQPPKEEDSYSMTAVKLNLFRHLRDKLTDCISLKVLRQHLTKSLDVVAVAVMEPSEPRRAKGGPREFIMSFTVTDHSIGPHAVVEVRISRPHIESLPEVKCGDVVLLRNFKVISLAKKGFGLQSNKEGSSWAVFDRENEPAQIKGAPVEYGKLETEYVDLLREWFSLLDEKAREKLDRVNRKMVEKSK

SEQ ID NO: 21120 - DNA, 6297 bp, Muscodor strobelii
  misc_feature: SGI EST ID NO. CUFF.49459.0
  misc_feature: Variant of the nucleotide sequence at SEQ ID NO 21118
cggctagcttgtggagctctgacgtgtggtgactaggtgggattgcctgtggctttccgccgtacaggcacaccctcgcacctgtgcaattaatataaccttcaagtttccgcacttgcaacttcgcgaatctcgggaacctggcacagcagcctcattccaggtcaagtcacgtctctcagctcagattgaactgatgctgtaagtacataggtacccagccgccgtgccgtgccgtgatttacgtgccgatgtgacaaaaattcatccatccatccatccatcgcaccgccaccaacagccttctgtcaacgcgttgcgcgacggccatcgattccaccgctcccccaaccatctaatccgccatcgatacctcagttatcggtactctgttcaaccatgagtcgccatggccgaatccaccctctcagatccaggcaagccacttgaggctcttgcgccgacccccatcgccgaactttctcccgatctcgcagactcgacctccagagccgtccgcggtgttgtcaccatcacatggccgtacaattcggtcaaacacacctttgctttcatgctcgccgagcctgacttccgcctgcgcatgaacaagggccaggtgcgagtcgacttcaccggcagagctgctaagattgtaggagactctgcactggccagcaacgaccaagtattgctatccctggacggtgtcgcatggcaacagaaagaggcaaacaaaaggaagagcctacctggctccgagtccggctggggactgtccttttccgacaagctatcccttcaaatcacccgcgctgagaccggcaccgttgacgtcatccaaatcgaagaggcatctggccccgacagggagataactccaagcccaccgaccacggccaccgctgccgcagcctactcggactctcagatcacaccgtcttcacctcttcctcctccggctcctttgtcaccgccaatcagattcgcctcacccactcgcgatccaatacccaagaagctgaccgatggcgaattcgcgtcccctgcatttatcaagcgggcgaggatgtcctatggatcgctcttcgatgaagggttcgatatcttcgataaggacggaggtgtcgaagggagagctcggaagaggactaagtttgggcgggatagtggtgcctggcgttacgccagccactctccaagcccggagccaccaacagcatcggcggacggcgctgaccatgaagagatggatgaagtaccgacctcaccccttcagacagggatcaccgatggtaacgcatcaacctccctagtgctggaggcaaatgagaaacgggacgcctctcctagagcagagacaatagacgaggggtgccaaacaatggaggtggacttgccagtgcccgaaccattattgagtgccttacacacaaacgagcttgaagtacccagcaagactatcgagacgctacacaatggagaaccaactattgctcgacctgatgcagaggcatctgtggacgatactgttgtagaccatgtcactacggccgtgccagtgccagtcgtcgcagaagttgaggtatcacaaaatttagttgcagaaagctgggcatccgtgtccacagcgccagagccagctcatactattgttgtcagcgaccctccgcatccttctttcggttcttcggactacccaagcttcgaatttggatccctacgccctgattacgctgtgaatccgtggcattcaacggcatcatcttccgtccccgaacttctaaagtctcctcttgtatctttcccggcaacagaccccttttcttcctctgtctttggcgcatcaacatctattgggcagcctttacctttcagcacaacaggtgatttgagaacacatcatgaagctagtactgaaaccatagcgccggtgggcgacatggcaaacgatacaacccatcctgttcctcccgtatccgactatccagctccagatgatgccgggcacacagaggacgtttctatccatcatgatgctttgaacgactatcccgtcagctacttagaggctgcgcaagatagtgtgtcccaaccaattgatagcagcacggaacataatagtgattataatgtgcctcctgcaatgggctcatgggccgcaataaattctacgtctggaactcaagtgatggctgccacggaaagctatggcactagtaatggcacaacaccagagcaggcacttgttattgacgatagtgactctgatgatgggtctgtatctcagacggcagcagcgaaccaagtgcggtttcaagaacagggcgaaacccatgcaatgtacgaagaccaagaggccgaagccgacagggatcatgatgaactatattccgaggacgaggttgaggaggatgagtacgaagatggaatgggtggtgactacgatactagaatttatgaacggcccgcagacgacgaagacgatgaacgtgatgaagatcttcggccgcatagccccgagccggaatttggagaggaagaatattctgacgaagacgaggaggacgagctaggtgaagaagagctcgaagaagaggaagaagaggggtatgacgacgaggatgaaggcgaatatgagatgaactatgagccgccgcattccgcaccccaaccactctcacaatcacaacccgtggttattgatctcctttcatcgtctgaggatgagggagacgatgacgatgagaatgttgagccggaatccagagatcagcagtcgcgactatcgcctgagtttggagaacgggcaaatgatgcccaaatacactcacgacataggctaccagatcacaattcacctcaagcagaggtcgatgaacgagaagataaccaatcgaattcggatgccgagcgttcggaccaactatcggcggaagaagagagtggcggggacgatgatcctgaaccacaaacggatgatctgagagtacatgcaatggacaatgatgaagaggatgaagaggagtatgaagactatgatgaagaaggagacgagccagatgatccaacctctttcgatgatgaccggcgcactccctcagtaaagcaagctactcctgaacctgagaaaattcatgtcgacgtatcgggtacggtggcgtctgcccagcttttatcccagacagatgtgtctgagacggtcaatgtggagagcagtactgtaatccacgggcaagaaaaagaatatgtttccaatcccgtcactgcagctgatggcctggagatgcttacccgcatagttgagaacgaatccaatgcgaacagcccaagtacattcacccaacttgcaacgacgcaagtcattgtggaagtgaatgaagatcagccagtatcgccccagccaatacggggaaatgatgcggaattattccacccgaatcacgaacgggacgaacagcctcaggcaacagaagagaacggatctattgacactgaaatgagcaacaacgaggtgaacctggttgcaccttctcccagtcttgccgagcaccaacaaccgtcaatggctcaaaagttagaagctcccgcagttggcacgttttcgccacctccaagccaatctttccagtccctacttgaagaaaatagtagcatcacgccagcgcaagagaccactttcgacactgattcgcacgttgctgtcggacagctgccaacgccgcttgaaacacaaactaccggtgtcgcgccttctgttggctcaccatttgcttctcctacagatacacagcaagtcggccaacaaacgttcgagtcacaagacggcgagattgcgcaagagcctaccgatgaaatcttgcagcacgaggctctcatgagcatggacgttgatgtgactgataaatacgaggccatcccaatcgaaaagcagcaggaccaggagctctcgcttgggaaaggttccacatcaccagcactgggcgttgagactcaggtcgaaactgtccgactcgctattggtgccggacaaaacgatcagtctcatcagtcaatcgccgttggagaaagtcccagtgcgactacatcatacaattcaatgatggaaatggacgaagaactccaagctagtattttggaattttcccaggcggatgatgcctcagctgatgaagattcccaagagaaagattacagcattcagtctcaaatagacatcgatgaaacatttgaagatcctgtcacggaagacggcgaagaagacatgccagctgttgcatcgaccgaagagactaaccatactgtcgatagtcacgctcaacaagctgtagatggaactgacaatcaaatggttaaggagaatgttgaagcagatcaaatggcacaaactgggaacgatctgacaagcgctccagtcataccagagcaaggtcaaaggcttgaagttgaaataccaacaaacgcatcaacattgccagaggaatcgcaaaagctggaggttgagataccatcgagacatttatctaccacagtttctgcccagctgcagagaaattttattgaagaggaagatgacaatgcagagtcggagactctggaacaagacgatccgagtgtacatctggcacgagcgaccaatgtgtccaagagatcaactaaacccagcctctcgccagtcgaccaaaaccgtcctcatacgaaactgctgaatgcacatcgaagttccagtccggatattgaggactcaagcactgatcttgcaagggcctctttcaacagccaacccccgaaagaggaggatagttactctatgacagcggtgaaactgaatttgtttcgtcatcttcgcgacaaactcacggactgcatatctctcaaggttttacgacagcacctaaccaaatcattagacgtcgttgctgtcgctgtgatggaaccttcagagccccgacgcgctaagggcggtccgagggaattcattatgtctttcacagtcacagatcattcaattggcccgcatgctgtagtcgaagtacgaatttcccgtccgcatatcgagagcctgccagaagtcaaatgtggtgatgtcgtactcctgcgcaacttcaaagttatttctcttgcaaagaaagggtttgggctgcaaagcaacaaggagggttcgagctgggctgtcttcgaccgtgaaaatgagccggcgcaaatcaagggtgcgccagttgaatacggcaaactagagacggagtatgttgacctgctacgagagtggttcagtctactggatgagaaggctagagagaagctggacagggtcaaccggaagatggtagaaaagtctaagtaggacggggtgacccgcagtggtgctttgaagtgttcgaattccactcgcgtttggtgtaatgctatgcaattggagcgtcttgaaagaggggatatgtatgagtatggtgttggatgaaagtcctgtaatcaaaataatagcattactagcatcaaagggctgcctgctaatcactctggcaaagcaactactccagagacgaaatgatatgatcgccgaaagctatctggactatcaatcataagactgtacaattcgtgcaatgtgtctgattagcttcacgaataatgtgactagagagggacacgtctcaatggtttcaatactccaaccattgcgtgacttttgcacggcgtgaccttagatacacgatgcgttgtcaagaaatgtgcaagctacatgatgttgacagcactaagtgtagtacgaaacagccaatggggccatgtcgggactgatggatacgagggggatcaaccgaggcctcggaatctctagcttctccgattacagaggagatttcaatagagttgaggtttgtcccgtgagctccgtcaacttcgaactctaccttgggtacatcagaggtactgctcgaacctacggagatgtcgaactttccgtatcgcctctcgtaggccgttgacgcgtcaaccgagcgagttgcgcgatctgaatgcctgtacccgtatctaaatgctactactcgtcgcgtactgtatgctgatggatcctaagtgaggggtacagagaagaggggttttgtgtaatgtccatgaatgcacccaagtgccatctacattcctatgcgtgaatcgtgtctaacttatgctatgatgtcattgagatatccacatggcgttaaacgcagcagctcacgcaacccgcggcaaaagggagcattccagcaagacaagcagctgacgatagtgtcagaaaagtggacgaaaacg

SEQ ID NO: 21121 - DNA, 1590 bp, Muscodor strobelii
  misc_feature: SGI cDNA ID NO. 567144
  misc_feature: Encodes the peptide sequence at SEQ ID NO 21122
atgctcagctcatcgcaatgccttattgccgtcttccttggctacttcatatatcagtgcttatccagattgaaacagaaaggcaatcgaccgccaggtcctcaaccgctccctattcttgggaacatcctagatttcccacccgtcgacacgcctgagtatcagcattggcttcagcacaaagatcgctatggttctataagtcaagtcacagttttgcaatcgacctttgtatttatacacgataagaaagcggctcattacattctggatcatcttgcggccaacacgtctggcaggccctccatggtatatgcgaatgaaatgtgtggttatgaaaacaccctcgtctgccagggatacactggtcaattccgcaagtctcgcaaattcttgcaccaacagctgggcaccaagtcgtctgcggtgcaattccagaacgatcaagagagtgaagttcgacgagcggtggtgcggatgctgaaccagcctgaaaagtggcgtgaccatatgcgaaccgcgttaagtgctatcgtcctgaagtctacgtatggatacaccattgagcaggacgaaccagaccctattgtcggattggttgaaaagatgatgtccgagttttcgctcgctgcttctcctcttacctggatggtcgacattattccggttcttcgctatctgccagattgggttccaggaactacattcaagaagatcgcacgagagtggagagagtcgattgagtcatcagcctacgtcccttacaaatttgtccgaagcaagacagccaagtataagcatcagcactcgtatgtatcgaggcttgtccaacaacacagtatcagagggattttagattccaaggacgaggaggcaatcatatggagcgctgccagtctttacggagccgcaatagatactacgtttatcaagctccttactttcacacttgccatgatgctttatccggatgtgcagcacaaggcgcaggaagaaattgacaatgtcgttggaggcgaacgtattcctacctttgaagaccgaggacgtcttccatacatcgatgctttggtgaaggaggttttgagatggtggactgtcacgcctatgggttttccgcacactgcggagaaagatatcgaatacaatgacctggtgattcctaaaggtgcacagttactccctgctatatggtggtttctccacgaccccgacgtctataacgatcctgattcttttaatcccgaacgtttcctgcatccacgtaacgaacccgatccgtcattggaagctttcggctatggacgacggatatgcccaggtcgattcttcgcggacgctagcctttacatcagtatcgtgacattcctcgccgtatttgacttcaaggaacccgtagacgaccaaggaaacgatatcactgtcgatgtcaaaatgaagcctggatttctcggctttccaactgactttcactgccacgtcatgccgagaagcccaggtcatgcgcaactaatcagaatggtcgaggaacagctcccatcccaggtcagtgatgctgcttttataagcagcatcgtgaacaaaatgtga

SEQ ID NO: 21122 - protein, 529 aa, Muscodor strobelii
  misc_feature: SGI Peptide ID NO. 567144
  misc_feature (31)..(486): Pfam Id: PF00067 Pfam Desc: Cytochrome P450
  misc_feature (317)..(486): Pfam Id: PF00067 Pfam Desc: Cytochrome P450
  misc_feature (31)..(101): Pfam Id: PF00067 Pfam Desc: Cytochrome P450
  misc_feature (9)..(525): NCBI GI: 261189466 Blast Desc: OrdA [Ajellomyces dermatitidis SLH14081] gi|239591721|gb|EEQ74302.1| OrdA [Ajellomyces dermatitidis SLH14081] gi|239608965|gb|EEQ85952.1| OrdA [Ajellomyces ER-3]
  misc_feature (9)..(525): NCBI GI: 225562186 Blast Desc: O-methylsterigmatocystin oxidoreductase [Ajellomyces capsulatus G186AR]
  misc_feature (9)..(527): NCBI GI: 67525873 Blast Desc: AN3394.2 [Aspergillus nidulans FGSC A4] gi|40744182|gb|EAA63362.1| AN3394.2 [Aspergillus nidulans FGSC A4] gi|259485619|tpe|CBF82795.1| TPA: cytochrome P450, (Eurofung)
  misc_feature (9)..(525): NCBI GI: 154284087 Blast Desc: conserved [Ajellomyces capsulatus NAm1] gi|150411019|gb|EDN06407.1| conserved [Ajellomyces capsulatus NAm1]
  misc_feature (58)..(522): NCBI GI: 116179266 Blast Desc: CHGG_00261 [Chaetomium globosum CBS 148.51] gi|88184558|gb|EAQ92026.1| CHGG_00261 [Chaetomium globosum CBS 148.51]
  misc_feature (9)..(525): NCBI GI: 240277274 Blast Desc: GPI mannosyltransferase [Ajellomyces capsulatus H143]
  misc_feature (11)..(524): NCBI GI: 261351575 Blast Desc: O-methylsterigmatocystin oxidoreductase [Verticillium albo-atrum VaMs.102]
  misc_feature (2)..(522): NCBI GI: 70983253 Blast Desc: cytochrome P450 oxidoreductase OrdA-like [Aspergillus fumigatus Af293] gi|66844779|gb|EAL85116.1| cytochrome P450 oxidoreductase OrdA-like, [Aspergillus fumigatus Af293] P450
  misc_feature (7)..(519): NCBI GI: 256725430 Blast Desc: NECHADRAFT_45623 [Nectria haematococca mpVI 77-13-4]
  misc_feature (39)..(525): NCBI GI: 121716160 Blast Desc: Cytochrome P450 oxidoreductase, [Aspergillus clavatus NRRL 1] gi|119403846|gb|EAW14263.1| Cytochrome P450 oxidoreductase, [Aspergillus clavatus NRRL 1]
  misc_feature (8)..(498): SWISSPROT Homolog: EC 1.14.14.1 Unspecific monooxygenase
MLSSSQCLIAVFLGYFIYQCLSRLKQKGNRPPGPQPLPILGNILDFPPVDTPEYQHWLQHKDRYGSISQVTVLQSTFVFIHDKKAAHYILDHLAANTSGRPSMVYANEMCGYENTLVCQGYTGQFRKSRKFLHQQLGTKSSAVQFQNDQESEVRRAVVRMLNQPEKWRDHMRTALSAIVLKSTYGYTIEQDEPDPIVGLVEKMMSEFSLAASPLTWMVDIIPVLRYLPDWVPGTTFKKIAREWRESIESSAYVPYKFVRSKTAKYKHQHSYVSRLVQQHSIRGILDSKDEEAIIWSAASLYGAAIDTTFIKLLTFTLAMMLYPDVQHKAQEEIDNVVGGERIPTFEDRGRLPYIDALVKEVLRWWTVTPMGFPHTAEKDIEYNDLVIPKGAQLLPAIWWFLHDPDVYNDPDSFNPERFLHPRNEPDPSLEAFGYGRRICPGRFFADASLYISIVTFLAVFDFKEPVDDQGNDITVDVKMKPGFLGFPTDFHCHVMPRSPGHAQLIRMVEEQLPSQVSDAAFISSIVNKM

SEQ ID NO: 21123 - DNA, 762 bp, Muscodor strobelii
  misc_feature: SGI cDNA ID NO. 567145
  misc_feature: Encodes the peptide sequence at SEQ ID NO 21124
atggcaactcagaccgacatcactctattcactgagggcacacctaacggactcaaagtatccatcgtgctcgaagagctcgggctggcttacaaggttcgaagtatcaagctgttcgaacatgagcagaaggaaccgtggtttctcgagatcaatcccaatggtcgcattccggccataactgacaagcttgagggcggtggggaggtaaaaatattcgagagcggtgccatattggagtacatcgtggctcgatacgataaggatcacaaaatctcctatccttatggttccaaagagcactgggaaacagcgagctggcttatgtggcaaatgggcggacttgggccaatggctggacaggcaaatcatttcttcggcgccgcgcctgacaagatggagtattgcatcagtcgatacgtcaatgaaactcgccgcctctaccgagtcatggacacccagcttgcaaagaaccctcatggatatctagttggcgatcgtgtcagtattgcagatatctcttgctggccttgggcatgcgcttggaaaagctgtggtctaaaatccatggatgagttccctcatgtcctcgaatggatacagaaactcctcgagcgccctggttttgagagaggacgcaacgtgcctgggccacattttcacattgagctcaataagctctccgatgaagcggtcgaaaaggcaatccgacctagaagcggctgggtcttagaggctatgaagaaagacgccgaagcctag

SEQ ID NO: 21124 - protein, 253 aa, Muscodor strobelii
  misc_feature: SGI Peptide ID NO. 567145
  misc_feature (115)..(207): Pfam Id: PF00043 Pfam Desc: Glutathione S-transferase, C-terminal domain
  misc_feature (5)..(84): Pfam Id: PF02798 Pfam Desc: Glutathione S-transferase, N-terminal domain
  misc_feature (145)..(207): Pfam Id: PF00043 Pfam Desc: Glutathione S-transferase, C-terminal domain
  misc_feature (1)..(251): NCBI GI: 46114316 Blast Desc: FG03000.1 [Gibberella zeae PH-1]
  misc_feature (1)..(253): NCBI GI: 256724598 Blast Desc: [Nectria haematococca mpVI 77-13-4]
  misc_feature (1)..(252): NCBI GI: 270268069 Blast Desc: glutathione S-transferase [Hypocrea virens]
  misc_feature (4)..(252): NCBI GI: 46110236 Blast Desc: FG02000.1 [Gibberella zeae PH-1]
  misc_feature (1)..(252): NCBI GI: 85102100 Blast Desc: NCU04109 [Neurospora crassa OR74A] gi|21622329|emb|CAD36970.1| conserved [Neurospora crassa] gi|28922808|gb|EAA32029.1| NCU04109 [Neurospora crassa OR74A]
  misc_feature (1)..(253): NCBI GI: 116194260 Blast Desc: CHGG_03728 [Chaetomium globosum CBS 148.51] gi|88179641|gb|EAQ87109.1| CHGG_03728 [Chaetomium globosum CBS 148.51]
  misc_feature (3)..(252): NCBI GI: 116198357 Blast Desc: CHGG_07334 [Chaetomium globosum CBS 148.51] gi|88178613|gb|EAQ86081.1| CHGG_07334 [Chaetomium globosum CBS 148.51]
  misc_feature (1)..(252): NCBI GI: 39977725 Blast Desc: MGG_06747 [Magnaporthe grisea 70-15] gi|145013733|gb|EDJ98374.1| MGG_06747 [Magnaporthe grisea 70-15]
  misc_feature (2)..(251): NCBI GI: 258563998 Blast Desc: UREG_07517 [Uncinocarpus reesii 1704] gi|237908251|gb|EEP82652.1| UREG_07517 [Uncinocarpus reesii 1704]
  misc_feature (2)..(252): NCBI GI: 171692425 Blast Desc: protein product [Podospora anserina] gi|170946161|emb|CAP72962.1| protein product [Podospora anserina]
  misc_feature (15)..(208): SWISSPROT Homolog: EC 2.5.1.18 Glutathione transferase
MATQTDITLFTEGTPNGLKVSIVLEELGLAYKVRSIKLFEHEQKEPWFLEINPNGRIPAITDKLEGGGEVKIFESGAILEYIVARYDKDHKISYPYGSKEHWETASWLMWQMGGLGPMAGQANHFFGAAPDKMEYCISRYVNETRRLYRVMDTQLAKNPHGYLVGDRVSIADISCWPWACAWKSCGLKSMDEFPHVLEWIQKLLERPGFERGRNVPGPHFHIELNKLSDEAVEKAIRPRSGWVLEAMKKDAEA

SEQ ID NO: 21125 - DNA, 258 bp, Muscodor strobelii
  misc_feature: SGI EST ID NO. CUFF.49505.0
  misc_feature: Variant of the nucleotide sequence at SEQ ID NO 21123
cttcaatcttcaactgtttcattctcgttagattatcgacctatcgaattctcaacatggcaactcagaccgacatcactctattcactgagggcacacctaacggactcaaagtatccatcgtgctcgaagagctcgggctggcttacaaggttcgaagtatcaagctgttcgaacatgagcagaaggaaccgtggtttctcgagatcaatcccaatggtcgcattccggccataactgacaagcttgagggcggtg

SEQ ID NO: 21126 - DNA, 1029 bp, Muscodor strobelii
  misc_feature: SGI cDNA ID NO. 567146
  misc_feature: Encodes the peptide sequence at SEQ ID NO 21127
atgtcgacgcctacaaatggacgagttatcgttgtgctcagcgccacttcgtcacagggtaatggagctgtagctgcactactgagtgaccccaaagaaaaatggcatatccgagcagtcactaccgatacctcgtctccttgggcagagaaattccgctcgagatataaagatactcaggatcgtgtggaccttgtggctggagatgtatacgacaaggatagtttacgcgccatattctcgggcgcctatgggatcttcgcactcatcagcgagctaaaaccgggccagcgcttggtttcgcccgaggagattcgccatgaagttgatgctggtcgaaacatagttgatatcgcaaagcaatgcggtctacaacacttcgtgatgggcagtctccctgatatgatcaaagcaagttctggccgttatacagagatgtatcacatggaccacaaatttgagatcgagcaatatgccaagacaaagcttgattgtgtgacttgtgtgcttccaggatttttctatagtaaccattattggcctcaatacacacgacttcaagctgatggagttgtccgcttctgcgctccgatacctgggtatagaagcgcacaatgggttgattccggctacgacgtcgggatatttgtccgcgaaatcttcagtctaggtagggacaaaaccgcagggaagaattatccagtcttgagcgcaccagttactatggacagcatggctgccaccttccagcggatcactgggcgaagagcaatccatgaccctcttggccacgatgaatgggcagacttgaccgccaatatgctcggagaagcatttagaacggatgtcaaacagatgatgcaatgggtttctgaagctccagctgataagatatgctatggtgctctaaaccctgaagacgacatctctgcaaacgaactgggggttacagctagtacttttgaggactggttggaacggactggctggacgggtccaacggaagtctatcacgagtcaagcaattga

SEQ ID NO: 21127 - protein, 342 aa, Muscodor strobelii
  misc_feature: SGI Peptide ID NO. 567146
  misc_feature (10)..(261): Pfam Id: PF05368 Pfam Desc: NmrA-like family
  misc_feature (10)..(158): Pfam Id: PF05368 Pfam Desc: NmrA-like family
  misc_feature (8)..(333): NCBI GI: 255949046 Blast Desc: Pc22g13640 [Penicillium chrysogenum Wisconsin 54-1255] gi|211592307|emb|CAP98652.1| Pc22g13640 [Penicillium chrysogenum Wisconsin 54-1255]
  misc_feature (1)..(333): NCBI GI: 242813519 Blast Desc: cinnamoyl-CoA reductase, [Talaromyces stipitatus ATCC 10500] gi|218714522|gb|EED13945.1| cinnamoyl-CoA reductase, [Talaromyces stipitatus ATCC 10500]
  misc_feature (1)..(333): NCBI GI: 256722960 Blast Desc: NECHADRAFT_97441 [Nectria haematococca mpVI 77-13-4]
  misc_feature (1)..(333): NCBI GI: 46127227 Blast Desc: FG07991.1 [Gibberella zeae PH-1]
  misc_feature (129)..(333): NCBI GI: 169777465 Blast Desc: [Aspergillus oryzae RIB40] gi|83771935|dbj|BAE62065.1| protein product [Aspergillus oryzae]
  misc_feature (72)..(333): NCBI GI: 116194262 Blast Desc: CHGG_03729 [Chaetomium globosum CBS 148.51] gi|88179642|gb|EAQ87110.1| CHGG_03729 [Chaetomium globosum CBS 148.51]
  misc_feature (8)..(333): NCBI GI: 238494604 Blast Desc: conserved [Aspergillus flavus NRRL3357] gi|220695188|gb|EED51531.1| conserved [Aspergillus flavus NRRL3357]
  misc_feature (5)..(252): NCBI GI: 85091800 Blast Desc: NCU09169 [Neurospora crassa OR74A] gi|28920477|gb|EAA29843.1| conserved [Neurospora crassa OR74A]
  misc_feature (8)..(267): NCBI GI: 169767944 Blast Desc: [Aspergillus oryzae RIB40] gi|238484873|ref|XP_002373675.1| NmrA family transcriptional regulator, [Aspergillus flavus NRRL3357] protein product oryzae]
  misc_feature (5)..(290): NCBI GI: 238839505 Blast Desc: hscarg protein [Microsporum canis CBS 113480]
MSTPTNGRVIVVLSATSSQGNGAVAALLSDPKEKWHIRAVTTDTSSPWAEKFRSRYKDTQDRVDLVAGDVYDKDSLRAIFSGAYGIFALISELKPGQRLVSPEEIRHEVDAGRNIVDIAKQCGLQHFVMGSLPDMIKASSGRYTEMYHMDHKFEIEQYAKTKLDCVTCVLPGFFYSNHYWPQYTRLQADGVVRFCAPIPGYRSAQWVDSGYDVGIFVREIFSLGRDKTAGKNYPVLSAPVTMDSMAATFQRITGRRAIHDPLGHDEWADLTANMLGEAFRTDVKQMMQWVSEAPADKICYGALNPEDDISANELGVTASTFEDWLERTGWTGPTEVYHESSN

SEQ ID NO: 21128 - DNA, 1083 bp, Muscodor strobelii
  misc_feature: SGI cDNA ID NO. 567147
  misc_feature: Encodes the peptide sequence at SEQ ID NO 21129
atgaaatccagcaagacgcagttcctctttgtacacaataacaatggcccaacccacgtccatggccgtgatcataaaacaagtactaagattcgtcagcacgtcatgcttgatatcggcaaggaacgccgaaagaagctatcgaacccacagattgatgtcgtattggatctgcgagcggccgacagtcacaccggtaacgccgccaagcaggacccctccaccacagatagaccatgtgaaaacgaatattgggagaagaggcacctgaattattcggcacctgagccggcaagaccattttgggatcagcatcctctagacatgatggaaagctactgggacatggatgttttttcggcctatggcataatgtgcatgcttcatgaaggaagaaacctcgtagcaacgaaaatctcggcggagagttttgtgtttccattcgccttctggaagtctaatttcctccgacaatacgccttgctgttcacaagtccggggcaactcgcaggcgtgtccaatgaaaaacctgcaagatttaaggctatggctctccaacggtctttgggatcaatagcgtgcatcgaatccagattgacaaatcctgatcatgataaaacatctattgatagactcattgttggcataattgcagtcatctgtttcaatttaatatcttccgacttggatcaggcgctcatccacatgggcggactagagtcactgatgattcttaggggtggaagtcttgatcacaatgataatgatgaaatgagattgatgattttttgggtcgatgtcgtcacgtccctactggtcgatcgtattccacgatttccgctaccatcagacctccttccagacccggttccattcgcttattcgttaccagtaccgcttcgctgtctgatggatacgagatatcaaagtggtcagaatcttacttatgttctgtcttgtatggcggatcttaccacgatagccgcagagatcgaatccgaactggctgttagaggcgatgcgctatggcaagatccgacgcaacgtcagagatcttacgacacggggcactactttggataa

SEQ ID NO: 21129 - protein, 360 aa, Muscodor strobelii
  misc_feature: SGI Peptide ID NO. 567147
  misc_feature (3)..(345): NCBI GI: 256724718 Blast Desc: NECHADRAFT_48037 [Nectria haematococca mpVI 77-13-4]
  misc_feature (5)..(345): NCBI GI: 116194262 Blast Desc: CHGG_03729 [Chaetomium globosum CBS 148.51] gi|88179642|gb|EAQ87110.1| CHGG_03729 [Chaetomium globosum CBS 148.51]
  misc_feature (2)..(288): NCBI GI: 189209690 Blast Desc: [Pyrenophora tritici-repentis Pt-1C-BFP] gi|187977270|gb|EDU43896.1| [Pyrenophora tritici-repentis Pt-1C-BFP]
MKSSKTQFLFVHNNNGPTHVHGRDHKTSTKIRQHVMLDIGKERRKKLSNPQIDVVLDLRAADSHTGNAAKQDPSTTDRPCENEYWEKRHLNYSAPEPARPFWDQHPLDMMESYWDMDVFSAYGIMCMLHEGRNLVATKISAESFVFPFAFWKSNFLRQYALLFTSPGQLAGVSNEKPARFKAMALQRSLGSIACIESRLTNPDHDKTSIDRLIVGIIAVICFNLISSDLDQALIHMGGLESLMILRGGSLDHNDNDEMRLMIFWVDVVTSLLVDRIPRFPLPSDLLPDPVPFAYSLPVPLRCLMDTRYQSGQNLTYVLSCMADLTTIAAEIESELAVRGDALWQDPTQRQRSYDTGHYFG

SEQ ID NO: 21130 - DNA, 220 bp, Muscodor strobelii
  misc_feature: SGI EST ID NO. CUFF.49522.0
  misc_feature: Variant of the nucleotide sequence at SEQ ID NO 21128
gtccggggcaactcgcaggcgtgtccaatgaaaaacctgcaagatttaaggctatggctctccaacggtctttgggatcaatagcgtgcatcgaatccagattgacaaatcctgatcatgataaaacatctattgatagactcattgttggcataattgcagtcatctgtttcaatttaatatcttccgacttggatcaggcgctcatccacatgggcgg

SEQ ID NO: 21131 - DNA, 222 bp, Muscodor strobelii
  misc_feature: SGI cDNA ID NO. 567148
  misc_feature: Encodes the peptide sequence at SEQ ID NO 21132
atgggcaacattctcagcaagtcggcctccaagaaggccaagcacgacacccccgtctacttccccaacagcattgactactacggcagccccattatcttcggttctgtccgcgagcgttccaatgccggcacgcgtgtgaaggctggtgacaccgctaaggaggatgagaaagagaagaaggagaagtgtgaggatggtgacgaacaggagaaagattag

SEQ ID NO: 21132 - protein, 73 aa, Muscodor strobelii
  misc_feature: SGI Peptide ID NO. 567148
MGNILSKSASKKAKHDTPVYFPNSIDYYGSPIIFGSVRERSNAGTRVKAGDTAKEDEKEKKEKCEDGDEQEKD

SEQ ID NO: 21133 - DNA, 798 bp, Muscodor strobelii
  misc_feature: SGI cDNA ID NO. 567149
  misc_feature: Encodes the peptide sequence at SEQ ID NO 21134
atggtgctttcaaaaacaatcagagattttattgcgagctatggcaacacttggacattgtcagtgaatgccgaatgtgaagagttctttgaggaatgtcacgccccgaagcctgcaccgagcgacatcgaatccaaaaagggcatattgtatggtcctgatgagcgcaacagactggatatttattggcagcatgtcaagaacgcaaccttcttcgcgtcccacggtatgataggcgtcctagcgacttatcgtctacttcccgaagctcgatttccacagggcatggaagataccgcccaagcactgaaatgggttcgaaacaacatcagagactacggtggagattcaagtaagatattcgccatcgggcaaagcgctggggcagcacatctaggtatggctctattctctggtctcttgcgtcgcgagaatgcacttccctacgcggcgatcctccagagtacaccattctggtatgatctctcgattgagagacggaggaacaacatgatgatgtactatggcacggatgatcatgagattattcaatctcaatctgctttaggcatcttcaggggtgtcgagaaggtggacatcccgcttctggtgactgttggggagtatgatcctgatgagattattaaggggaatgcgatgtttttggagaagtatagaaggaagatgaagaagatgcctgtttttgaggtgctgagcggtcataatcatagcacgctcctccttgttgttcctcctaagctttggactacaatcatcttcgtgcgcgatgacgtttga

SEQ ID NO: 21134 - protein, 265 aa, Muscodor strobelii
  misc_feature: SGI Peptide ID NO. 567149
  misc_feature (98)..(130): Pfam Id: PF00135 Pfam Desc: Carboxylesterase
  misc_feature (1)..(250): NCBI GI: 145246698 Blast Desc: An12g05280 [Aspergillus niger] gi|134080319|emb|CAK46241.1| protein product [Aspergillus niger]
  misc_feature (77)..(221): NCBI GI: 238506529 Blast Desc: conserved [Aspergillus flavus NRRL3357] gi|220689179|gb|EED45530.1| conserved [Aspergillus flavus NRRL3357]
  misc_feature (3)..(248): NCBI GI: 94972248 Blast Desc: lipase, active site [Deinococcus geothermalis DSM 11300] gi|94554299|gb|ABF44214.1| Lipase, alpha/beta superfamily hydrolase [Deinococcus geothermalis DSM 11300]
  misc_feature (40)..(250): NCBI GI: 115388049 Blast Desc: [Aspergillus terreus NIH2624] gi|114195614|gb|EAU37314.1| [Aspergillus terreus NIH2624]
  misc_feature (8)..(248): NCBI GI: 146275643 Blast Desc: esterase/lipase-like protein [Novosphingobium aromaticivorans DSM 12444] gi|145322334|gb|ABP64277.1| Esterase/lipase-like protein [Novosphingobium aromaticivorans DSM
  misc_feature (3)..(247): NCBI GI: 78060769 Blast Desc: lipase, active site [Burkholderia sp. 383] gi|77965319|gb|ABB06700.1| Lipase, active site [Burkholderia sp. 383]
  misc_feature (3)..(247): NCBI GI: 94314120 Blast Desc: lipase, active site [Ralstonia metallidurans CH34] gi|93357972|gb|ABF12060.1| lipase, active site [Ralstonia metallidurans CH34]
  misc_feature (3)..(247): NCBI GI: 86750219 Blast Desc: esterase/lipase/thioesterase [Rhodopseudomonas palustris HaA2] gi|86573247|gb|ABD07804.1| Esterase/lipase/thioesterase [Rhodopseudomonas palustris HaA2]
  misc_feature (3)..(247): NCBI GI: 187923478 Blast Desc: Alpha/beta hydrolase fold-3 domain protein [Burkholderia phytofirmans PsJN] gi|187714672|gb|ACD15896.1| Alpha/beta hydrolase fold-3 domain protein [Burkholderia PsJN]
  misc_feature (19)..(250): NCBI GI: 258546165 Blast Desc: lipase [Cardiobacterium hominis ATCC 15826] gi|258518590|gb|EEV87449.1| lipase [Cardiobacterium hominis ATCC 15826]
MVLSKTIRDFIASYGNTWTLSVNAECEEFFEECHAPKPAPSDIESKKGILYGPDERNRLDIYWQHVKNATFFASHGMIGVLATYRLLPEARFPQGMEDTAQALKWVRNNIRDYGGDSSKIFAIGQSAGAAHLGMALFSGLLRRENALPYAAILQSTPFWYDLSIERRRNNMMMYYGTDDHEIIQSQSALGIFRGVEKVDIPLLVTVGEYDPDEIIKGNAMFLEKYRRKMKKMPVFEVLSGHNHSTLLLVVPPKLWTTIIFVRDDV

SEQ ID NO: 21135 - DNA, 331 bp, Muscodor strobelii
  misc_feature: SGI EST ID NO. CUFF.49541.0
  misc_feature: Variant of the nucleotide sequence at SEQ ID NO 21133
acgatatatcgcctcatcttcatagcaacatcgcaaccttcttcgcgtcccacggtatgataggcgtcctagcgacttatcgtctacttcccgaagctcgatttccacagggcatggaagataccgcccaagcactgaaatgggttcgaaacaacatcagagactacggtggagattcaagtaagatattcgccatcgggcaaagcgctggggcagcacatctaggtatggctctattctctggtctcttgcgtcgcgagaatgcacttccctacgcggcgatcctccagagtacaccattctggtatgatctctcgattgagagacggag

SEQ ID NO: 21136 - DNA, 2286 bp, Muscodor strobelii
  misc_feature: SGI cDNA ID NO. 567150
  misc_feature: Encodes the peptide sequence at SEQ ID NO 21137
atgccggacgaagagatggagatttcggtcgacttcggccagcctggctttagcgaggatatcgacattgatctagatttccccgttggacaacacgatgaagacatgattctcggcgactatgaccagatccaagacatgaacaacttcaatgctgacaaccatgacgagatgatgggcgatgatgcggacgagacatacggcatgatcgatgctcaggagaccgagcataatgcctctgccgtcgctgccaacgatatcgatctcgatctcggcaccgctgtcgaccctgactggcagccaagcactgtcgatgctgcctttgatgacgatgccgagattgactatctcgaagaggaagaagatgtcgcggccaatatttcgactagcaacaaacccgccgttggtgagaatgaagtatcagaacccgtgaacgcagactgggttgttggagatctaagtgcttctgaggctcacgagttttaccacaatgatatcctccccgaacgtgacttagagagccttaaaaacgaaggccagaagcaattgaatgtagaagatgatgctctcgacatcccaaatgatcatggtcacgatactactgaaactagcattgccaaggccgaggacgcacttccggctcaggaagcaccagcagccccggagacgggacatgacaacaatcagactactaccgaggaaggaaatgaccccgttgatgcaagcggcgatcaggcaggctcggcaggctcggtaggctctctgcactctgggcaagaagagggggatgattttgcggcagaccttgatacccttgagtatcagttaggtgattttgacgacgccaatgatcaggtctacgatggcaatgactctccattcgaatctgctaccaatgctgaagcaacgtccgagcatgcgagcagcccagccgttgatctcgaggacttcgaagcgggtctgaccaatggtacggatccgaaggcttctgtccctgcaacttctagttcgacctcccctgttgagcttctccggcgttatggcctgtacatttcctatggcgaaacagattacagtctgttcgccagttccgaggatgacgacccgaaccactatttcctcagtgacaagaatgctttgaatattccgctctccgattttttggccagcttgcgtgacgtcgtagcagaggaaatttctcccctggatgagcttgtgatgcatgtcgacggcctcggtctcgagttttctgagtctacaagccctgattttctccaaaaatacacgttcggtgacctcgtagtattgtatgataaactcatcaagaatgatgaagcaggctctcgctcagatctttatacttacctgttagtcaagccaagctgccagcagcgtctcatggcactctatgagagtgcaaacgccggtaggggcttttctgagattgccatgttccgcgattcgccctcctttatcgccgaaaacgagagggaagaggaatttgatgatgtaggcagtacccataacagcccttctggggctgaggaaaatcaaacgggcgacaacaagcatggcgatgctcaagatggccacgagcaagaggaggagcacagttatctcgacgagttcgaggcagacgacggaccagacgatcacggcgaggacgcctcggccctggaagttgccgctcacggatcggatgtagtcggtgtccagcctgagactgttgtcgaacctgtcaatcatgaatccggcgctgatacgacgcacgacacaacagatatccctgatgccactttggaggaacacgaatcaacagaggactcgttcaagcacgagtcgacccggcccaaactccagagcgacggcgatgaaatacagcacagtaagaccgaatcggacgttgcacctaatccactagcgaccacaaaagtcgcgcctatcgacttgcctcactccgagaacactagcgtcacagcaaccttaaatggcgatgacgcggacgagatcgattactccgatggagaggacgacgtagatcatgacttagtggctgagaacaatgggctcgagaagccttcgggaggagcacgcgctttgcaggtcccgctggatgatgaaattacatgggagtcagaaaacgaagaggctaagaatactttgaaaatcgcgtctcccaagcgtacggtacaagtgtcaccagtatctgggaagcgaacgcggtccgattcggacaacctggagaccgacggtgaagagaacgatgtcaagcgtcttcgatcttga

SEQ ID NO: 21137 - protein, 761 aa, Muscodor strobelii
  misc_feature: SGI Peptide ID NO. 567150
  misc_feature (349)..(479): NCBI GI: 145615561 Blast Desc: MGG_05675 [Magnaporthe grisea 70-15] gi|145022368|gb|EDK06388.1| MGG_05675 [Magnaporthe grisea 70-15]
  misc_feature (349)..(538): NCBI GI: 46122115 Blast Desc: FG05435.1 [Gibberella zeae PH-1]
  misc_feature (349)..(489): NCBI GI: 256729743 Blast Desc: NECHADRAFT_105076 [Nectria haematococca mpVI 77-13-4]
  misc_feature (349)..(482): NCBI GI: 261360177 Blast Desc: conserved [Verticillium albo-atrum VaMs.102]
  misc_feature (349)..(478): NCBI GI: 85078489 Blast Desc: NCU00492 [Neurospora crassa OR74A] gi|28917228|gb|EAA26941.1| [Neurospora crassa OR74A]
  misc_feature (349)..(476): NCBI GI: 171686178 Blast Desc: protein product [Podospora anserina] gi|170943050|emb|CAP68703.1| protein product [Podospora anserina]
  misc_feature (347)..(479): NCBI GI: 154301914 Blast Desc: [Botryotinia fuckeliana B05.10] gi|150855586|gb|EDN30778.1| [Botryotinia fuckeliana B05.10]
  misc_feature (349)..(499): NCBI GI: 116207716 Blast Desc: CHGG_03151 [Chaetomium globosum CBS 148.51] gi|88183748|gb|EAQ91216.1| CHGG_03151 [Chaetomium globosum CBS 148.51]
  misc_feature (335)..(480): NCBI GI: 261191432 Blast Desc: conserved [Ajellomyces dermatitidis SLH14081] gi|239589890|gb|EEQ72533.1| conserved [Ajellomyces dermatitidis SLH14081]
  misc_feature (335)..(480): NCBI GI: 239612703 Blast Desc: conserved [Ajellomyces dermatitidis ER-3]
MPDEEMEISVDFGQPGFSEDIDIDLDFPVGQHDEDMILGDYDQIQDMNNFNADNHDEMMGDDADETYGMIDAQETEHNASAVAANDIDLDLGTAVDPDWQPSTVDAAFDDDAEIDYLEEEEDVAANISTSNKPAVGENEVSEPVNADWVVGDLSASEAHEFYHNDILPERDLESLKNEGQKQLNVEDDALDIPNDHGHDTTETSIAKAEDALPAQEAPAAPETGHDNNQTTTEEGNDPVDASGDQAGSAGSVGSLHSGQEEGDDFAADLDTLEYQLGDFDDANDQVYDGNDSPFESATNAEATSEHASSPAVDLEDFEAGLTNGTDPKASVPATSSSTSPVELLRRYGLYISYGETDYSLFASSEDDDPNHYFLSDKNALNIPLSDFLASLRDVVAEEISPLDELVMHVDGLGLEFSESTSPDFLQKYTFGDLVVLYDKLIKNDEAGSRSDLYTYLLVKPSCQQRLMALYESANAGRGFSEIAMFRDSPSFIAENEREEEFDDVGSTHNSPSGAEENQTGDNKHGDAQDGHEQEEEHSYLDEFEADDGPDDHGEDASALEVAAHGSDVVGVQPETVVEPVNHESGADTTHDTTDIPDATLEEHESTEDSFKHESTRPKLQSDGDEIQHSKTESDVAPNPLATTKVAPIDLPHSENTSVTATLNGDDADEIDYSDGEDDVDHDLVAENNGLEKPSGGARALQVPLDDEITWESENEEAKNTLKIASPKRTVQVSPVSGKRTRSDSDNLETDGEENDVKRLRS

SEQ ID NO: 21138 - DNA, 4158 bp, Muscodor strobelii
  misc_feature: SGI EST ID NO. CUFF.49785.1
  misc_feature: Variant of the nucleotide sequence at SEQ ID NO 21136
ccgggctctgggcaagaacggctcacctgtagttggcagcctgcctccaacacacaatgggggtcttggtcattgaatgattccgcgctaacgggagcctaatcactttttgacaaggtgcagccgcgatcgtcgcatctacctcacccatcatcgtcctgggaataattaatttcctattcatgaaccggtacagcttcatccgatcccgacgcatcgcgccatcgagtactgtcgacatagacatggcctcatgattgtcttcatcattcggcttgcgtccggttcatcggctcactaagatatagcgtcccgcgcggaacaaagggctgcgacgacagcctgacgccaacaaagtgtcacctttgccaccagccgaacgcgtcctgaccgtcaaccgcaccttcccccctatcgccgaccacataaccttcatccctccatcccttcattcaatcatcagcgatctgcctttctcgccgagagacactatttactctcatttgagtcatcatctatgaatgaatgagattgtctttcactcaagaatagctgcagatatctgataaccatcagcaaacacgatttcgacattcgacctccttccattgtataccgacaccgagagatcccaccgacctattttccaccccccatccgagaccgccatatgctccctatgtcatttgcgcgtaaagctaaatgactgatttgtgcaacaaactatatcagcctactgttgccttcggtgcactgcacatactaaagagcaccagtggcaaagcaaccaccttctttgtgacatctgatttgtgcctcagtgaatcagtgcctgttcatcccatctctcgaatgggttgataccagcacctggacgctctcaccccagaacacctggcattttctacttgcaagtcttgcaggattgaataccttcaggagtggtgactccatcgataccattgttgcatcgttctggggttccttgatcttcggtgaacctcggctcgtaaaatctacctctcacaaaagctacctcttgttgtgtttgttgctgtgcgaccgcagagcataaagccaactttgttttggtctttgcgcctcccacaacacccttccctatttcccctttccatgaccctagttcctaattcacactctattacatcatctcccatcaccaaaagtgtgtatagaaagctcagttgagtatttacgcaactccgcacttaccaccgcaacaaaccacagtcgcaacgatgccggacgaagagatggagatttcggtcgacttcggccagcctggctttagcgaggatatcgacattgatctagatttccccgttggacaacacgatgaagacatgattctcggcgactatgaccagatccaagacatgaacaacttcaatgctgacaaccatgacgagatgatgggcgatgatgcggacgagacatacggcatgatcgatgctcaggagaccgagcataatgcctctgccgtcgctgccaacgatatcgatctcgatctcggcaccgctgtcgaccctgactggcagccaagcactgtcgatgctgcctttgatgacgatgccgagattgactatctcgaagaggaagaagatgtcgcggccaatatttcgactagcaacaaacccgccgttggtgagaatgaagtatcagaacccgtgaacgcagactgggttgttggagatctaagtgcttctgaggctcacgagttttaccacaatgatatcctccccgaacgtgacttagagagccttaaaaacgaaggccagaagcaattgaatgtagaagatgatgctctcgacatcccaaatgatcatggtcacgatactactgaaactagcattgccaaggccgaggacgcacttccggctcaggaagcaccagcagccccggagacgggacatgacaacaatcagactactaccgaggaaggaaatgaccccgttgatgcaagcggcgatcaggcaggctcggcaggctcggtaggctctctgcactctgggcaagaagagggggatgattttgcggcagaccttgatacccttgagtatcagttaggtgattttgacgacgccaatgatcaggtctacgatggcaatgactctccattcgaatctgctaccaatgctgaagcaacgtccgagcatgcgagcagcccagccgttgatctcgaggacttcgaagcgggtctgaccaatggtacggatccgaaggcttctgtccctgcaacttctagttcgacctcccctgttgagcttctccggcgttatggcctgtacatttcctatggcgaaacagattacagtctgttcgccagttccgaggatgacgacccgaaccactatttcctcagtgacaagaatgctttgaatattccgctctccgattttttggccagcttgcgtgacgtcgtagcagaggaaatttctcccctggatgagcttgtgatgcatgtcgacggcctcggtctcgagttttctgagtctacaagccctgattttctccaaaaatacacgttcggtgacctcgtagtattgtatgataaactcatcaagaatgatgaagcaggctctcgctcagatctttatacttacctgttagtcaagccaagctgccagcagcgtctcatggcactctatgagagtgcaaacgccggtaggggcttttctgagattgccatgttccgcgattcgccctcctttatcgccgaaaacgagagggaagaggaatttgatgatgtaggcagtacccataacagcccttctggggctgaggaaaatcaaacgggcgacaacaagcatggcgatgctcaagatggccacgagcaagaggaggagcacagttatctcgacgagttcgaggcagacgacggaccagacgatcacggcgaggacgcctcggccctggaagttgccgctcacggatcggatgtagtcggtgtccagcctgagactgttgtcgaacctgtcaatcatgaatccggcgctgatacgacgcacgacacaacagatatccctgatgccactttggaggaacacgaatcaacagaggactcgttcaagcacgagtcgacccggcccaaactccagagcgacggcgatgaaatacagcacagtaagaccgaatcggacgttgcacctaatccactagcgaccacaaaagtcgcgcctatcgacttgcctcactccgagaacactagcgtcacagcaaccttaaatggcgatgacgcggacgagatcgattactccgatggagaggacgacgtagatcatgacttagtggctgagaacaatgggctcgagaagccttcgggaggagcacgcgctttgcaggtcccgctggatgatgaaattacatgggagtcagaaaacgaagaggctaagaatactttgaaaatcgcgtctcccaagcgtacggtacaagtgtcaccagtatctgggaagcgaacgcggtccgattcggacaacctggagaccgacggtgaagagaacgatgtcaagcgtcttcgatcttgaaaccttgcaagtcgactatgatgctttctatgtcccctttctgagctattgcacaccctttcgacttgagcagcttccctcacgacaggactctgctgattccaaacccttacagcacccgcataacggctttgcgcatgatttctcatatagatctcccgaatcacccatcccactgtaggaatactaaccatagcaggtgtgcggagtatctagatgtgtgatctagatattcgaggtaagtaaaccgcgtcatcgacaacgattccccggatgtgtcttgtattgtctagtctctccttccctggtccttatgcctggtctcggtcacacactggactggtgatggatgcgatacccctggcgttagaacaaatggttgcaaaacatggacatggcatggtggcttttggctgttggagttcaaattgttggcgttatcctgttgggactacaagttacacaagagtgtaaggtgggactacacctaaacaagcaactacatgaatgaagtactcactgaattcaccctatactctaattttaatgcgcgccttactcaattgctgtgtgcgatactgcaacttgccattatttgagtattgtgatgtaa

SEQ ID NO: 21139 - DNA, 1494 bp, Muscodor strobelii
  misc_feature: SGI cDNA ID NO. 567151
  misc_feature: Reduced expression when VOC is produced
  misc_feature: Encodes the peptide sequence at SEQ ID NO 21140
atggttgtcctagcggcttccatctgcacccgtggggggaaggctgtcctctcgaggcagttccgagagatgccccggtcgcgcatcgaggccctcctcgcctcgttccccaagctggcggactcgggtacgcagcacacaacggtcgagcaggacaacgtccgcttcgtctaccagccgctggacgagctgtacatggtgctcatcaccaacaagcagtccaacatcctgcaggacatcgactcgctgcacctgttcgcccaggtcgtctccagcacctgccgcaccctcgacgagcgcgagatcgtcaagaacgcctacgagctgctcagcgccttcgacgagatcgtcaccctcggctaccgcgagaacctgaccctcagccagatcaagaccttcctcgagatggagagccacgaggagcgcatccaggagatcatcgcccgcaacaaggagctcgaggccaccgaggagcgcaagcgcaaggccaagcagctcgagatgcagcgcaaggagtccgcccgcagcggcaggcccggcgccccccaggaccccccctacgaggccgagaagaacaagtcctacaaacccgccgcttcaaaggtcaagggcatgcagctaggcaagaagtccaagaccaccgacatgttcgagcgtgttcgcggcgatatgggcgccgaggtcgacgacacacctctagtaccagtggctgctgctgcgcccgctgccgagcccgctgcggccgcaccgcatctgccctcgtccctcgaccgagacgccatacatgtcactatcaacgagtcgatcggtgccaagatatcacgagaaggatccctcaactccctgaccgtcagcggtgacctgagcctgcgcattaccgaccccagtctcaccaaagtcaaactcaacttggctgccactccctcccatggcgcccagttccgcacccatcccaacgttgaccgtggtgtgtggtccagctcgcaagtcattcagatgagtaatgccgctcgcgggttccctgtcaacaactctgttggtgtactgcgatggagggctactcccaaggtggacgactcaagcgccctgcccatcagctttacagtctgggtgaacaagggtcaaggaggtcttcagaccatcaccattgaatacgaactcactggaggggacactctcaaggatgtctcggttgtcatcccctacgccacgagcgaacccgcaatcaacagcttcgatgccgtctacgaggtgtccggagacagtttagaatggtcgatcggctcggtgagcgacgacaacgccaacggctccttcgagtttgatgcccatgccgaggacgagaacgagtttttccccatgcaagtccgtttctccaagacatcgccatttgtcgatgttgatgtttcatcagtgttattagttgaagaggaggaggaagtcaccttctccaaagacataagatcggtagctgataactatctcgtcgaatag

SEQ ID NO: 21140 - protein, 497 aa, Muscodor strobelii
  misc_feature: SGI Peptide ID NO. 567151
  misc_feature (250)..(483): Pfam Id: PF00928 Pfam Desc: Adaptor complexes medium subunit family
  misc_feature (1)..(497): NCBI GI: 39941530 Blast Desc: MGG_05676 [Magnaporthe grisea 70-15] gi|145022369|gb|EDK06389.1| MGG_05676 [Magnaporthe grisea 70-15]
  misc_feature (1)..(497): NCBI GI: 154301916 Blast Desc: BC1G_10195 [Botryotinia fuckeliana B05.10] gi|150855587|gb|EDN30779.1| BC1G_10195 [Botryotinia fuckeliana B05.10]
  misc_feature (1)..(497): NCBI GI: 46122117 Blast Desc: FG05436.1 [Gibberella zeae PH-1]
  misc_feature (1)..(497): NCBI GI: 171686180 Blast Desc: protein product [Podospora anserina] gi|170943051|emb|CAP68704.1| protein product [Podospora anserina]
  misc_feature (1)..(497): NCBI GI: 116207718 Blast Desc: CHGG_03152 [Chaetomium globosum CBS 148.51] gi|88183749|gb|EAQ91217.1| CHGG_03152 [Chaetomium globosum CBS 148.51]
  misc_feature (1)..(497): NCBI GI: 256729930 Blast Desc: [Nectria haematococca mpVI 77-13-4]
  misc_feature (1)..(497): NCBI GI: 85078493 Blast Desc: NCU00493 [Neurospora crassa OR74A] gi|28917229|gb|EAA26942.1| NCU00493 [Neurospora crassa OR74A]
  misc_feature (24)..(497): NCBI GI: 156051436 Blast Desc: SS1G_07125 [Sclerotinia sclerotiorum 1980] gi|154704903|gb|EDO04642.1| SS1G_07125 [Sclerotinia sclerotiorum 1980]
  misc_feature (1)..(497): NCBI GI: 70996394 Blast Desc: Coatomer subunit delta [Aspergillus fumigatus Af293] gi|66850587|gb|EAL90914.1| Coatomer subunit delta, [Aspergillus fumigatus Af293] gi|159131706|gb|EDP56819.1| Coatomer subunit
  misc_feature (1)..(497): NCBI GI: 119494688 Blast Desc: Coatomer subunit delta, [Neosartorya fischeri NRRL 181] gi|119412325|gb|EAW22266.1| Coatomer subunit delta, [Neosartorya fischeri NRRL 181]
  misc_feature: Useful for introducing or modulating the production of volatile compounds
MVVLAASICTRGGKAVLSRQFREMPRSRIEALLASFPKLADSGTQHTTVEQDNVRFVYQPLDELYMVLITNKQSNILQDIDSLHLFAQVVSSTCRTLDEREIVKNAYELLSAFDEIVTLGYRENLTLSQIKTFLEMESHEERIQEIIARNKELEATEERKRKAKQLEMQRKESARSGRPGAPQDPPYEAEKNKSYKPAASKVKGMQLGKKSKTTDMFERVRGDMGAEVDDTPLVPVAAAAPAAEPAAAAPHLPSSLDRDAIHVTINESIGAKISREGSLNSLTVSGDLSLRITDPSLTKVKLNLAATPSHGAQFRTHPNVDRGVWSSSQVIQMSNAARGFPVNNSVGVLRWRATPKVDDSSALPISFTVWVNKGQGGLQTITIEYELTGGDTLKDVSVVIPYATSEPAINSFDAVYEVSGDSLEWSIGSVSDDNANGSFEFDAHAEDENEFFPMQVRFSKTSPFVDVDVSSVLLVEEEEEVTFSKDIRSVADNYLVE

SEQ ID NO: 21141 - DNA, 2021 bp, Muscodor strobelii
  misc_feature: SGI EST ID NO. CUFF.49835.0
  misc_feature: Variant of the nucleotide sequence at SEQ ID NO 21139
ggacagctggctggattgacatctggcgacatactgcctgtggcaagtcgacttcagtgtggcctttcagcataatccattggcaacagagttgaagattgactgtctgatccacgacagctgtgttcgcaacgacctccttttctttctctgcctcggcatcttcctacccccctctccccttttcttcggcgagccactggttcatacaccaacaaattcaagatggttgtcctagcggcttccatctgcacccgtggggggaaggctgtcctctcgaggcagttccgagagatgccccggtcgcgcatcgaggccctcctcgcctcgttccccaagctggcggactcgggtacgcagcacacaacggtcgagcaggacaacgtccgcttcgtctaccagccgctggacgagctgtacatggtgctcatcaccaacaagcagtccaacatcctgcaggacatcgactcgctgcacctgttcgcccaggtcgtctccagcacctgccgcaccctcgacgagcgcgagatcgtcaagaacgcctacgagctgctcagcgccttcgacgagatcgtcaccctcggctaccgcgagaacctgaccctcagccagatcaagaccttcctcgagatggagagccacgaggagcgcatccaggagatcatcgcccgcaacaaggagctcgaggccaccgaggagcgcaagcgcaaggccaagcagctcgagatgcagcgcaaggagtccgcccgcagcggcaggcccggcgccccccaggaccccccgtctaccccgacctacacgcccgcccacccgccccacgcccaccgacacctacgacagctacgaggccgagaagaacaagtcctacaaacccgccgcttcaaaggtcaagggcatgcagctaggcaagaagtccaagaccaccgacatgttcgagcgtgttcgcggcgatatgggcgccgaggtcgacgacacacctctagtaccagtggctgctgctgcgcccgctgccgagcccgctgcggccgcaccgcatctgccctcgtccctcgaccgagacgccatacatgtcactatcaacgagtcgatcggtgccaagatatcacgagaaggatccctcaactccctgaccgtcagcggtgacctgagcctgcgcattaccgaccccagtctcaccaaagtcaaactcaacttggctgccactccctcccatggcgcccagttccgcacccatcccaacgttgaccgtggtgtgtggtccagctcgcaagtcattcagatgagtaatgccgctcgcgggttccctgtcaacaactctgttggtgtactgcgatggagggctactcccaaggtggacgactcaagcgccctgcccatcagctttacagtctgggtgaacaagggtcaaggaggtcttcagaccatcaccattgaatacgaactcactggaggggacactctcaaggatgtctcggttgtcatcccctacgccacgagcgaacccgcaatcaacagcttcgatgccgtctacgaggtgtccggagacagtttagaatggtcgatcggctcggtgagcgacgacaacgccaacggctccttcgagtttgatgcccatgccgaggacgagaacgagtttttccccatgcaagtccgtttctccaagacatcgccatttgtcgatgttgatgtttcatcagtgttattagttgaagaggaggaggaagtcaccttctccaaagacataagatcggtagctgataactatctcgtcgaataggcgagtcagtggatgatcacgagggttcaaattttaatcgagcagatttactgtagaatccgttttgcgaaatggtagatgggacaggaaaatcggttcagtgtagagtggaggccatgaccgttgctgctcaggggatgatgcttctcaaggcgcaaatcaaccccgattaaaataatacaaaattccactatattcgtggctctgccgtacaattcaagtcttatgtgcaacctcatggcgc

SEQ ID NO: 21142 - DNA, 2334 bp, Muscodor strobelii
  misc_feature: SGI cDNA ID NO. 567152
  misc_feature: Encodes the peptide sequence at SEQ ID NO 21143
atgacggaaccaatcgagctccagctcctcagccagtcgcgctttgagactagggtgcaccaagacctcatatcttacaaccccgtcattgagctattcgccggcccagcaggcccaacgacgctccagatatggcgttccaacagccaggtggtcgccaagagctcacttcgcggagaaaaagagaccgtgcaagccctccactggaagccggatggccaattccttgctgtgggatggagcgatggcatcttgcggctcatgggtctagagacaagcaaggctgttcatcagatgtcgatttgtgatgatggcaaatcgaagatcaccacgattggttgggcgcaaaatcttgcgggagagcgtacggctgagactgccgagtcttccgtcaagagctgggagcaattagcctcacagggtcttgatgtcaacaagaagaagcctactgctgacttgccgagagaactcacattcctcgaagtcgagactgctcttccaaaaattagccctctcccagcatcaggaggatcgggcgatgatatgtacgtatttacgactagcgcatcactcgactttctgttccgaccattctcccgagatgacaacgacaaagtcgatgtgatgatcgtaggcacagatgacggtcgcgtccatgtcagcatctacgactcattcatcattggcagtttcacatattccttgcccgagagacctattgccatccaactctataaaagcgcttctcatctggatgtctcaactcatatgctcgtcttcacaccatgcgcagaggagaagcccaaaattctctaccttgtacccatagacttgaccttcattcactcttccccagagaacctgtccttgttggcatcgaaaacgaccaccttacagaagctcctaagatacgtcaaacaggtacagatacatatggtacacgaatggcagtctacccgagagctacctaataagttcattaacagcatcaacgagactttgcgagaaactggaacgtatggtgatatgacgatcggccaggccttataccactctgttgtcacgggtcacactttcccagaagtcaaagaatggctcgttgatcaacttgcggagcgcggacataaacggtgggataaggcagtggtaacaggcctgcaaggactacgaagcctagtccacgagaacttcatcccagcactagagcgcatcggcgtcattctcagtcgcttactgggcattgccagattccacgagacgaaatccgagattgggttcaccagtgcgcaggtactaaaagccatggacgccgtctcgtgcttactgcttgtcggccacaagatccttctcctcgtgatggaggagctagaactcttccaggctttctcaatttggctccgtcatgaaattgacagacttgcctcctcatcagtttctgacgaattgaccgagaaagaagccacaatggagcacggaaagattttggcgtatatccaacagtatatggcagcaagtcccctgcgcaactacctcagcagtgtagcaactgaagtggccaaaggagatcacgaaatgtctgagagtggtgactccctgctcgaaacactcaagacacatatacataaacaagagtctggtcaggagtcggtaggctcaatgtcccaggtcgaatacctgtgcaaattcctcgatgggagaactacggccgtcctggatggaattgccgaagccgagcgacgaagcgtccgcttcggccagctgaccgagatcaagctcgagcatcctgtgtcacacttcgatattcgcatgtcagctacgccagttgaggagagctggcgtagcgtgacccatatcgtcttaactaccgaagagcatgaaagtcaagtgtacatcttccgctcctcggccataatcacaaacggcatttgcagtagcgtaacgaccgagtacacgcacatgactctcggtgacgggaagatattggacgtcaaattcttatacgatgacagtttactcgttctctgggctgtgaaggatgcacccctccgcctcatacgcgtcccccaccaatcatcagaactaggctacgtgacctataggcctggcgttgacacgccaccccacgaactcagcaacgatcaaatcacaagtgtgttcctcaacatgactgtacctgtcggaccagacttcacacccgcgcagatggaggtcagagaggccagtgcggaaaggggaaatttaccgccaagagtggctctactcgacaaggagggaaggacgtacaaggtgttcaaattgcctgaggatccttttgtgtctgttcgcggtagttga

SEQ ID NO: 21143 - protein, 777 aa, Muscodor strobelii
  misc_feature: SGI Peptide ID NO. 567152
  misc_feature (1)..(770): NCBI GI: 256729929 Blast Desc: NECHADRAFT_101327 [Nectria haematococca mpVI 77-13-4]
  misc_feature (1)..(767): NCBI GI: 46122119 Blast Desc: FG05437.1 [Gibberella zeae PH-1]
  misc_feature (11)..(767): NCBI GI: 171686182 Blast Desc: protein product [Podospora anserina] gi|170943052|emb|CAP68705.1| protein product [Podospora anserina]
  misc_feature (2)..(592): NCBI GI: 145615565 Blast Desc: MGG_05678 [Magnaporthe grisea 70-15] gi|145022371|gb|EDK06391.1| MGG_05678 [Magnaporthe grisea 70-15]
  misc_feature (1)..(770): NCBI GI: 156051438 Blast Desc: SS1G_07126 [Sclerotinia sclerotiorum 1980] gi|154704904|gb|EDO04643.1| SS1G_07126 [Sclerotinia sclerotiorum 1980]
  misc_feature (44)..(764): NCBI GI: 154301918 Blast Desc: BC1G_10196 [Botryotinia fuckeliana B05.10] gi|150855588|gb|EDN30780.1| BC1G_10196 [Botryotinia fuckeliana B05.10]
  misc_feature (72)..(772): NCBI GI: 261360171 Blast Desc: conserved [Verticillium albo-atrum VaMs.102]
  misc_feature (181)..(769): NCBI GI: 116207720 Blast Desc: CHGG_03153 [Chaetomium globosum CBS 148.51] gi|88183750|gb|EAQ91218.1| CHGG_03153 [Chaetomium globosum CBS 148.51]
  misc_feature (24)..(731): NCBI GI: 238484105 Blast Desc: anaphase-promoting complex component Cut20/Apc4, [Aspergillus flavus NRRL3357] gi|220701341|gb|EED57679.1| anaphase-promoting complex component Cut20/Apc4, [Aspergillus
  misc_feature (24)..(690): NCBI GI: 119494727 Blast Desc: NFIA_009620 [Neosartorya fischeri NRRL 181] gi|119412341|gb|EAW22282.1| conserved [Neosartorya fischeri NRRL 181]
MTEPIELQLLSQSRFETRVHQDLISYNPVIELFAGPAGPTTLQIWRSNSQVVAKSSLRGEKETVQALHWKPDGQFLAVGWSDGILRLMGLETSKAVHQMSICDDGKSKITTIGWAQNLAGERTAETAESSVKSWEQLASQGLDVNKKKPTADLPRELTFLEVETALPKISPLPASGGSGDDMYVFTTSASLDFLFRPFSRDDNDKVDVMIVGTDDGRVHVSIYDSFIIGSFTYSLPERPIAIQLYKSASHLDVSTHMLVFTPCAEEKPKILYLVPIDLTFIHSSPENLSLLASKTTTLQKLLRYVKQVQIHMVHEWQSTRELPNKFINSINETLRETGTYGDMTIGQALYHSVVTGHTFPEVKEWLVDQLAERGHKRWDKAVVTGLQGLRSLVHENFIPALERIGVILSRLLGIARFHETKSEIGFTSAQVLKAMDAVSCLLLVGHKILLLVMEELELFQAFSIWLRHEIDRLASSSVSDELTEKEATMEHGKILAYIQQYMAASPLRNYLSSVATEVAKGDHEMSESGDSLLETLKTHIHKQESGQESVGSMSQVEYLCKFLDGRTTAVLDGIAEAERRSVRFGQLTEIKLEHPVSHFDIRMSATPVEESWRSVTHIVLTTEEHESQVYIFRSSAIITNGICSSVTTEYTHMTLGDGKILDVKFLYDDSLLVLWAVKDAPLRLIRVPHQSSELGYVTYRPGVDTPPHELSNDQITSVFLNMTVPVGPDFTPAQMEVREASAERGNLPPRVALLDKEGRTYKVFKLPEDPFVSVRGS
